United States Patent Application Publication US 2011/0183924 A1 - sequence listing, part 119

SEQ ID NO: 341819 - DNA, 3005 bp, Homo sapiens
gcggccgcaccatcgactcgccaacgagagaaggtcctggggcacggacaccgacgggttgcgactgtgacgtgaggtgttctcgcgcgcgctagcgcgcgtctccgggtgccgctgacgggcgtgcgcgcttgtgcggagccggaggtgggggccgaaccagccaaggttgcgggggccgcagagccggacgaagacggagggcggagccggcttcgggactgcggagactacacaccgagcgagcgcctgggcccgaagggagcgatgctgtggttccagggcgccattccggccgccatcgcgacggccaaaaggagcggcgcggtcttcgtggtgttcgtggcaggtgatgatgaacagtctacacagatggctgcaagttgggaagatgataaagttacagaagcatcttcaaacagttttgttgctattaaaatcgataccaaaagtgaagcctgcctacagttttcacaaatctatcctgtagtgtgtgttccatccagtttctttattggagacagtggaattcccttggaagtaatagcaggaagtgtttctgcagatgaacttgttacaagaattcacaaggtccgacagatgcatttgctaaaaagtgaaacatcagtagcaaatggcagtcagtcagaaagttcagtgtctactccatctgcgtcatttgaacctaacaacacttgtgaaaactctcagtccagaaatgcagagctttgtgagataccacccacttctgatacaaagtcagatactgcaacaggaggagaaagtgcaggccatgccacttcctctcaggagcctagtggatgctcagatcagagacctgcagaggacctcaacatccgagtggaaagactaacaaaaaaacttgaagaaaggagagaagagaaaagaaaagaggaagaacagagagaaattaagaaggaaattgagaggagaaaaactggaaaagaaatgttggattataaaagaaaacaagaagaagaattaacaaaaagaatgtaggtccttgcttatatggcaaccactgctagaaccctaaaagaaccaaaaatctgccacagcctgcctccatcagcttcttatttagtatttcatatgcccattagccctatgcttcagatgacacgttttgtttagagctactttgctccaagactcttaagcccaaagtaactggtatgtcactgagtaacttgactcggtgtcagagcattttaactagccactcagatgagaatttatgtttaacttctctttttactcatcagctgcaagcaaaatcttgtagtttttaatcttaaacactgaataaaaaaactttcccctaaattggaatgatcttagttttgctttgagttttgttatctagcatctttttgttgcacagggctctattgaggtcctatgtctctgatttttttttttccccagtattgccctggagctgtctctggaaagtagctggcgaggttaccttaactatcactgaagaaagaaattttctgacacactgatggcatgtgacttgtctcctaagtcagtgaggcatcactttgtttgcataaagtatacggtttgttaaggcctttgttcttgtgagatgcaaaacagctgctagtctgcaacctagttttccctctcacctttaactgacgttttgtcctcaataattacacaaggacctagagtacctataggacaaaaagtatagaataaaaatatgcctttagtcatttggtttttcttaaaaagttgagattcttaatctgacttacatgttactttatccgtatgtctttgttagtggagaccgctaaactaatgatgtttgaaaacagttcctctgttttagattggaagatagcactctagagtggacatacggaaagactgtgactttattttgtaatgggaggaagaaattttctcagagcaaactttctattttttacctgtgaaataacagtgactttttaaaatggtgacagtgttggcaaggaaacagcaacacaggctgcgctgttggtaggagtgaaaaccagtataattcttctgaaaaacatttatcagaaacttaaaatatttcataccgtttgatccagtagcttcttctaaatcataaatgcagacaatgtttaggtaaagacatactcattaagtgttatttattttactcaagaactggaaaccaactaaatgccttctatagaagtaatttttgatgaggagaaatggtacaatactaattaacaacttggtttaacatgtttactgagcatctgttaagtgttgggggaaaaagcagcaggatccagagctataggtacagtgtgatctcagctttgcaaacacattttctacatagatagtactaggtattaatagatatgtaaagaaagaaatcacaccattaataatggtaagattggtttatgtgattttagtggtatttttggcacccttatatatgttttccaaactttcagcagtgatattatttccataacttaaaaagtgagtttgaaaaagaaaatctccagcaagcatctcatttaaataaaggtttgtcatctttaaaaatacagcaatatgtgactttttaaaaaagctgtcaaataggtgtgaccctactaataattattagaaatacatttaaaaacatcgagtacctcaagtcagtttgccttgaaaaatatcaaatataactcttagagaaatgtacataaaagaatgcttcgtaattttggagtaggaggttccctcctcaattttgtatttttaaaaagtacatggtaaaaaaaaaaattcacaacagtatataaggctgtaaaatgagaattctgccccctcacctcttaccccagtactattctccagaggtaatctattaacaatttcttatgtaattttcagaaaatttgtatgcgtatataagcaaatatgtaatctttattttttaaataaatgggatcatattatatattcta

SEQ ID NO: 341820 - DNA, 3917 bp, Homo sapiens
gcggccgcaccatcgactcgccaacgagagaaggtcctggggcacggacaccgacgggttgcgactgtgacgtgaggtgttctcgcgcgcgctagcgcgcgtctccgggtgccgctgacgggcgtgcgcgcttgtgcggagccggaggtgggggccgaaccagccaaggttgcgggggccgcagagccggacgaagacggagggcggagccggcttcgggactgcggagactacacaccgagcgagcgcctgggcccgaagggagcgatgctgtggttccagggcgccattccggccgccatcgcgacggccaaaaggagcggcgcggtcttcgtggtgttcgtggcaggtgatgatgaacagtctacacagatggctgcaagttgggaagatgataaagttacagaagcatcttcaaacagttttgttgctattaaaatcgataccaaaagtttctttattggagacagtggaattcccttggaagtaatagcaggaagtgtttctgcagatgaacttgttacaagaattcacaaggtccgacagatgcatttgctaaaaagtgaaacatcagtagcaaatggcagtcagtcagaaagttcagtgtctactccatctgcgtcatttgaacctaacaacacttgtgaaaactctcagtccagaaatgcagagctttgtgagataccacccacttctgatacaaagtcagatactgcaacaggaggagaaagtgcaggccatgccacttcctctcaggagcctagtggatgctcagatcagagacctgcagaggacctcaacatccgagtggaaagactaacaaaaaaacttgaagaaaggagagaagagaaaagaaaagaggaagaacagagagaaattaagaaggaaattgagaggagaaaaactggaaaagaaatgttggattataaaagaaaacaagaagaagaattaacaaaaagaatgctggaggaaagaaacagagagaaagcagaagatagggcagctcgagaacgtataaaacagcagattgcattggaccgtgcagagagagctgctcgttttgcaaagacaaaggaagaagtagaggctgccaaagctgctgccttgctagcaaaacaggcagaaatggaagtcaagagggaatcttatgcaagagaaagaagcactgttgcaagaattcaattccgtcttcctgatggttcttcctttacaaatcagttcccttctgatgctcctctagaagaggcaaggcagtttgctgcacagactgttggcaacacttacggtaatttttcgttagcaaccatgtttcccaggagggaatttaccaaagaagattataaaaagaagttactggatttggaacttgccccaagcgcttcggtggtactgttgccagcaggaagaccaactgcatccattgtacactcttccagcggagacatttggaccttgttgggaacagtgctttatccattccttgccatctggagattaattagcaatttcttgtttagtaatccgcctcccacacagacttcagtgagagtaacatcgtcagaacccccaaaccctgcatcatctagcaaatcagaaaaaagggaaccagtgagaaaaagagtgctggaaaaacgtggagacgactttaaaaaggaggggaaaatttatagattaaggactcaagatgatggtgaagatgaaaacaacacttggaatggaaattccactcaacagatgtagtgtgacaagtataatatgtgcaataatcattgtttctcttatgatttaattcaactaaaattctactggagaagtgggactgctttatattttccaactggtctataaaatgtctctttattcctgcttagtgggtgtgggttgaaggtgtttaactcagaaaagtaaagacaggaaataactctctgctaggtccttgcttatatggcaaccactgctagaaccctaaaagaaccaaaaatctgccacagcctgcctccatcagcttcttatttagtatttcatatgcccattagccctatgcttcagatgacacgttttgtttagagctactttgctccaagactcttaagcccaaagtaactggtatgtcactgagtaacttgactcggtgtcagagcattttaactagccactcagatgagaatttatgtttaacttctctttttactcatcagctgcaagcaaaatcttgtagtttttaatcttaaacactgaataaaaaaactttcccctaaattggaatgatcttagttttgctttgagttttgttatctagcatctttttgttgcacagggctctattgaggtcctatgtctctgatttttttttttccccagtattgccctggagctgtctctggaaagtagctggcgaggttaccttaactatcactgaagaaagaaattttctgacacactgatggcatgtgacttgtctcctaagtcagtgaggcatcactttgtttgcataaagtatacggtttgttaaggcctttgttcttgtgagatgcaaaacagctgctagtctgcaacctagttttccctctcacctttaactgacgttttgtcctcaataattacacaaggacctagagtacctataggacaaaaagtatagaataaaaatatgcctttagtcatttggtttttcttaaaaagttgagattcttaatctgacttacatgttactttatccgtatgtctttgttagtggagaccgctaaactaatgatgtttgaaaacagttcctctgttttagattggaagatagcactctagagtggacatacggaaagactgtgactttattttgtaatgggaggaagaaattttctcagagcaaactttctattttttacctgtgaaataacagtgactttttaaaatggtgacagtgttggcaaggaaacagcaacacaggctgcgctgttggtaggagtgaaaaccagtataattcttctgaaaaacatttatcagaaacttaaaatatttcataccgtttgatccagtagcttcttctaaatcataaatgcagacaatgtttaggtaaagacatactcattaagtgttatttattttactcaagaactggaaaccaactaaatgccttctatagaagtaatttttgatgaggagaaatggtacaatactaattaacaacttggtttaacatgtttactgagcatctgttaagtgttgggggaaaaagcagcaggatccagagctataggtacagtgtgatctcagctttgcaaacacattttctacatagatagtactaggtattaatagatatgtaaagaaagaaatcacaccattaataatggtaagattggtttatgtgattttagtggtatttttggcacccttatatatgttttccaaactttcagcagtgatattatttccataacttaaaaagtgagtttgaaaaagaaaatctccagcaagcatctcatttaaataaaggtttgtcatctttaaaaatacagcaatatgtgactttttaaaaaagctgtcaaataggtgtgaccctactaataattattagaaatacatttaaaaacatcgagtacctcaagtcagtttgccttgaaaaatatcaaatataactcttagagaaatgtacataaaagaatgcttcgtaattttggagtaggaggttccctcctcaattttgtatttttaaaaagtacatggtaaaaaaaaaaattcacaacagtatataaggctgtaaaatgagaattctgccccctcacctcttaccccagtactattctccagaggtaatctattaacaatttcttatgtaattttcagaaaatttgtatgcgtatataagcaaatatgtaatctttattttttaaataaatgggatcatattatatattcta

SEQ ID NO: 341821 - DNA, 3823 bp, Homo sapiens
gcggccgcaccatcgactcgccaacgagagaaggtcctggggcacggacaccgacgggttgcgactgtgacgtgaggtgttctcgcgcgcgctagcgcgcgtctccgggtgccgctgacgggcgtgcgcgcttgtgcggagccggaggtgggggccgaaccagccaaggttgcgggggccgcagagccggacgaagacggagggcggagccggcttcgggactgcggagactacacaccgagcgagcgcctgggcccgaagggagcgatgctgtggttccagggcgccattccggccgccatcgcgacggccaaaaggagcggcgcggtcttcgtggtgttcgtggcaggtgatgatgaacagtctacacagatggctgcaagttgggaagatgataaagttacagaagcatcttcaaacagttttgttgctattaaaatcgataccaaaagatgcatttgctaaaaagtgaaacatcagtagcaaatggcagtcagtcagaaagttcagtgtctactccatctgcgtcatttgaacctaacaacacttgtgaaaactctcagtccagaaatgcagagctttgtgagataccacccacttctgatacaaagtcagatactgcaacaggaggagaaagtgcaggccatgccacttcctctcaggagcctagtggatgctcagatcagagacctgcagaggacctcaacatccgagtggaaagactaacaaaaaaacttgaagaaaggagagaagagaaaagaaaagaggaagaacagagagaaattaagaaggaaattgagaggagaaaaactggaaaagaaatgttggattataaaagaaaacaagaagaagaattaacaaaaagaatgctggaggaaagaaacagagagaaagcagaagatagggcagctcgagaacgtataaaacagcagattgcattggaccgtgcagagagagctgctcgttttgcaaagacaaaggaagaagtagaggctgccaaagctgctgccttgctagcaaaacaggcagaaatggaagtcaagagggaatcttatgcaagagaaagaagcactgttgcaagaattcaattccgtcttcctgatggttcttcctttacaaatcagttcccttctgatgctcctctagaagaggcaaggcagtttgctgcacagactgttggcaacacttacggtaatttttcgttagcaaccatgtttcccaggagggaatttaccaaagaagattataaaaagaagttactggatttggaacttgccccaagcgcttcggtggtactgttgccagcaggaagaccaactgcatccattgtacactcttccagcggagacatttggaccttgttgggaacagtgctttatccattccttgccatctggagattaattagcaatttcttgtttagtaatccgcctcccacacagacttcagtgagagtaacatcgtcagaacccccaaaccctgcatcatctagcaaatcagaaaaaagggaaccagtgagaaaaagagtgctggaaaaacgtggagacgactttaaaaaggaggggaaaatttatagattaaggactcaagatgatggtgaagatgaaaacaacacttggaatggaaattccactcaacagatgtagtgtgacaagtataatatgtgcaataatcattgtttctcttatgatttaattcaactaaaattctactggagaagtgggactgctttatattttccaactggtctataaaatgtctctttattcctgcttagtgggtgtgggttgaaggtgtttaactcagaaaagtaaagacaggaaataactctctgctaggtccttgcttatatggcaaccactgctagaaccctaaaagaaccaaaaatctgccacagcctgcctccatcagcttcttatttagtatttcatatgcccattagccctatgcttcagatgacacgttttgtttagagctactttgctccaagactcttaagcccaaagtaactggtatgtcactgagtaacttgactcggtgtcagagcattttaactagccactcagatgagaatttatgtttaacttctctttttactcatcagctgcaagcaaaatcttgtagtttttaatcttaaacactgaataaaaaaactttcccctaaattggaatgatcttagttttgctttgagttttgttatctagcatctttttgttgcacagggctctattgaggtcctatgtctctgatttttttttttccccagtattgccctggagctgtctctggaaagtagctggcgaggttaccttaactatcactgaagaaagaaattttctgacacactgatggcatgtgacttgtctcctaagtcagtgaggcatcactttgtttgcataaagtatacggtttgttaaggcctttgttcttgtgagatgcaaaacagctgctagtctgcaacctagttttccctctcacctttaactgacgttttgtcctcaataattacacaaggacctagagtacctataggacaaaaagtatagaataaaaatatgcctttagtcatttggtttttcttaaaaagttgagattcttaatctgacttacatgttactttatccgtatgtctttgttagtggagaccgctaaactaatgatgtttgaaaacagttcctctgttttagattggaagatagcactctagagtggacatacggaaagactgtgactttattttgtaatgggaggaagaaattttctcagagcaaactttctattttttacctgtgaaataacagtgactttttaaaatggtgacagtgttggcaaggaaacagcaacacaggctgcgctgttggtaggagtgaaaaccagtataattcttctgaaaaacatttatcagaaacttaaaatatttcataccgtttgatccagtagcttcttctaaatcataaatgcagacaatgtttaggtaaagacatactcattaagtgttatttattttactcaagaactggaaaccaactaaatgccttctatagaagtaatttttgatgaggagaaatggtacaatactaattaacaacttggtttaacatgtttactgagcatctgttaagtgttgggggaaaaagcagcaggatccagagctataggtacagtgtgatctcagctttgcaaacacattttctacatagatagtactaggtattaatagatatgtaaagaaagaaatcacaccattaataatggtaagattggtttatgtgattttagtggtatttttggcacccttatatatgttttccaaactttcagcagtgatattatttccataacttaaaaagtgagtttgaaaaagaaaatctccagcaagcatctcatttaaataaaggtttgtcatctttaaaaatacagcaatatgtgactttttaaaaaagctgtcaaataggtgtgaccctactaataattattagaaatacatttaaaaacatcgagtacctcaagtcagtttgccttgaaaaatatcaaatataactcttagagaaatgtacataaaagaatgcttcgtaattttggagtaggaggttccctcctcaattttgtatttttaaaaagtacatggtaaaaaaaaaaattcacaacagtatataaggctgtaaaatgagaattctgccccctcacctcttaccccagtactattctccagaggtaatctattaacaatttcttatgtaattttcagaaaatttgtatgcgtatataagcaaatatgtaatctttattttttaaataaatgggatcatattatatattcta

SEQ ID NO: 341822 - DNA, 3487 bp, Homo sapiens
ctacccatagccaggcatgcctcctgccagattgttattcatgttttacatctgacctttaccttggtgattttaactcggtaactgctttatttctatttgtgaacaattttatccacgtctaaactttaggattagtaatagcatatttagctccttctccatttttagggaaaatatataatgcttaagatataaaattattaacagatgctataatctgaaagatttattcctttaaaaagttgcattaaatgcagtattcttatttctttttatttaataattaaggaggagaaagtgcaggccatgccacttcctctcaggagcctagtggatgctcagatcagagacctgcagaggacctcaacatccgagtggaaagactaacaaaaaaacttgaagaaaggagagaagagaaaagaaaagaggaagaacagagagaaattaagaaggaaattgagaggagaaaaactggaaaagaaatgttggattataaaagaaaacaagaagaagaattaacaaaaagaatgctggaggaaagaaacagagagaaagcagaagatagggcagctcgagaacgtataaaacagcagattgcattggaccgtgcagagagagctgctcgttttgcaaagacaaaggaagaagtagaggctgccaaagctgctgccttgctagcaaaacaggcagaaatggaagtcaagagggaatcttatgcaagagaaagaagcactgttgcaagaattcaattccgtcttcctgatggttcttcctttacaaatcagttcccttctgatgctcctctagaagaggcaaggcagtttgctgcacagactgttggcaacacttacggtaatttttcgttagcaaccatgtttcccaggagggaatttaccaaagaagattataaaaagaagttactggatttggaacttgccccaagcgcttcggtggtactgttgccagcaggaagaccaactgcatccattgtacactcttccagcggagacatttggaccttgttgggaacagtgctttatccattccttgccatctggagattaattagcaatttcttgtttagtaatccgcctcccacacagacttcagtgagagtaacatcgtcagaacccccaaaccctgcatcatctagcaaatcagaaaaaagggaaccagtgagaaaaagagtgctggaaaaacgtggagacgactttaaaaaggaggggaaaatttatagattaaggactcaagatgatggtgaagatgaaaacaacacttggaatggaaattccactcaacagatgtagtgtgacaagtataatatgtgcaataatcattgtttctcttatgatttaattcaactaaaattctactggagaagtgggactgctttatattttccaactggtctataaaatgtctctttattcctgcttagtgggtgtgggttgaaggtgtttaactcagaaaagtaaagacaggaaataactctctgctaggtccttgcttatatggcaaccactgctagaaccctaaaagaaccaaaaatctgccacagcctgcctccatcagcttcttatttagtatttcatatgcccattagccctatgcttcagatgacacgttttgtttagagctactttgctccaagactcttaagcccaaagtaactggtatgtcactgagtaacttgactcggtgtcagagcattttaactagccactcagatgagaatttatgtttaacttctctttttactcatcagctgcaagcaaaatcttgtagtttttaatcttaaacactgaataaaaaaactttcccctaaattggaatgatcttagttttgctttgagttttgttatctagcatctttttgttgcacagggctctattgaggtcctatgtctctgatttttttttttccccagtattgccctggagctgtctctggaaagtagctggcgaggttaccttaactatcactgaagaaagaaattttctgacacactgatggcatgtgacttgtctcctaagtcagtgaggcatcactttgtttgcataaagtatacggtttgttaaggcctttgttcttgtgagatgcaaaacagctgctagtctgcaacctagttttccctctcacctttaactgacgttttgtcctcaataattacacaaggacctagagtacctataggacaaaaagtatagaataaaaatatgcctttagtcatttggtttttcttaaaaagttgagattcttaatctgacttacatgttactttatccgtatgtctttgttagtggagaccgctaaactaatgatgtttgaaaacagttcctctgttttagattggaagatagcactctagagtggacatacggaaagactgtgactttattttgtaatgggaggaagaaattttctcagagcaaactttctattttttacctgtgaaataacagtgactttttaaaatggtgacagtgttggcaaggaaacagcaacacaggctgcgctgttggtaggagtgaaaaccagtataattcttctgaaaaacatttatcagaaacttaaaatatttcataccgtttgatccagtagcttcttctaaatcataaatgcagacaatgtttaggtaaagacatactcattaagtgttatttattttactcaagaactggaaaccaactaaatgccttctatagaagtaatttttgatgaggagaaatggtacaatactaattaacaacttggtttaacatgtttactgagcatctgttaagtgttgggggaaaaagcagcaggatccagagctataggtacagtgtgatctcagctttgcaaacacattttctacatagatagtactaggtattaatagatatgtaaagaaagaaatcacaccattaataatggtaagattggtttatgtgattttagtggtatttttggcacccttatatatgttttccaaactttcagcagtgatattatttccataacttaaaaagtgagtttgaaaaagaaaatctccagcaagcatctcatttaaataaaggtttgtcatctttaaaaatacagcaatatgtgactttttaaaaaagctgtcaaataggtgtgaccctactaataattattagaaatacatttaaaaacatcgagtacctcaagtcagtttgccttgaaaaatatcaaatataactcttagagaaatgtacataaaagaatgcttcgtaattttggagtaggaggttccctcctcaattttgtatttttaaaaagtacatggtaaaaaaaaaaattcacaacagtatataaggctgtaaaatgagaattctgccccctcacctcttaccccagtactattctccagaggtaatctattaacaatttcttatgtaattttcagaaaatttgtatgcgtatataagcaaatatgtaatctttattttttaaataaatgggatcatattatatattcta

SEQ ID NO: 341823 - DNA, 3154 bp, Homo sapiens
tgggactgctttatattttccaactggtctataaaatgtctctttattcctgcttagtgggtgtgggttgaaggtgtttaactcagaaaagaaaagaggaagaacagagagaaattaagaaggaaattgagaggagaaaaactggaaaagaaatgttggattataaaagaaaacaagaagaagaattaacaaaaagaatgctggaggaaagaaacagagagaaagcagaagatagggcagctcgagaacgtataaaacagcagattgcattggaccgtgcagagagagctgctcgttttgcaaagacaaaggaagaagtagaggctgccaaagctgctgccttgctagcaaaacaggcagaaatggaagtcaagagggaatcttatgcaagagaaagaagcactgttgcaagaattcaattccgtcttcctgatggttcttcctttacaaatcagttcccttctgatgctcctctagaagaggcaaggcagtttgctgcacagactgttggcaacacttacggtaatttttcgttagcaaccatgtttcccaggagggaatttaccaaagaagattataaaaagaagttactggatttggaacttgccccaagcgcttcggtggtactgttgccagcaggaagaccaactgcatccattgtacactcttccagcggagacatttggaccttgttgggaacagtgctttatccattccttgccatctggagattaattagcaatttcttgtttagtaatccgcctcccacacagacttcagtgagagtaacatcgtcagaacccccaaaccctgcatcatctagcaaatcagaaaaaagggaaccagtgagaaaaagagtgctggaaaaacgtggagacgactttaaaaaggaggggaaaatttatagattaaggactcaagatgatggtgaagatgaaaacaacacttggaatggaaattccactcaacagatgtagtgtgacaagtataatatgtgcaataatcattgtttctcttatgatttaattcaactaaaattctactggagaagtgggactgctttatattttccaactggtctataaaatgtctctttattcctgcttagtgggtgtgggttgaaggtgtttaactcagaaaagtaaagacaggaaataactctctgctaggtccttgcttatatggcaaccactgctagaaccctaaaagaaccaaaaatctgccacagcctgcctccatcagcttcttatttagtatttcatatgcccattagccctatgcttcagatgacacgttttgtttagagctactttgctccaagactcttaagcccaaagtaactggtatgtcactgagtaacttgactcggtgtcagagcattttaactagccactcagatgagaatttatgtttaacttctctttttactcatcagctgcaagcaaaatcttgtagtttttaatcttaaacactgaataaaaaaactttcccctaaattggaatgatcttagttttgctttgagttttgttatctagcatctttttgttgcacagggctctattgaggtcctatgtctctgatttttttttttccccagtattgccctggagctgtctctggaaagtagctggcgaggttaccttaactatcactgaagaaagaaattttctgacacactgatggcatgtgacttgtctcctaagtcagtgaggcatcactttgtttgcataaagtatacggtttgttaaggcctttgttcttgtgagatgcaaaacagctgctagtctgcaacctagttttccctctcacctttaactgacgttttgtcctcaataattacacaaggacctagagtacctataggacaaaaagtatagaataaaaatatgcctttagtcatttggtttttcttaaaaagttgagattcttaatctgacttacatgttactttatccgtatgtctttgttagtggagaccgctaaactaatgatgtttgaaaacagttcctctgttttagattggaagatagcactctagagtggacatacggaaagactgtgactttattttgtaatgggaggaagaaattttctcagagcaaactttctattttttacctgtgaaataacagtgactttttaaaatggtgacagtgttggcaaggaaacagcaacacaggctgcgctgttggtaggagtgaaaaccagtataattcttctgaaaaacatttatcagaaacttaaaatatttcataccgtttgatccagtagcttcttctaaatcataaatgcagacaatgtttaggtaaagacatactcattaagtgttatttattttactcaagaactggaaaccaactaaatgccttctatagaagtaatttttgatgaggagaaatggtacaatactaattaacaacttggtttaacatgtttactgagcatctgttaagtgttgggggaaaaagcagcaggatccagagctataggtacagtgtgatctcagctttgcaaacacattttctacatagatagtactaggtattaatagatatgtaaagaaagaaatcacaccattaataatggtaagattggtttatgtgattttagtggtatttttggcacccttatatatgttttccaaactttcagcagtgatattatttccataacttaaaaagtgagtttgaaaaagaaaatctccagcaagcatctcatttaaataaaggtttgtcatctttaaaaatacagcaatatgtgactttttaaaaaagctgtcaaataggtgtgaccctactaataattattagaaatacatttaaaaacatcgagtacctcaagtcagtttgccttgaaaaatatcaaatataactcttagagaaatgtacataaaagaatgcttcgtaattttggagtaggaggttccctcctcaattttgtatttttaaaaagtacatggtaaaaaaaaaaattcacaacagtatataaggctgtaaaatgagaattctgccccctcacctcttaccccagtactattctccagaggtaatctattaacaatttcttatgtaattttcagaaaatttgtatgcgtatataagcaaatatgtaatctttattttttaaataaatgggatcatattatatattcta

SEQ ID NO: 341824 - DNA, 2959 bp, Homo sapiens
caggcgtgagccaccacacccagcctaaaagagttaattttttatatgaatctcagtaaagcagttattaacaaacaaaaagatctgatatggtagaaaaaactattgtcattgcacatttccacttccattttctctaacttaatgatattgttagagaatatatagaggtgaagattgtgactttaattttcttttttcatagcactgttgcaagaattcaattccgtcttcctgatggttcttcctttacaaatcagttcccttctgatgctcctctagaagaggcaaggcagtttgctgcacagactgttggcaacacttacggtaatttttcgttagcaaccatgtttcccaggagggaatttaccaaagaagattataaaaagaagttactggatttggaacttgccccaagcgcttcggtggtactgttgccagcaggaagaccaactgcatccattgtacactcttccagcggagacatttggaccttgttgggaacagtgctttatccattccttgccatctggagattaattagcaatttcttgtttagtaatccgcctcccacacagacttcagtgagagtaacatcgtcagaacccccaaaccctgcatcatctagcaaatcagaaaaaagggaaccagtgagaaaaagagtgctggaaaaacgtggagacgactttaaaaaggaggggaaaatttatagattaaggactcaagatgatggtgaagatgaaaacaacacttggaatggaaattccactcaacagatgtagtgtgacaagtataatatgtgcaataatcattgtttctcttatgatttaattcaactaaaattctactggagaagtgggactgctttatattttccaactggtctataaaatgtctctttattcctgcttagtgggtgtgggttgaaggtgtttaactcagaaaagtaaagacaggaaataactctctgctaggtccttgcttatatggcaaccactgctagaaccctaaaagaaccaaaaatctgccacagcctgcctccatcagcttcttatttagtatttcatatgcccattagccctatgcttcagatgacacgttttgtttagagctactttgctccaagactcttaagcccaaagtaactggtatgtcactgagtaacttgactcggtgtcagagcattttaactagccactcagatgagaatttatgtttaacttctctttttactcatcagctgcaagcaaaatcttgtagtttttaatcttaaacactgaataaaaaaactttcccctaaattggaatgatcttagttttgctttgagttttgttatctagcatctttttgttgcacagggctctattgaggtcctatgtctctgatttttttttttccccagtattgccctggagctgtctctggaaagtagctggcgaggttaccttaactatcactgaagaaagaaattttctgacacactgatggcatgtgacttgtctcctaagtcagtgaggcatcactttgtttgcataaagtatacggtttgttaaggcctttgttcttgtgagatgcaaaacagctgctagtctgcaacctagttttccctctcacctttaactgacgttttgtcctcaataattacacaaggacctagagtacctataggacaaaaagtatagaataaaaatatgcctttagtcatttggtttttcttaaaaagttgagattcttaatctgacttacatgttactttatccgtatgtctttgttagtggagaccgctaaactaatgatgtttgaaaacagttcctctgttttagattggaagatagcactctagagtggacatacggaaagactgtgactttattttgtaatgggaggaagaaattttctcagagcaaactttctattttttacctgtgaaataacagtgactttttaaaatggtgacagtgttggcaaggaaacagcaacacaggctgcgctgttggtaggagtgaaaaccagtataattcttctgaaaaacatttatcagaaacttaaaatatttcataccgtttgatccagtagcttcttctaaatcataaatgcagacaatgtttaggtaaagacatactcattaagtgttatttattttactcaagaactggaaaccaactaaatgccttctatagaagtaatttttgatgaggagaaatggtacaatactaattaacaacttggtttaacatgtttactgagcatctgttaagtgttgggggaaaaagcagcaggatccagagctataggtacagtgtgatctcagctttgcaaacacattttctacatagatagtactaggtattaatagatatgtaaagaaagaaatcacaccattaataatggtaagattggtttatgtgattttagtggtatttttggcacccttatatatgttttccaaactttcagcagtgatattatttccataacttaaaaagtgagtttgaaaaagaaaatctccagcaagcatctcatttaaataaaggtttgtcatctttaaaaatacagcaatatgtgactttttaaaaaagctgtcaaataggtgtgaccctactaataattattagaaatacatttaaaaacatcgagtacctcaagtcagtttgccttgaaaaatatcaaatataactcttagagaaatgtacataaaagaatgcttcgtaattttggagtaggaggttccctcctcaattttgtatttttaaaaagtacatggtaaaaaaaaaaattcacaacagtatataaggctgtaaaatgagaattctgccccctcacctcttaccccagtactattctccagaggtaatctattaacaatttcttatgtaattttcagaaaatttgtatgcgtatataagcaaatatgtaatctttattttttaaataaatgggatcatattatatattcta

SEQ ID NO: 341825 - DNA, 3917 bp, Homo sapiens
gcggccgcaccatcgactcgccaacgagagaaggtcctggggcacggacaccgacgggttgcgactgtgacgtgaggtgttctcgcgcgcgctagcgcgcgtctccgggtgccgctgacgggcgtgcgcgcttgtgcggagccggaggtgggggccgaaccagccaaggttgcgggggccgcagagccggacgaagacggagggcggagccggcttcgggactgcggagactacacaccgagcgagcgcctgggcccgaagggagcgatgctgtggttccagggcgccattccggccgccatcgcgacggccaaaaggagcggcgcggtcttcgtggtgttcgtggcaggtgatgatgaacagtctacacagatggctgcaagttgggaagatgataaagttacagaagcatcttcaaacagttttgttgctattaaaatcgataccaaaagtgaagcctgcctacagttttcacaaatctatcctgtagtgtgtgttccatccagtttctttattggagacagtggaattcccttggaagtaatagcaggaagtgtttctgcagatgaacttgttacaagaattcacaaggtccgacagatgcatttgctaaaaagtgaaacatcagtagcaaatggcagtcagtcagaaagttcagtgtctactccatctgcgtcatttgaacctaacaacacttgtgaaaactctcagtccagaaatgcagagctttgtgagataccacccacttctgatacaaagtcagatactgcaacaggaggagaaagtgcaggccatgccacttcctctcaggagcctagtggatgctcagatcagagacctgcagaggacctcaacatccgagtggaaagactaacaaaaaaacttgaagaaaggagagaagagaaaagaaaagaggaagaacagagagaaattaagaaggaaattgagaggagaaaaactggaaaagaaatgttggattataaaagaaaacaagaagaagaattaacaaaaagaatgctggaggaaagaaacagagagaaagcagaagatagggcagctcgagaacgtataaaacagcagattgcattggaccgtgcagagagagctgctcgttttgcaaagacaaaggaagaagtagaggctgccaaagctgctgccttgctagcaaaacaggcagaaatggaagtcaagagggaatcttatgcaagagaaagaagcactgttgcaagaattcaattccgtcttcctgatggttcttcctttacaaatcagttcccttctgatgctcctctagaagaggcaaggcagtttgctgcacagactgttggcaacacttacggtaatttttcgttagcaaccatgtttcccaggagggaatttaccaaagaagattataaaaagaagttactggatttggaacttgccccaagcgcttcggtggtactgttgccagcaggaagaccaactgcatccattgtacactcttccagcggagacatttggaccttgttgggaacagtgctttatccattccttgccatctggagattaattagcaatttcttgtttagtaatccgcctcccacacagacttcagtgagagtaacatcgtcagaacccccaaaccctgcatcatctagcaaatcagaaaaaagggaaccagtgagaaaaagagtgctggaaaaacgtggagacgactttaaaaaggaggggaaaatttatagattaaggactcaagatgatggtgaagatgaaaacaacacttggaatggaaattccactcaacagatgtagtgtgacaagtataatatgtgcaataatcattgtttctcttatgatttaattcaactaaaattctactggagaagtgggactgctttatattttccaactggtctataaaatgtctctttattcctgcttagtgggtgtgggttgaaggtgtttaactcagaaaagtaaagacaggaaataactctctgctaggtccttgcttatatggcaaccactgctagaaccctaaaagaaccaaaaatctgccacagcctgcctccatcagcttcttatttagtatttcatatgcccattagccctatgcttcagatgacacgttttgtttagagctactttgctccaagactcttaagcccaaagtaactggtatgtcactgagtaacttgactcggtgtcagagcattttaactagccactcagatgagaatttatgtttaacttctctttttactcatcagctgcaagcaaaatcttgtagtttttaatcttaaacactgaataaaaaaactttcccctaaattggaatgatcttagttttgctttgagttttgttatctagcatctttttgttgcacagggctctattgaggtcctatgtctctgatttttttttttccccagtattgccctggagctgtctctggaaagtagctggcgaggttaccttaactatcactgaagaaagaaattttctgacacactgatggcatgtgacttgtctcctaagtcagtgaggcatcactttgtttgcataaagtatacggtttgttaaggcctttgttcttgtgagatgcaaaacagctgctagtctgcaacctagttttccctctcacctttaactgacgttttgtcctcaataattacacaaggacctagagtacctataggacaaaaagtatagaataaaaatatgcctttagtcatttggtttttcttaaaaagttgagattcttaatctgacttacatgttactttatccgtatgtctttgttagtggagaccgctaaactaatgatgtttgaaaacagttcctctgttttagattggaagatagcactctagagtggacatacggaaagactgtgactttattttgtaatgggaggaagaaattttctcagagcaaactttctattttttacctgtgaaataacagtgactttttaaaatggtgacagtgttggcaaggaaacagcaacacaggctgcgctgttggtaggagtgaaaaccagtataattcttctgaaaaacatttatcagaaacttaaaatatttcataccgtttgatccagtagcttcttctaaatcataaatgcagacaatgtttaggtaaagacatactcattaagtgttatttattttactcaagaactggaaaccaactaaatgccttctatagaagtaatttttgatgaggagaaatggtacaatactaattaacaacttggtttaacatgtttactgagcatctgttaagtgttgggggaaaaagcagcaggatccagagctataggtacagtgtgatctcagctttgcaaacacattttctacatagatagtactaggtattaatagatatgtaaagaaagaaatcacaccattaataatggtaagattggtttatgtgattttagtggtatttttggcacccttatatatgttttccaaactttcagcagtgatattatttccataacttaaaaagtgagtttgaaaaagaaaatctccagcaagcatctcatttaaataaaggtttgtcatctttaaaaatacagcaatatgtgactttttaaaaaagctgtcaaataggtgtgaccctactaataattattagaaatacatttaaaaacatcgagtacctcaagtcagtttgccttgaaaggagtaggaggttccctcctcaattttgtatttttaaaaagtacatggtaaaaaaaaaaattcacaacagtatataaggctgtaaaatgagaattctgccccctcacctcttaccccagtactattctccagaggtaatctattaacaatttcttatgtaattttcagaaaatttgtatgcgtatataagcaaatatgtaatctttattttttaaataaatgggatcatattatatattcta

SEQ ID NO: 341826 - DNA, 1508 bp, Homo sapiens
gcggccgcaccatcgactcgccaacgagagaaggtcctggggcacggacaccgacgggttgcgactgtgacgtgaggtgttctcgcgcgcgctagcgcgcgtctccgggtgccgctgacgggcgtgcgcgcttgtgcggagccggaggtgggggccgaaccagccaaggttgcgggggccgcagagccggacgaagacggagggcggagccggcttcgggactgcggagactacacaccgagcgagcgcctgggcccgaagggagcgatgctgtggttccagggcgccattccggccgccatcgcgacggccaaaaggagcggcgcggtcttcgtggtgttcgtggcaggtgatgatgaacagtctacacagatggctgcaagttgggaagatgataaagttacagaagcatcttcaaacagttttgttgctattaaaatcgataccaaaagtgaagcctgcctacagttttcacaaatctatcctgtagtgtgtgttccatccagtttctttattggagacagtggaattcccttggaagtaatagcaggaagtgtttctgcagatgaacttgttacaagaattcacaaggtccgacagatgcatttgctaaaaagtgaaacatcagtagcaaatggcagtcagtcagaaagttcagtgtctactccatctgcgtcatttgaacctaacaacacttgtgaaaactctcagtccagaaatgcagagctttgtgagataccacccacttctgatacaaagtcagatactgcaacaggaggagaaagtgcaggccatgccacttcctctcaggagcctagtggatgctcagatcagagacctgcagaggacctcaacatccgagtggaaagactaacaaaaaaacttgaagaaaggagagaagagaaaagaaaagaggaagaacagagagaaattaagaaggaaattgagaggagaaaaactggaaaagaaatgttggattataaaagaaaacaagaagaagaattaacaaaaagaatgctggaggaaagaaacagagagaaagcagaagatagggcagctcgagaacgtataaaacagcagattgcattggaccgtgcagagagagctgctcgttttgcaaagacaaaggaagaagtagaggctgccaaagctgctgccttgctagcaaaacaggcagaaatggaagtcaagagggaatcttatgcaagagaaagaagcactgttgcaagaattcaattccgtcttcctgatggttcttcctttacaaatcagttcccttctgatgctcctctagaagaggcaaggcagtttgctgcacagactgttggcaacacttacggtaatttttcgttagcaaccatgtttcccaggagggaatttaccaaagaagattataaaaagaagttactggatttggaacttgccccaagcgcttcggtggtactgttgccacaggaagaccaactgcatccattgacactctatcttctagtaacccggtgccggct

SEQ ID NO: 341827 - DNA, 1714 bp, Homo sapiens
gcggccgcaccatcgactcgccaacgagagaaggtcctggggcacggacaccgacgggttgcgactgtgacgtgaggtgttctcgcgcgcgctagcgcgcgtctccgggtgccgctgacgggcgtgcgcgcttgtgcggagccggaggtgggggccgaaccagccaaggttgcgggggccgcagagccggacgaagacggagggcggagccggcttcgggactgcggagactacacaccgagcgagcgcctgggcccgaagggagcgatgctgtggttccagggcgccattccggccgccatcgcgacggccaaaaggagcggcgcggtcttcgtggtgttcgtggcaggtgatgatgaacagtctacacagatggctgcaagttgggaagatgataaagttacagaagcatcttcaaacagttttgttgctattaaaatcgataccaaaagtgaagcctgcctacagttttcacaaatctatcctgtagtgtgtgttccatccagtttctttattggagacagtggaattcccttggaagtaatagcaggaagtgtttctgcagatgaacttgttacaagaattcacaaggtccgacagatgcatttgctaaaaagtgaaacatcagtagcaaatggcagtcagtcagaaagttcagtgtctactccatctgcgtcatttgaacctaacaacacttgtgaaaactctcagtccagaaatgcagagctttgtgagataccacccacttctgatacaaagtcagatactgcaacaggaggagaaagtgcaggccatgccacttcctctcaggagcctagtggatgctcagatcagagacctgcagaggacctcaacatccgagtggaaagactaacaaaaaaacttgaagaaaggagagaagagaaaagaaaagaggaagaacagagagaaattaagaaggaaattgagaggagaaaaactggaaaagaaatgttggattataaaagaaaacaagaagaagaattaacaaaaagaatgctggaggaaagaaacagagagaaagcagaagatagggcagctcgagaacgtataaaacagcagattgcattggaccgtgcagagagagctgctcgttttgcaaagacaaaggaagaagtagaggctgccaaagctgctgccttgctagcaaaacaggcagaaatggaagtcaagagggaatcttatgcaagagaaagaaggtactatatttcatgctgaaacatctctgtgcacataggggctgaggagaatgattataagctggtttttaacactgatgtatactgtggttataagcagtccattccagagggacatattaatttgacagctcccaatggtatctctcatttcgtgtgagtgtacactaaaaaagtactacataaataactttaaaagagggcccaatagccgggcgcggtggctcacgcctgtaatcccagcactttgggaggccgagacgggcggatcacgaggtcaggagatcgagaccatcctggctaacatggtgaaaccccgtctctactaaaaatacaaaaattagctgggcatggtggcgggcgcctgtagtcccagctacgcgggaggctgaggcaggagaatggcgtgaacccgggaggcggagcttgcagtgagccgagattgcgccactgcactccagcctgggcgacagagcgagactccgtccccaaaaaaa

SEQ ID NO: 341828 - DNA, 852 bp, Homo sapiens
  misc_feature (738)..(738): n is a, c, g, or t
tgggactgctttatattttccaactggtctataaaatgtctctttattcctgcttagtgggtgtgggttgaaggtgtttaactcagaaaagaaaagaggaagaacagagagaaattaagaaggaaattgagaggagaaaaactggaaaagaaatgttggattataaaagaaaacaagaagaagaattaacaaaaagaatgctggaggaaagaaacagagagaaagcagaagatagggcagctcgagaacgtataaaacagcagattgcattgactaacaaaaaaacttgaagaaaggagagaagagaaaagaaaagaggaagaacagagagaaattaagaaggaaattgagaggagaaaaactggaaaagaaatgttggattataaaagaaaacaagaagaagaattaacaaaaagaatgctggaggaaagaaacagagagaaagcagaagatagggcagctcgagaacgtataaaacagcagattgcattgactaacaaaaaaacttgaagaacaggagagaagacgaaaagaaaagaggaagaacagagagaacattaagaaggaaattgagaggagaaaaactggcaaaagaaatgtcggattataaaagagaacaagaagaagaattaacaaaaagaatgctggaggaaagaaacagagagaaagcagaagatagggcaggtcgagaacgtataaaacagcagattgcattgactaacaaaaaaacttgaaganaggagagaaagaagtcaccgaagaggagaaaaccaaggaggagaagccagaagccaaaggggtcaaggaggaggtcaagttggcctgaatggacctctccagctctggcttcct

SEQ ID NO: 341829 - DNA, 3971 bp, Homo sapiens
gcggccgcaccatcgactcgccaacgagagaaggtcctggggcacggacaccgacgggttgcgactgtgacgtgaggtgttctcgcgcgcgctagcgcgcgtctccgggtgccgctgacgggcgtgcgcgcttgtgcggagccggaggtgggggccgaaccagccaaggttgcgggggccgcagagccggacgaagacggagggcggagccggcttcgggactgcggagactacacaccgagcgagcgcctgggcccgaagggagcgatgctgtggttccagggcgccattccggccgccatcgcgacggccaaaaggagcggcgcggtcttcgtggtgttcgtggcaggtgatgatgaacagtctacacagatggctgcaagttgggaagatgataaagttacagaagcatcttcaaacagttttgttgctattaaaatcgataccaaaagtgaagcctgcctacagttttcacaaatctatcctgtagtgtgtgttccatccagtttctttattggagacagtggaattcccttggaagtaatagcaggaagtgtttctgcagatgaacttgttacaagaattcacaaggtccgacagatgcatttgctaaaaagtgaaacatcagtagcaaatggcagtcagtcagaaagttcagtgtctactccatctgcgtcatttgaacctaacaacacttgtgaaaactctcagtccagaaatgcagagctttgtgagataccacccacttctgatacaaagtcagatactgcaacaggaggagaaagtgcaggccatgccacttcctctcaggagcctagtggatgctcagatcagagacctgcagaggacctcaacatccgagtggaaagactaacaaaaaaacttgaagaaaggagagaagagaaaagaaaagaggaagaacagagagaaattaagaaggaaattgagaggagaaaaactggaaaagaaatgttggattataaaagaaaacaagaagaagaattaacaaaaagaatgctggaggaaagaaacagagagaaagcagaagatagggcagctcgagaacgtataaaacagcagattgcattggaccgtgcagagagagctgctcgttttgcaaagacaaaggaagaagtagaggctgccaaagctgctgccttgctagcaaaacaggcagaaatggaagtcaagagggaatcttatgcaagagaaagaagcactgttgcaagaattcaattccgtcttcctgatggttcttcctttacaaatcagttcccttctgatgctcctctagaagaggcaaggcagtttgctgcacagactgttggcaacacttacggtaatttttcgttagcaaccatgtttcccaggagggaatttaccaaagaagattataaaaagaagttactggatttggaacttgccccaagcgcttcggtggtactgttgccagcaggaagaccaactgcatccattgtacactcttccagcggagacatttggaccttgttgggaacagtgctttatccattccttgccatctggagattaattagcaatttcttgtttagtaatccgcctcccacacagacttcagtgagagtaacatcgtcagaacccccaaaccctgcatcatctagcaaatcagaaaaaagggaaccagtgagaaaaagagtgctggaaaaacgtggagacgactttaaaaaggaggggaaaatttatagattaaggactcaagatgatggtgaagatgaaaacaacacttggaatggaaattccactcaacagatgtagtgtgacaagtataatatgtgcaataatcattgtttctcttatgatttaattcaactaaaattctactggagaagtgggactgctttatattttccaactggtctataaaatgtctctttattcctgcttagtgggtgtgggttgaaggtgtttaactcagaaaagtaaagacaggaaataactctctgctaggtccttgcttatatggcaaccactgctagaaccctaaaagaaccaaaaatctgccacagcctgcctccatcagcttcttatttagtatttcatatgcccattagccctatgcttcagatgacacgttttgtttagagctactttgctccaagactcttaagcccaaagtaactggtatgtcactgagtaacttgactcggtgtcagagcattttaactagccactcagatgagaatttatgtttaacttctctttttactcatcagctgcaagcaaaatcttgtagtttttaatcttaaacactgaataaaaaaactttcccctaaattggaatgatcttagttttgctttgagttttgttatctagcatctttttgttgcacagggctctattgaggtcctatgtctctgatttttttttttccccagtattgccctggagctgtctctggaaagtagctggcgaggttaccttaactatcactgaagaaagaaattttctgacacactgatggcatgtgacttgtctcctaagtcagtgaggcatcactttgtttgcataaagtatacggtttgttaaggcctttgttcttgtgagatgcaaaacagctgctagtctgcaacctagttttccctctcacctttaactgacgttttgtcctcaataattacacaaggacctagagtacctataggacaaaaagtatagaataaaaatatgcctttagtcatttggtttttcttaaaaagttgagattcttaatctgacttacatgttactttatccgtatgtctttgttagtggagaccgctaaactaatgatgtttgaaaacagttcctctgttttagattggaagatagcactctagagtggacatacggaaagactgtgactttattttgtaatgggaggaagaaattttctcagagcaaactttctattttttacctgtgaaataacagtgactttttaaaatggtgacagtgttggcaaggaaacagcaacacaggctgcgctgttggtaggagtgaaaaccagtataattcttctgaaaaacatttatcagaaacttaaaatatttcataccgtttgatccagtagcttcttctaaatcataaatgcagacaatgtttaggtaaagacatactcattaagtgttatttattttactcaagaactggaaaccaactaaatgccttctatagaagtaatttttgatgaggagaaatggtacaatactaattaacaacttggtttaacatgtttactgagcatctgttaagtgttgggggaaaaagcagcaggatccagagctataggtacagtgtgatctcagctttgcaaacacattttctacatagatagtactaggtattaatagatatgtaaagaaagaaatcacaccattaataatggtaagattggtttatgtgattttagtggtatttttggcacccttatatatgttttccaaactttcagcagtgatattatttccataacttaaaaagtgagtttgaaaaagaaaatctccagcaagcatctcatttaaataaaggtttgtcatctttaaaaatacagcaatatgtgactttttaaaaaagctgtcaaataggtgtgaccctactaataattattagaaatacatttaaaaacatcgagtacctcaagtcagtttgccttgaaaaatatcaaatataactcttagagaaatgtacataaaagaatgcttcgtaattttggagtaggaggttccctcctcaattttgtatttttaaaaagtacatggtaaaaaaaaaaattcacaacagtatataaggctgtaaaatgagaattctgccccctcacctcttaccccagtactattctccagaggtaatctattaacaatttcttatgtaattttcagaaaatttgtatgcgtatataagcaaatatgtaatctttattttttaaataaatgggatcatattatatattcta

SEQ ID NO: 341830 - DNA, 1005 bp, Homo sapiens
  misc_feature (891)..(891): n is a, c, g, or t
gcggccgcaccatcgactcgccaacgagagaaggtcctggggcacggacaccgacgggttgcgactgtgacgtgaggtgttctcgcgcgcgctagcgcgcgtctccgggtgccgctgacgggcgtgcgcgcttgtgcggagccggaggtgggggccgaaccagccaaggttgcgggggccgcagagccggacgaagacggagggcggagccggcttcgggactgcggagactacacaccgagcgagcgcctgggcccgaagggagcgatgctgtggttccagggcgccattccggccgccatcgcgacggccaaaaggagcggcgcggtcttcgtggtgttcgtggcaggtgatgatgaacagtctacacagatggctgcaagttgggaagatgataaagttacagaagcatcttcaaacagttttgttgctattaaaatcgataccaaaagtgaagcctgcctacagttttcacaaatctatcctgtagtgtgtgttccatccagtttctttattggagacagtggaattcccttggaagtaatagcaggaagtgtttctgcagatgaacttgttacaagaattcacaaggtccgacagatgcatttgctaaaaagtgaaacatcagtagcaaatggcagtcagtcagaaagttcagtgtctactccatctgcgtcatttgaacctaacaacacttgtgaaaactctcagtccagaaatgcagagctttgtgagataccacccacttctgatacaaagtcagatactgcaacaggaggagaaagtgcaggccatgccacttcctctcaggagcctagtggatgctcagatcagagacctgcagaggacctcaacatccgagtggaaagactaacaaaaaaacttgaaganaggagagaaagaagtcaccgaagaggagaaaaccaaggaggagaagccagaagccaaaggggtcaaggaggaggtcaagttggcctgaatggacctctccagctctggcttcct

SEQ ID NO: 341831 - DNA, 3916 bp, Homo sapiens
gcggccgcaccatcgactcgccaacgagagaaggtcctggggcacggacaccgacgggttgcgactgtgacgtgaggtgttctcgcgcgcgctagcgcgcgtctccgggtgccgctgacgggcgtgcgcgcttgtgcggagccggaggtgggggccgaaccagccaaggttgcgggggccgcagagccggacgaagacggagggcggagccggcttcgggactgcggagactacacaccgagcgagcgcctgggcccgaagggagcgatgctgtggttccagggcgccattccggccgccatcgcgacggccaaaaggagcggcgcggtcttcgtggtgttcgtggcaggtgatgatgaacagtctacacagatggctgcaagttgggaagatgataaagttacagaagcatcttcaaacagttttgttgctattaaaatcgataccaaaagtgaagcctgcctacagttttcacaaatctatcctgtagtgtgtgttccatccagtttctttattggagacagtggaattcccttggaagtaatagcaggaagtgtttctgcagatgaacttgttacaagaattcacaaggtccgacagatgcatttgctaaaaagtgaaacatcagtagcaaatggcagtcagtcagaaagttcagtgtctactccatctgcgtcatttgaacctaacaacacttgtgaaaactctcagtccagaaatgcagagctttgtgagataccacccacttctgatacaaagtcagatactgcaacaggaggagaaagtgcaggccatgccacttcctctcaggagcctagtggatgctcagatcagagacctgcagaggacctcaacatccgagtggaaagactaacaaaaaaacttgaagaaaggagagaagagaaaagaaaagaggaagaacagagagaaattaagaaggaaattgagaggagaaaaactggaaaagaaatgttggattataaaagaaaacaagaagaagaattaacaaaaagaatgctggaggaaagaaacagagagaaagcagaagatagggcagctcgagaacgtataaaacagcagattgcattggaccgtgcagagagagctgctcgttttgcaaagacaaaggaagaagtagaggctgccaaagctgctgccttgctagcaaaacaggcagaaatggaagtcaagagggaatcttatgcaagagaaagaagcactgttgcaagaattcaattccgtcttcctgatggttcttcctttacaaatcagttcccttctgatgctcctctagaagaggcaaggcagtttgctgcacagactgttggcaacacttacggtaatttttcgttagcaaccatgtttcccaggagggaatttaccaaagaagattataaaaagaagttactggatttggaacttgccccaagcgcttcggtggtactgttgccagcaggaagaccaactgcatccattgtacactcttccagcggagacatttggaccttgttgggaacagtgctttatccattccttgccatctggagattaattagcaatttcttgtttagtaatccgcctcccacacagacttcagtgagagtaacatcgtcagaacccccaaaccctgcatcatctagcaaatcagaaaaaagggaaccagtgagaaaaagagtgctggaaaaacgtggagacgactttaaaaaggaggggaaaatttatagattaaggactcaagatgatggtgaagatgaaaacaacacttggaatggaaattccactcaacagatgtagtgtgacaagtataatatgtgcaataatcattgtttctcttatgatttaattcaactaaaattctactggagaagtgggactgctttatattttccaactggtctataaaatgtctctttattcctgcttagtgggtgtgggttgaaggtgtttaactcagaaaagtaaagacaggaaataactctctgctaggtccttgcttatatggcaaccactgctagaaccctaaaagaaccaaaaatcctatgcttcagatgacacgttttgtttagagctactttgctccaagactcttaagcccaaagtaactggtatgtcactgagtaacttgactcggtgtcagagcattttaactagccactcagatgagaatttatgtttaacttctctttttactcatcagctgcaagcaaaatcttgtagtttttaatcttaaacactgaataaaaaaactttcccctaaattggaatgatcttagttttgctttgagttttgttatctagcatctttttgttgcacagggctctattgaggtcctatgtctctgatttttttttttccccagtattgccctggagctgtctctggaaagtagctggcgaggttaccttaactatcactgaagaaagaaattttctgacacactgatggcatgtgacttgtctcctaagtcagtgaggcatcactttgtttgcataaagtatacggtttgttaaggcctttgttcttgtgagatgcaaaacagctgctagtctgcaacctagttttccctctcacctttaactgacgttttgtcctcaataattacacaaggacctagagtacctataggacaaaaagtatagaataaaaatatgcctttagtcatttggtttttcttaaaaagttgagattcttaatctgacttacatgttactttatccgtatgtctttgttagtggagaccgctaaactaatgatgtttgaaaacagttcctctgttttagattggaagatagcactctagagtggacatacggaaagactgtgactttattttgtaatgggaggaagaaattttctcagagcaaactttctattttttacctgtgaaataacagtgactttttaaaatggtgacagtgttggcaaggaaacagcaacacaggctgcgctgttggtaggagtgaaaaccagtataattcttctgaaaaacatttatcagaaacttaaaatatttcataccgtttgatccagtagcttcttctaaatcataaatgcagacaatgtttaggtaaagacatactcattaagtgttatttattttactcaagaactggaaaccaactaaatgccttctatagaagtaatttttgatgaggagaaatggtacaatactaattaacaacttggtttaacatgtttactgagcatctgttaagtgttgggggaaaaagcagcaggatccagagctataggtacagtgtgatctcagctttgcaaacacattttctacatagatagtactaggtattaatagatatgtaaagaaagaaatcacaccattaataatggtaagattggtttatgtgattttagtggtatttttggcacccttatatatgttttccaaactttcagcagtgatattatttccataacttaaaaagtgagtttgaaaaagaaaatctccagcaagcatctcatttaaataaaggtttgtcatctttaaaaatacagcaatatgtgactttttaaaaaagctgtcaaataggtgtgaccctactaataattattagaaatacatttaaaaacatcgagtacctcaagtcagtttgccttgaaaaatatcaaatataactcttagagaaatgtacataaaagaatgcttcgtaattttggagtaggaggttccctcctcaattttgtatttttaaaaagtacatggtaaaaaaaaaaattcacaacagtatataaggctgtaaaatgagaattctgccccctcacctcttaccccagtactattctccagaggtaatctattaacaatttcttatgtaattttcagaaaatttgtatgcgtatataagcaaatatgtaatctttattttttaaataaatgggatcatattatatattcta

SEQ ID NO: 341832 - DNA, 3917 bp, Homo sapiens
gcggccgcaccatcgactcgccaacgagagaaggtcctggggcacggacaccgacgggttgcgactgtgacgtgaggtgttctcgcgcgcgctagcgcgcgtctccgggtgccgctgacgggcgtgcgcgcttgtgcggagccggaggtgggggccgaaccagccaaggttgcgggggccgcagagccggacgaagacggagggcggagccggcttcgggactgcggagactacacaccgagcgagcgcctgggcccgaagggagcgatgctgtggttccagggcgccattccggccgccatcgcgacggccaaaaggagcggcgcggtcttcgtggtgttcgtggcaggtgatgatgaacagtctacacagatggctgcaagttgggaagatgataaagttacagaagcatcttcaaacagttttgttgctattaaaatcgataccaaaagtgaagcctgcctacagttttcacaaatctatcctgtagtgtgtgttccatccagtttctttattggagacagtggaattcccttggaagtaatagcaggaagtgtttctgcagatgaacttgttacaagaattcacaaggtccgacagatgcatttgctaaaaagtgaaacatcagtagcaaatggcagtcagtcagaaagttcagtgtctactccatctgcgtcatttgaacctaacaacacttgtgaaaactctcagtccagaaatgcagagctttgtgagataccacccacttctgatacaaagtcagatactgcaacaggaggagaaagtgcaggccatgccacttcctctcaggagcctagtggatgctcagatcagagacctgcagaggacctcaacatccgagtggaaagactaacaaaaaaacttgaagaaaggagagaagagaaaagaaaagaggaagaacagagagaaattaagaaggaaattgagaggagaaaaactggaaaagaaatgttggattataaaagaaaacaagaagaagaattaacaaaaagaatgctggaggaaagaaacagagagaaagcagaagatagggcagctcgagaacgtataaaacagcagattgcattggaccgtgcagagagagctgctcgttttgcaaagacaaaggaagaagtagaggctgccaaagctgctgccttgctagcaaaacaggcagaaatggaagtcaagagggaatcttatgcaagagaaagaagcactgttgcaagaattcaattccgtcttcctgatggttcttcctttacaaatcagttcccttctgatgctcctctagaagaggcaaggcagtttgctgcacagactgttggcaacacttacggtaatttttcgttagcaaccatgtttcccaggagggaatttaccaaagaagattataaaaagaagttactggatttggaacttgccccaagcgcttcggtggtactgttgccagcaggaagaccaactgcatccattgtacactcttccagcggagacatttggaccttgttgggaacagtgctttatccattccttgccatctggagattaattagcaatttcttgtttagtaatccgcctcccacacagacttcagtgagagtaacatcgtcagaacccccaaaccctgcatcatctagcaaatcagaaaaaagggaaccagtgagaaaaagagtgctggaaaaacgtggagacgactttaaaaaggaggggaaaatttatagattaaggactcaagatgatggtgaagatgaaaacaacacttggaatggaaattccactcaacagatgtagtgtgacaagtataatatgtgcaataatcattgtttctcttatgatttaattcaactaaaattctactggagaagtgggactgctttatattttccaactggtctataaaatgtctctttattcctgcttagtgggtgtgggttgaaggtgtttaactcagaaaagtaaagacaggaaataactctctgctaggtccttgcttatatggcaaccactgctagaaccctaaaagaaccaaaaatctgccacagcctgcctccatcagcttcttatttagtatttcatatgcccattagccctatgcttcagatgacacgttttgtttagagctactttgctccaagactcttaagcccaaagtaactggtatgtcactgagtaacttgactcggtgtcagagcattttaactagccactcagatgagaatttatgtttaacttctctttttactcatcagctgcaagcaaaatcttgtagtttttaatcttaaacactgaataaaaaaactttcccctaaattggaatgatcttagttttgctttgagttttgttatctagcatctttttgttgcacagggctctattgaggtcctatgtctctgatttttttttttccccagtattgccctggagctgtctctggaaagtagctggcgaggttaccttaactatcactgaagaaagaaattttctgacacactgatggcatgtgacttgtctcctaagtcagtgaggcatcactttgtttgcataaagtatacggtttgttaaggcctttgttcttgtgagatgcaaaacagctgctagtctgcaacctagttttccctctcacctttaactgacgttttgtcctcaataattacacaaggacctagagtacctataggacaaaaagtatagaataaaaatatgcctttagtcatttggtttttcttaaaaagttgagattcttaatctgacttacatgttactttatccgtatgtctttgttagtggagaccgctaaactaatgatgtttgaaaacagttcctctgttttagattggaagatagcactctagagtggacatacggaaagactgtgactttattttgtaatgggaggaagaaattttctcagagcaaactttctattttttacctgtgaaataacagtgactttttaaaatggtgacagtgttggcaaggaaacagcaacacaggctgcgctgttggtaggagtgaaaaccagtataattcttctgaaaaacatttatcagaaacttaatgtttaggtaaagacatactcattaagtgttatttattttactcaagaactggaaaccaactaaatgccttctatagaagtaatttttgatgaggagaaatggtacaatactaattaacaacttggtttaacatgtttactgagcatctgttaagtgttgggggaaaaagcagcaggatccagagctataggtacagtgtgatctcagctttgcaaacacattttctacatagatagtactaggtattaatagatatgtaaagaaagaaatcacaccattaataatggtaagattggtttatgtgattttagtggtatttttggcacccttatatatgttttccaaactttcagcagtgatattatttccataacttaaaaagtgagtttgaaaaagaaaatctccagcaagcatctcatttaaataaaggtttgtcatctttaaaaatacagcaatatgtgactttttaaaaaagctgtcaaataggtgtgaccctactaataattattagaaatacatttaaaaacatcgagtacctcaagtcagtttgccttgaaaaatatcaaatataactcttagagaaatgtacataaaagaatgcttcgtaattttggagtaggaggttccctcctcaattttgtatttttaaaaagtacatggtaaaaaaaaaaattcacaacagtatataaggctgtaaaatgagaattctgccccctcacctcttaccccagtactattctccagaggtaatctattaacaatttcttatgtaattttcagaaaatttgtatgcgtatataagcaaatatgtaatctttattttttaaataaatgggatcatattatatattcta

SEQ ID NO: 341833 - DNA, 3234 bp, Homo sapiens
  misc_feature (28)..(28): n is a, c, g, or t
ataatccaacatttcttttccagttttnctcctctcaatttccttcttaatttctctctgttcttcctctcaggagcctagtggatgctcagatcagagacctgcagaggacctcaacatccgagtggaaagactaacaaaaaaacttgaagaaaggagagaagagaaaagaaaagaggaagaacagagagaaattaagaaggaaattgagaggagaaaaactggaaaagaaatgttggattataaaagaaaacaagaagaagaattaacaaaaagaatgctggaggaaagaaacagagagaaagcagaagatagggcagctcgagaacgtataaaacagcagattgcattggaccgtgcagagagagctgctcgttttgcaaagacaaaggaagaagtagaggctgccaaagctgctgccttgctagcaaaacaggcagaaatggaagtcaagagggaatcttatgcaagagaaagaagcactgttgcaagaattcaattccgtcttcctgatggttcttcctttacaaatcagttcccttctgatgctcctctagaagaggcaaggcagtttgctgcacagactgttggcaacacttacggtaatttttcgttagcaaccatgtttcccaggagggaatttaccaaagaagattataaaaagaagttactggatttggaacttgccccaagcgcttcggtggtactgttgccagcaggaagaccaactgcatccattgtacactcttccagcggagacatttggaccttgttgggaacagtgctttatccattccttgccatctggagattaattagcaatttcttgtttagtaatccgcctcccacacagacttcagtgagagtaacatcgtcagaacccccaaaccctgcatcatctagcaaatcagaaaaaagggaaccagtgagaaaaagagtgctggaaaaacgtggagacgactttaaaaaggaggggaaaatttatagattaaggactcaagatgatggtgaagatgaaaacaacacttggaatggaaattccactcaacagatgtagtgtgacaagtataatatgtgcaataatcattgtttctcttatgatttaattcaactaaaattctactggagaagtgggactgctttatattttccaactggtctataaaatgtctctttattcctgcttagtgggtgtgggttgaaggtgtttaactcagaaaagtaaagacaggaaataactctctgctaggtccttgcttatatggcaaccactgctagaaccctaaaagaaccaaaaatctgccacagcctgcctccatcagcttcttatttagtatttcatatgcccattagccctatgcttcagatgacacgttttgtttagagctactttgctccaagactcttaagcccaaagtaactggtatgtcactgagtaacttgactcggtgtcagagcattttaactagccactcagatgagaatttatgtttaacttctctttttactcatcagctgcaagcaaaatcttgtagtttttaatcttaaacactgaataaaaaaactttcccctaaattggaatgatcttagttttgctttgagttttgttatctagcatctttttgttgcacagggctctattgaggtcctatgtctctgatttttttttttccccagtattgccctggagctgtctctggaaagtagctggcgaggttaccttaactatcactgaagaaagaaattttctgacacactgatggcatgtgacttgtctcctaagtcagtgaggcatcactttgtttgcataaagtatacggtttgttaaggcctttgttcttgtgagatgcaaaacagctgctagtctgcaacctagttttccctctcacctttaactgacgttttgtcctcaataattacacaaggacctagagtacctataggacaaaaagtatagaataaaaatatgcctttagtcatttggtttttcttaaaaagttgagattcttaatctgacttacatgttactttatccgtatgtctttgttagtggagaccgctaaactaatgatgtttgaaaacagttcctctgttttagattggaagatagcactctagagtggacatacggaaagactgtgactttattttgtaatgggaggaagaaattttctcagagcaaactttctattttttacctgtgaaataacagtgactttttaaaatggtgacagtgttggcaaggaaacagcaacacaggctgcgctgttggtaggagtgaaaaccagtataattcttctgaaaaacatttatcagaaacttaaaatatttcataccgtttgatccagtagcttcttctaaatcataaatgcagacaatgtttaggtaaagacatactcattaagtgttatttattttactcaagaactggaaaccaactaaatgccttctatagaagtaatttttgatgaggagaaatggtacaatactaattaacaacttggtttaacatgtttactgagcatctgttaagtgttgggggaaaaagcagcaggatccagagctataggtacagtgtgatctcagctttgcaaacacattttctacatagatagtactaggtattaatagatatgtaaagaaagaaatcacaccattaataatggtaagattggtttatgtgattttagtggtatttttggcacccttatatatgttttccaaactttcagcagtgatattatttccataacttaaaaagtgagtttgaaaaagaaaatctccagcaagcatctcatttaaataaaggtttgtcatctttaaaaatacagcaatatgtgactttttaaaaaagctgtcaaataggtgtgaccctactaataattattagaaatacatttaaaaacatcgagtacctcaagtcagtttgccttgaaaaatatcaaatataactcttagagaaatgtacataaaagaatgcttcgtaattttggagtaggaggttccctcctcaattttgtatttttaaaaagtacatggtaaaaaaaaaaattcacaacagtatataaggctgtaaaatgagaattctgccccctcacctcttaccccagtactattctccagaggtaatctattaacaatttcttatgtaattttcagaaaatttgtatgcgtatataagcaaatatgtaatctttattttttaaataaatgggatcatattatatattcta

SEQ ID NO: 341834 - DNA, 3103 bp, Homo sapiens
tgggactgctttatattttccaactggtctataaaatgtctctttattcctgcttagtgggtgtgggttgaaggtgtttaactcagaaaagaaaagaggaagaacagagagaaattaagaaggaaattgagaggagaaaaactggaaaagaaatgttggattataaaagaaaacaagaagaagaattaacaaaaagaatgctggaggaaagaaacagagagaaagcagaagatagggcagctcgagaacgtataaaacagcagattgcattggaccgtgcagagagagctgctcgttttgcaaagacaaaggaagaagtagaggctgccaaagctgctgccttgctagccactgttgcaagaattcaattccgtcttcctgatggttcttcctttacaaatcagttcccttctgatgctcctctagaagaggcaaggcagtttgctgcacagactgttggcaacacttacggtaatttttcgttagcaaccatgtttcccaggagggaatttaccaaagaagattataaaaagaagttactggatttggaacttgccccaagcgcttcggtggtactgttgccagcaggaagaccaactgcatccattgtacactcttccagcggagacatttggaccttgttgggaacagtgctttatccattccttgccatctggagattaattagcaatttcttgtttagtaatccgcctcccacacagacttcagtgagagtaacatcgtcagaacccccaaaccctgcatcatctagcaaatcagaaaaaagggaaccagtgagaaaaagagtgctggaaaaacgtggagacgactttaaaaaggaggggaaaatttatagattaaggactcaagatgatggtgaagatgaaaacaacacttggaatggaaattccactcaacagatgtagtgtgacaagtataatatgtgcaataatcattgtttctcttatgatttaattcaactaaaattctactggagaagtgggactgctttatattttccaactggtctataaaatgtctctttattcctgcttagtgggtgtgggttgaaggtgtttaactcagaaaagtaaagacaggaaataactctctgctaggtccttgcttatatggcaaccactgctagaaccctaaaagaaccaaaaatctgccacagcctgcctccatcagcttcttatttagtatttcatatgcccattagccctatgcttcagatgacacgttttgtttagagctactttgctccaagactcttaagcccaaagtaactggtatgtcactgagtaacttgactcggtgtcagagcattttaactagccactcagatgagaatttatgtttaacttctctttttactcatcagctgcaagcaaaatcttgtagtttttaatcttaaacactgaataaaaaaactttcccctaaattggaatgatcttagttttgctttgagttttgttatctagcatctttttgttgcacagggctctattgaggtcctatgtctctgatttttttttttccccagtattgccctggagctgtctctggaaagtagctggcgaggttaccttaactatcactgaagaaagaaattttctgacacactgatggcatgtgacttgtctcctaagtcagtgaggcatcactttgtttgcataaagtatacggtttgttaaggcctttgttcttgtgagatgcaaaacagctgctagtctgcaacctagttttccctctcacctttaactgacgttttgtcctcaataattacacaaggacctagagtacctataggacaaaaagtatagaataaaaatatgcctttagtcatttggtttttcttaaaaagttgagattcttaatctgacttacatgttactttatccgtatgtctttgttagtggagaccgctaaactaatgatgtttgaaaacagttcctctgttttagattggaagatagcactctagagtggacatacggaaagactgtgactttattttgtaatgggaggaagaaattttctcagagcaaactttctattttttacctgtgaaataacagtgactttttaaaatggtgacagtgttggcaaggaaacagcaacacaggctgcgctgttggtaggagtgaaaaccagtataattcttctgaaaaacatttatcagaaacttaaaatatttcataccgtttgatccagtagcttcttctaaatcataaatgcagacaatgtttaggtaaagacatactcattaagtgttatttattttactcaagaactggaaaccaactaaatgccttctatagaagtaatttttgatgaggagaaatggtacaatactaattaacaacttggtttaacatgtttactgagcatctgttaagtgttgggggaaaaagcagcaggatccagagctataggtacagtgtgatctcagctttgcaaacacattttctacatagatagtactaggtattaatagatatgtaaagaaagaaatcacaccattaataatggtaagattggtttatgtgattttagtggtatttttggcacccttatatatgttttccaaactttcagcagtgatattatttccataacttaaaaagtgagtttgaaaaagaaaatctccagcaagcatctcatttaaataaaggtttgtcatctttaaaaatacagcaatatgtgactttttaaaaaagctgtcaaataggtgtgaccctactaataattattagaaatacatttaaaaacatcgagtacctcaagtcagtttgccttgaaaaatatcaaatataactcttagagaaatgtacataaaagaatgcttcgtaattttggagtaggaggttccctcctcaattttgtatttttaaaaagtacatggtaaaaaaaaaaattcacaacagtatataaggctgtaaaatgagaattctgccccctcacctcttaccccagtactattctccagaggtaatctattaacaatttcttatgtaattttcagaaaatttgtatgcgtatataagcaaatatgtaatctttattttttaaataaatgggatcatattatatattcta

SEQ ID NO: 341835 - DNA, 3973 bp, Homo sapiens
gcggccgcaccatcgactcgccaacgagagaaggtcctggggcacggacaccgacgggttgcgactgtgacgtgaggtgttctcgcgcgcgctagcgcgcgtctccgggtgccgctgacgggcgtgcgcgcttgtgcggagccggaggtgggggccgaaccagccaaggttgcgggggccgcagagccggacgaagacggagggcggagccggcttcgggactgcggagactacacaccgagcgagcgcctgggcccgaagggagcgatgctgtggttccagggcgccattccggccgccatcgcgacggccaaaaggagcggcgcggtcttcgtggtgttcgtggcaggtgatgatgaacagtctacacagatggctgcaagttgggaagatgataaagttacagaagcatcttcaaacagttttgttgctattaaaatcgataccaaaagtgaagcctgcctacagttttcacaaatctatcctgtagtgtgtgttccatccagtttctttattggagacagtggaattcccttggaagtaatagcaggaagtgtttctgcagatgaacttgttacaagaattcacaaggtccgacagatgcatttgctaaaaagtgaaacatcagtagcaaatggcagtcagtcagaaagttcagtgtctactccatctgcgtcatttgaacctaacaacacttgtgaaaactctcagtccagaaatgcagagctttgtgagataccacccacttctgatacaaagtcagatactgcaacaggaggagaaagtgcaggccatgccacttcctctcaggagcctagtggatgctcagatcagagacctgcagaggacctcaacatccgagtggaaagactaacaaaaaaacttgaagaaaggagagaagagaaaagaaaagaggaagaacagagagaaattaagaaggaaattgagaggagaaaaactggaaaagaaatgttggattataaaagaaaacaagaagaagaattaacaaaaagaatgctggaggaaagaaacagagagaaagcagaagatagggcagctcgagaacgtataaaacagcagattgcattggaccgtgcagagagagctgctcgttttgcaaagacaaaggaagaagtagaggctgccaaagctgctgccttgctagcaaaacaggcagaaatggaagtcaagagggaatcttatgcaagagaaagaagcactgttgcaagaattcaattccgtcttcctgatggttcttcctttacaaatcagttcccttctgatgctcctctagaagaggcaaggcagtttgctgcacagactgttggcaacacttacggtaatttttcgttagcaaccatgtttcccaggagggaatttaccaaagaagattataaaaagaagttactggatttggaacttgccccaagcgcttcggtggtactgttgccagcaggaagaccaactgcatccattgtacactcttccagcggagacatttggaccttgttgggaacagtgctttatccattccttgccatctggagattaattagcaatttcttgtttagtaatccgcctcccacacagacttcagtgagagtaacatcgtcagaacccccaaaccctgcatcatctagcaaatcagaaaaaagggaaccagtgagaaaaagagtgctggaaaaacgtggagacgactttaaaaaggaggggaaaatttatagattaaggactcaagatgatggtgaagatgaaaacaacacttggaatggaaattccactcaacagatgtagtgtgacaagtataatatgtgcaataatcattgtttctcttatgatttaattcaactaaaattctactggagaagtgggactgctttatattttccaactggtctataaaatgtctctttattcctgcttagtgggtgtgggttgaaggtgtttaactcagaaaagtaaagacaggaaataactctctgctaggtccttgcttatatggcaaccactgctagaaccctaaaagaaccaaaaatctgccacagcctgcctccatcagcttcttatttagtatttcatatgcccattagccctatgcttcagatgacacgttttgtttagagctactttgctccaagactcttaagcccaaagtaactggtatgtcactgagtaacttgactcggtgtcagagcattttaactagccactcagatgagaatttatgtttaacttctctttttactcatcagctgcaagcaaaatcttgtagtttttaatcttaaacactgaataaaaaaactttcccctaaattggaatgatcttagttttgctttgagttttgttatctagcatctttttgttgcacagggctctattgaggtcctatgtctctgatttttttttttccccagtattgccctggagctgtctctggaaagtagctggcgaggttaccttaactatcactgaagaaagaaattttctgacacactgatggcatgtgacttgtctcctaagtcagtgaggcatcactttgtttgcataaagtatacggtttgttaaggcctttgttcttgtgagatgcaaaacagctgctagtctgcaacctagttttccctctcacctttaactgacgttttgtcctcaataattacacaaggacctagagtacctataggacaaaaagtatagaataaaaatatgcctttagtcatttggtttttcttaaaaagttgagattcttaatctgacttacatgttactttatccgtatgtctttgttagtggagaccgctaaactaatgatgtttgaaaacagttcctctgttttagattggaagatagcactctagagtggacatacggaaagactgtgactttattttgtaatgggaggaagaaattttctcagagcaaactttctattttttacctgtgaaataacagtgactttttaaaatggtgacagtgttggcaaggaaacagcaacacaggctgcgctgttggtaggagtgaaaaccagtataattcttctgaaaaacatttatcagaaacttaaaatatttcataccgtttgatccagtagcttcttctaaatcataaatgcagacaatgtttaggtaaagacatactcattaagtgttatttattttactcaagaactggaaaccaactaaatgccttctatagaagtaatttttgatgaggagaaatggtacaatactaattaacaacttggtttaacatgtttactgagcatctgttaagtgttgggggaaaaagcagcaggatccagagctataggtacagtgtgatctcagctttgcaaacacattttctacatagatagtactaggtattaatagatatgtaaagaaagaaatcacaccattaataatggtaagattggtttatgtgattttagtggtatttttggcacccttatatatgttttccaaactttcagcagtgatattatttccataacttaaaaagtgagtttgaaaaagaaaatctccagcaagcatctcatttaaataaaggtttgtcatctttaaaaatacagcaatatgtgactttttaaaaaagctgtcaaataggtgtgaccctactaataattattagaaatacatttaaaaacatcgagtacctcaagtcagtttgccttgaaaaatatcaaatataactcttagagaaatgtacataaaagaatgcttcgtaattttggagtaggaggttccctcctcaattttgtatttttaaaaagtacatggtaaaaaaaatttttcaccgcggtttttggccctataatgtgtttttgcccccctccctcttttacctcccttcttttctcgccgggtgttttcttttctccaatttcttatgtaattttcagaaaatttgtatgcgtatataagcaaatatgtaatctttattttttaaataaatgggatcatattatatattcta

SEQ ID NO: 341836 - DNA, 2310 bp, Homo sapiens
gcggccgcaccatcgactcgccaacgagagaaggtcctggggcacggacaccgacgggttgcgactgtgacgtgaggtgttctcgcgcgcgctagcgcgcgtctccgggtgccgctgacgggcgtgcgcgcttgtgcggagccggaggtgggggccgaaccagccaaggttgcgggggccgcagagccggacgaagacggagggcggagccggcttcgggactgcggagactacacaccgagcgagcgcctgggcccgaagggagcgatgctgtggttccagggcgccattccggccgccatcgcgacggccaaaaggagcggcgcggtcttcgtggtgttcgtggcaggtgatgatgaacagtctacacagatggctgcaagttgggaagatgataaagttacagaagcatcttcaaacagttttgttgctattaaaatcgataccaaaagtgaagcctgcctacagttttcacaaatctatcctgtagtgtgtgttccatccagtttctttattggagacagtggaattcccttggaagtaatagcaggaagtgtttctgcagatgaacttgttacaagaattcacaaggtccgacagatgcatttgctaaaaagtgaaacatcagtagcaaatggcagtcagtcagaaagttcagtgtctactccatctgcgtcatttgaacctaacaacacttgtgaaaactctcagtccagaaatgcagagctttgtgagataccacccacttctgatacaaagtcagatactgcaacaggaggagaaagtgcaggccatgccacttcctctcaggagcctagtggatgctcagatcagagacctgcagaggacctcaacatccgagtggaaagactaacaaaaaaacttgaagaaaggagagaagagaaaagaaaagaggaagaacagagagaaattaagaaggaaattgagaggagaaaaactggaaaagaaatgttggattataaaagaaaacaagaagaagaattaacaaaaagaatgctggaggaaagaaacagagagaaagcagaagatagggcagctcgagaacgtataaaacagcagattgcattggaccgtgcagagagagctgctcgttttgcaaagacaaaggaagaagtagaggctgccaaagctgctgccttgctagcaaaacaggcagaaatggaagtcaagagggaatcttatgcaagagaaagaagcactgttgcaagaattcaattccgtcttcctgatggttcttcctttacaaatcagttcccttctgatgctcctctagaagaggcaaggcagtttgctgcacagactgttggcaacacttacggtaatttttcgttagcaaccatgtttcccaggagggaatttaccaaagaagattataaaaagaagttactggatttggaacttgccccaagcgcttcggtggtactgttgccagcaggaagaccaactgcatccattgtacactcttccagcggagacatttggaccttgttgggaacagtgctttatccattccttgccatctggagattaattagcaatttcttgtttagtaatccgcctcccacacagacttcagtgagagtaacatcgtcagaacccccaaaccctgcatcatctagcaaatcagaaaaaagggaaccagtgagaaaaagagtgctggaaaaacgtggagacgactttaaaaaggaggggaaaatttatagattaaggactcaagatgatggtgaagatgaaaacaacacttggaatggaaattccactcaacagatgtagtgtgacaagtataatatgtgcaataatcattgtttctcttatgatttaattcaactaaaattctactggagaagtgggactgctttatattttccaactggtctataaaatgtctctttattcctgcttagtgggtgtgggttgaaggtgtttaactcagaaaagtaaagacaggaaataactctctgctaggtccttgcttatatggcaaccactgctagaaccctaaaagaaccaaaaatctgccacagcctgcctccatcagcttcttatttagtatttcatatgcccattagccctatgcttcagatgacacgttttgtttagagctactttgctccaagactcttaagcccaaagtaactggtatgtcactgagtaacttgactcggtgtcagagcattttaactagccactcagatgagaatttatgtttaacttctctttttactcatcagctgcaagcaaaatcttgtagtttttaatcttaaacactgaataaaaaaactttcccct

SEQ ID NO: 341837 - DNA, 1663 bp, Homo sapiens
gcggccgcaccatcgactcgccaacgagagaaggtcctggggcacggacaccgacgggttgcgactgtgacgtgaggtgttctcgcgcgcgctagcgcgcgtctccgggtgccgctgacgggcgtgcgcgcttgtgcggagccggaggtgggggccgaaccagccaaggttgcgggggccgcagagccggacgaagacggagggcggagccggcttcgggactgcggagactacacaccgagcgagcgcctgggcccgaagggagcgatgctgtggttccagggcgccattccggccgccatcgcgacggccaaaaggagcggcgcggtcttcgtggtgttcgtggcaggtgatgatgaacagtctacacagatggctgcaagttgggaagatgataaagttacagaagcatcttcaaacagttttgttgctattaaaatcgataccaaaagtgaagcctgcctacagttttcacaaatctatcctgtagtgtgtgttccatccagtttctttattggagacagtggaattcccttggaagtaatagcaggaagtgtttctgcagatgaacttgttacaagaattcacaaggtccgacagatgcatttgctaaaaagtgaaacatcagtagcaaatggcagtcagtcagaaagttcagtgtctactccatctgcgtcatttgaacctaacaacacttgtgaaaactctcagtccagaaatgcagagctttgtgagataccacccacttctgatacaaagtcagatactgcaacaggaggagaaagtgcaggccatgccacttcctctcaggagcctagtggatgctcagatcagagacctgcagaggacctcaacatccgagtggaaagactaacaaaaaaacttgaagaaaggagagaagagaaaagaaaagaggaagaacagagagaaattaagaaggaaattgagaggagaaaaactggaaaagaaatgttggattataaaagaaaacaagaagaagaattaacaaaaagaatgctggaggaaagaaacagagagaaagcagaagatagggcagctcgagaacgtataaaacagcagattgcattggaccgtgcagagagagctgctcgttttgcaaagacaaaggaagaagtagaggctgccaaagctgctgccttgctagcgtactatatttcatgctgaaacatctctgtgcacataggggctgaggagaatgattataagctggtttttaacactgatgtatactgtggttataagcagtccattccagagggacatattaatttgacagctcccaatggtatctctcatttcgtgtgagtgtacactaaaaaagtactacataaataactttaaaagagggcccaatagccgggcgcggtggctcacgcctgtaatcccagcactttgggaggccgagacgggcggatcacgaggtcaggagatcgagaccatcctggctaacatggtgaaaccccgtctctactaaaaatacaaaaattagctgggcatggtggcgggcgcctgtagtcccagctacgcgggaggctgaggcaggagaatggcgtgaacccgggaggcggagcttgcagtgagccgagattgcgccactgcactccagcctgggcgacagagcgagactccgtccccaaaaaaa

SEQ ID NO: 341838 - DNA, 953 bp, Homo sapiens
gcggccgcaccatcgactcgccaacgagagaaggtcctggggcacggacaccgacgggttgcgactgtgacgtgaggtgttctcgcgcgcgctagcgcgcgtctccgggtgccgctgacgggcgtgcgcgcttgtgcggagccggaggtgggggccgaaccagccaaggttgcgggggccgcagagccggacgaagacggagggcggagccggcttcgggactgcggagactacacaccgagcgagcgcctgggcccgaagggagcgatgctgtggttccagggcgccattccggccgccatcgcgacggccaaaaggagcggcgcggtcttcgtggtgttcgtggcaggtgatgatgaacagtctacacagatggctgcaagttgggaagatgataaagttacagaagcatcttcaaacagttttgttgctattaaaatcgataccaaaagtgaagcctgcctacagttttcacaaatctacttcattaaactgtacagatcctgtagtgtgtgttccatccagtttctttattggagacagtggaattcccttggaagtaatagcaggaagtgtttctgcagatgaacttgttacaagaattcacaaggtccgacagatgcatttgctaaaaagtgaaacatcagtagcaaatggcagtcagtcagaaagttcagtgtctactccatctgcgtcatttgaacctaacaacacttgtgaaaactctcagtccagaaatgcagagctttgtgagataccacccacttctgatacaaagtcagatactgcaacaggaggagaaagtgcaggccatgccacttcctctcaggagcctagtggatgctcagatcagagacctgcagaggacctcaacatccgagtggaaagactatacccaagataacttgaagtaacggagatgaagagctgtagcctagtgatagtgtttcctg

SEQ ID NO: 341839 - DNA, 412 bp, Homo sapiens
ttttgctttgatttggcttggagccaaattgtatgttttaatcagaatatccatggcctgattcactttgttcaagtctctgcctctccttcagtttctagtttctatattctaattaagatgttttgtagttctgatattacttatcaccttgtatggtttaatgcaagctacctcaagtcctttgtgaatggggcagagcgtgtacacatgcacacaggtgtatgcacacacacttatactttcccagtagttgtgacttttttcaagtatgttaacaacaatcacgttttttaaatattccattctttggaaatattttcagcacctctctgctaacattaatctaatacctggaaatatgacaagaggtgttacttgtcctcatgaaagagcctattacatagtgtaa

SEQ ID NO: 341840 - DNA, 1452 bp, Homo sapiens
cgcccccaggacgcgttgttcgctgccggagtttggggtggcaaggaccgggcgcacggctgagatgcgctgccctccagaatgcgagcctgtgcacgcgcctgcggaggggccacactccctgcagcgtccgcgatgcgctgttcccgctggcgctcggcgggcgctcccctgggcacatcgaggctctagtgaccgcattatgaattagtcctttccttttctcctcatgtgattgcagcgagcgctcgtcttgtttgtaaatcgtgctggcaagccccgttttaaccaactacgaatttcatttcggaatgaaaaaggagacgcactttcggacagggcagcggttgccgccggtccttcctctgagctaccggtccctagaaggaagacctgccttcgaccgatctggaaatgagtcccagctgcaagcccagggcggcggaagccccacgggccgagccgaagaaagacgaggcgggggacggggagcgtagtgccgcgtgccgggacccacaacccctttcccctgggcgctcttccccgagcggacaggaaaaagctctcctttgccgctgcccatcccccagggcccaagcgatgcttcctaaccgcgtggacgcagcttgatgggggagaaagagctctgggagcagggcttagagcctcgtctcgcctcctgccaactcggtccggcaaggttccgaacctccctgagcctcagcttcctaatctggcaaacatgacgacaaaagtccttctcttttaaggttggtgcaaaaattaaatggccctttactgtatatttagagcacctggctcacggattagtcacctcgctcctgggctcaacagtgttcactgggtccttacagcatcacactgggatccttaagggcaaagaccaaaattagacctagcttaattcctggtgtgcaagtgctaagtgttatgaaatgagtgagtgacaggatgatccagctatgagaaataggagagagtttgcggtgggatagagactgtaccttctttttgtataagatgtttggcagttggggataacttaccggaagcaagcttaagatgcacacgaaatcctgaccaagaggatgtagaaattagatatatggccaagaatcagagaagcaaataaacagatctcaaataaaatgtttagttttgaggttagaggtgggatatcagggtaaccaggcaaaataactgatacaataaataactacatgacaaatcacttctctcaacaacacatttcaaaaaaaatcactttattttataactgcaagattttcttcaaaccagtttcttgctattacaagctcaaaaacttatcctgctctggtggcaaacattttgtgactcatgctgtgtaacaaagacctgtgtagacattgagttgtatattgctgatgcttctgaacataaaggaaaagt

SEQ ID NO: 341841 - DNA, 225 bp, Homo sapiens
gctggtgttgttatgttgctgttgttatgctggtcgtgctgctccatgttctccaggtgttcttcccttttatcgtcacagttaccccgtacacctgacaactggacatctgcgcctgggggtcttcagcctaaacacacctaaaccctccaccaaacccctctgcttccgcctccccgtgtctgtgagcgcctccactgcccatccctctgctcaggccccact

SEQ ID NO: 341842 - DNA, 685 bp, Homo sapiens
tgggtaggagagagttgatgtggggttgttgagagacatgagggttctttgtggcttggcttaaaaggcttataatcacatagtggtctgtgttgggcagcatggaaatgaagccccaagctttattggctataaacgtggagttctaatttccgaggaagatctcccatctgtttccctatccataagccaagatagactaggggtgaacaacacactgctagtgagagtataaattatttgtgcccaggggtttagattctctgtgtccatcgctactaattcttactcattcctgacaccctagtatccctttcagcatattttgacaaccccatctctgttttaaaattcttccctgcaggattcatatgtcagggaattgcgttctggtttaattggaacaagccatttggaagtcctcctggtctggagaacattctgtgaggtagagaggctgcaaccccaggataatgtcctcagtgggagggacaggaggtcttatgtcaagaagaggtgatggtccctctcctcaccagtgatggctagtccgaggacatcctttaattccacatctgttcaagttttgtctttggatctcagaatgtgcctgcctgcagggaaaatcaaaggagttgaaatgacagtaaatattaaccttgaaagagactttaaaaaaaataaa

SEQ ID NO: 341843 - DNA, 787 bp, Homo sapiens
ctttggatgctacacccatcactgtgttgacacagctcttaaaggtgctcgcttaatcaatggatccagtgacttttccatcctgacaaggccagtcattaccatggatgaggtccaggctttctgaagttgcttctaccagctgtcttctctagcagccaaatgccatattctatcatcagcctggctgcataaccttgcataaactacttaaaaaccttctgcctcagcttctacttctataaaatggaaataatattagtacctacttaacagggttttgtgaggatgaggtgagccaatacctgtaaagtgctttaaataatcctggcacatgaggttgagaagcaagctggggtctccaacgaaggcttttttttttaacattaataaaatatttaataaagagtagctcattaaatgcacatggctcattaaatgccactctttattaatttttttatgatgattttctaagtgatgtttcactctgcagtttgcctcacatctcttcttcccacatttcagagatcttggctgaggttcaaccattattcttgtatctttcttcctgtgtcctctcttccccagaaatcgtatctgcccctgaagtttcagtgattgtttacatgggttcagtatcccttatttaaaattcatgagaccagaagtgtttcagatttcaaataattttggattttgggatatttgcattatacttactgattcagcattccttatccaaagatctgaaatctaaaatcctccaataaacatttccttggag

SEQ ID NO: 341844 - DNA, 544 bp, Homo sapiens
atcaagctgctgcagctgccagaaaagatgcctgctactaccagcagaaagggagtggagcccagagcatcacgaggagtgccttctagtgtactgtcaccttgccaccccctcctgtcccttcacccagacacatggaagggatggaaaaggattcttcacagagcactccggtacactgtatcagacaaaaattgatagattagctaatggtttttcttgaatttgagaagcaaagccctgttctccatattgatatgttctccctcaaccaagatcttctaaaaagaaataatattttagtcttctgcttgaggatttgactgtgaagctatgcctagtgaaaaacatattcttgcagcagctctggtggcagttatccttgaggaaccttcagtgtgtggtgggaagctatcagaacaagaaatgtaggcatttaatcttataacacttgtgctggtttcatgccttctgagaaattagaaaccctttctgttgctattatattaataaaattggtgtttgttttctggtaaaaaaaaat

SEQ ID NO: 341845 - DNA, 282 bp, Homo sapiens
gcattctgggagatgttaacagaggcccatatgactggtgattctcatgttcattcactgattcagggaaaacactctctgaatgggcgcctgaatgtggcataaaggctattttttgtggggtggcttttctttctacggttaagtggtaaagcaaggagcttatcttgcctctaggacttgagcatcaaggacaagaatatttgggacgcaaatatttcaaaggcagttttttgggggttttttgtttgtttgtgatggagtctcactctttcacccggg

SEQ ID NO: 341846 - DNA, 518 bp, Homo sapiens
gaatttaaactgccccctaaagccctctccccaacccctccactgaatgacacagatccaggtaaaaccacttctccagtggagaaactgtgcaataaaaaaaggaaagttgcagcaagacctacatccaggaatggccatgtgactcaagacagacatcagtttatgctaccaacagcgctatgcattgggagaggctgacctagaactgtatggatgcccaatccctagagaacctacgttcgccccaaccaagggcaggtcatggaggctgtggggtctacaccgactcatgaattggctgggctgatgagcacacctggccacccatctgctttggagtccacgcgcttccactggaccttggattatctcttctccagcagggcaggatgggtggtgggaggtggaagggcagtgaccactactgtcaatcctggagaggcactggcttcacagtgaaagttaataaggccctgaggctccccaagattctaaaataaaaagattaaccactg

SEQ ID NO: 341847 - DNA, 206 bp, Homo sapiens
gagaggaggaagagaggaaggagaaagaggagagagagaataaaagctaaggaaagaaggatggaaagaaaaagaaaaggacagccattccatgcttttgtatactttactcaaaccaaaaataatttgtgggaaatgtgattttttgacacatgagaggggcatgtgtgtgtttctctgttccctctttagacttagcctacatg

SEQ ID NO: 341848 - DNA, 413 bp, Homo sapiens
atgccatccaggagccaggaccaggagttggaaaccttagaaatctacctggtgttttattctactgtggctgagctggcacctataccacaagacaaaatccttaccactcttccttttccccaggcaaaagagcctctctccgtgtcaactaccaccataagcccatgggagtgctgctagactctatcaatctaactactactgtcaatgtttacttaagcccaaggcctccttagtcagcttgtggtgaatggtgccaggcctgcaactcacctttcagggcaatgcactcccctttggcccagggtaggtctagaaatggcatctaagagccaaggcctggaattggggaccccaaaagccctcttggtcctctaccccactggccaagccggtacctgagctgtaag

SEQ ID NO: 341849 - DNA, 618 bp, Homo sapiens
gaataagattgaaaactagcattggagtaggctgtggagtaatagagctttgaaatcctttttgaggctttatgtgctttcaaagaggatggcttctggcagtggagagtagttttttccataaaacatttactttgcaaatatataacaaaagactgtttccacctatatgactgaaaaatggagcattgactataaaacacatcctgttatattttcctgatttgaacacaaaagacatgtattgctcatctaacactgtgtatttaatatttcctgcgtatgagtgaaacctgttaaacaaggtgaagaaaatctataaaaggttaagatgtttttaaaaacaatttttggggcagcgttttgaagaccagtgtgtttactccttgaggatttattaatgtttaattggctctttcgtgtttatagtgctctgctgcaaacaccttttttgattttaccagtagctgcactgccatttctttatactagaagagctagaagatttgctgccagggccagcattgtgcatgtcgtactttcatgcatgtattattattttaaaaaatcatgtgtctgtgggagcaggtcagctacatttctgatacacgtatgttt

SEQ ID NO: 341850 - DNA, 852 bp, Homo sapiens
tttttacagcacaatactgcctctctacttattttttctaaaagcagagcggaggagaaaaagtgcacgcgtgcatgtgtgtgtgtgtgtataagcttactgcagctgtattacaggtgtgagggctccagatccttaccagcaagccagatactggtgttgggggtttgaggtgggaatatggaattagttatcaggagttggaactctttaagtctgactctatccctgatttgtgacctaggtttagtcacttaattactcagagcctcattgttctacctggcaagtaatatccatctgatattattacttcgtttttatgtaacagttatagaattcactagctactacattagaccatatggaaaaaatcaaggtactactgtgatacattcagacaatgcaatattattgagagctaaaaagaaatgaactatcaaaccatgaaaaacatagaagaaccttacatgcttattactgagtgaaagaaaccaatttggaaaggctgcatactgtatgactccaactctatgacattctggaaagggtagaactatggaggcagtaaaaagaggagtggttgccagagggtgagggaaggttgtgctgaatagacaggcatagaggaatttcaggacagtgaaactactctgtgtgatagtataatggtggctgtatgtcattatatgtttgtctaaatccatggaatgtacagcatcaggagtgaacactagtttaaactgtggacttcgacagtattgaggtgtcagtgtaggttcgattgtaacaaatgttctgctatgtgtagcttgttgatagtggggagatgtggggtggggaggccaggag

SEQ ID NO: 341851 - DNA, 467 bp, Homo sapiens
gggctcaaccccagatttgagcagggagaaaaaaaaaatcagcaaacttcaatataggtcagttgagatgatctagtctgggcaacagattgaaaagagaaagaagaaacatcaacaggcctcaaagtcctgtgggacacaatcaagcacaccaacgtgcgcgtaatgggagtttcagaaggagaggagaaaaagaaaagggcaggcataatacttgaataaaagaatggccaaaaacttcctaaatttaatgagaaatatttatcgacacatccaagaagcttaacaaatgccaagtgacataaacaaatccacacctcaacacattgtaattaaccgattaaaagtcaagggcaaagagagactcttgaaagtggccactttcaagaagaaaagccacaaagagagaagccactcatcacataatcctccataagatttacagttgatgccatgaaagccaaaag

SEQ ID NO: 341852 - DNA, 431 bp, Homo sapiens
ccatgttacttttaattagtgtaattaccatggagacaataggcatcatctgtcactgtttatctttcattctaatcaaaagagacattttaaacaagctttttaggatctctgaaatattgtctactcataatcatgtattataaagttcagctgttttaaaagttaactataccaggagtgtactcattaggtatgataacaagttaactggttaatctcatacagatggaaagttcttataagttagacatttttgagttgtgcacctatatttggaaagaacaacttttagtcatatccctcatatatctgttttgacgttttatgtcagccttatgtttaaatgtgatacctcattataacgtcctaaaggcaagaaacaatatacccaaataaaaatatgtctatgcttctgtgttataatttat

SEQ ID NO: 341853 - DNA, 1652 bp, Homo sapiens
gctcagcaaggggtccgtccttctctgtcactgtctcttttgcctgttgtaattctgtctgcctctctgggactctgcctgtctcactctttctgtctgtgcctctcctcactcttgttctttctgcctgaatcacagccctcagtttttctgtcctcatgcatttgtctttgtggctctttccgtctttctgcccttgacaccatcccctctcccagtgcttcccctctgcttccagatcgcttcatgacttaggcagggaaacagaggtcagggcctccttccaggcttccctctgcatcttactgagtatgcaggtcggaagagcctcgggtcctgcctccgcgggtggcctagagccaaaggaaggcggagcccgtcggggcgggattggcccttagggccacctcataaagcctggggcgaggggcacaacggccttgggaaggagccctgctggggccgtccagtcccccagacctcacaggctcagtcgcggatctgcagtgtcatgcctgggagccctcggcccgcgccaagctgggtgctgttgctgcggctgctggcgttgctgcggcccccggggctgggtgaggcatgcagctgcgccccggcgcaccctcagcagcacatctgccactcggcacttgtgattcgggccaaaatctccagtgagaaggtagttccggccagtgcagaccctgctgacactgaaaaaatgctccggtatgaaatcaaacagataaagatgttcaaagggtttgagaaagtcaaggatgttcagtatatctatacgccttttgactcttccctctgtggtgtgaaactagaagccaacagccagaagcagtatctcttgactggtcaggtcctcagtgatggaaaagtcttcatccatctgtgcaactacatcgagccctgggaggacctgtccttggtgcagagggaaagtctgaatcatcactaccatctgaactgtggctgccaaatcaccacctgctacacagtaccctgtaccatctcggcccctaacgagtgcctctggacagactggctgttggaacgaaagctctatggttaccaggctcagcattatgtctgtatgaagcatgttgacggcacctgcagctggtaccggggccacctgcctctcaggaaggagtttgttgacatcgttcagccctagtagggaccagtgaccatcacatcccttcaagagtcctgaagatcaagccagttctccttccctgcagagctttggccattaccacctgacctcttgctgccagctaataagaagtgccaagtggacagtctggccactgtcaaggcagggaaggggccatgacttttctgccctgccctcagcctgttgcccctgcctcccaaaccccattagtctagccttgtagctgttactgcaagtgtttcttctggcttagtctgttttctaaagccaggactattccctttcctccccaggaatatgtgttttcctttgtcttaatcgatctggtaggggagaaatggcgaatgtcatacacatgagatggtatatccttgcgatgtacagtatcagaaggtggtttgacagcatcataaacaggctgactggcaggaatgaaaacaagaacatactgtggctgtgtatc

SEQ ID NO: 341854 - DNA, 1986 bp, Homo sapiens
gctcagcaaggggtccgtccttctctgtcactgtctcttttgcctgttgtaattctgtctgcctctctgggactctgcctgtctcactctttctgtctgtgcctctcctcactcttgttctttctgcctgaatcacagccctcagtttttctgtcctcatgcatttgtctttgtggctctttccgtctttctgcccttgacaccatcccctctcccagtgcttcccctctgcttccagatcgcttcatgacttaggcagggaaacagaggtcagggcctccttccaggcttccctctgcatcttactgagtatgcaggtcggaagagcctcgggtcctgcctccgcgggtggcctagagccaaaggaaggcggagcccgtcggggcgggattggcccttagggccacctcataaagcctggggcgaggggcacaacggccttgggaaggagccctgctggggccgtccagtcccccagacctcacaggctcagtcgcggatctgcagtgtcatgcctgggagccctcggcccgcgccaagctgggtgctgttgctgcggctgctggcgttgctgcggcccccggggctgggtgaggcatgcagctgcgccccggcgcaccctcagcagcacatctgccactcggcacttgtgattcgggccaaaatctccagtgagaaggtagttccggccagtgcagaccctgctgacactgaaaaaatgctccggtatgaaatcaaacagataaagatgttcaaagggtttgagaaagtcaaggatgttcagtatatctatacgccttttgactcttccctctgtggtgtgaaactagaagccaacagccagaagcagtatctcttgactggtcaggtcctcagtgatggaaaagtcttcatccatctgtgcaactacatcgagccctgggaggacctgtccttggtgcagagggaaagtctgaatcatcactaccatctgaactgtggctgccaaatcaccacctgctacacagtaccctgtaccatctcggcccctaacgagtgcctctggacagactggctgttggaacgaaagctctatggttaccaggctcagcattatgtctgtatgaagcatgttgacggcacctgcagctggtaccggggccacctgcctctcaggaaggagtttgttgacatcgttcagccctagtagggaccagtgaccatcacatcccttcaagagtcctgaagatcaagccagttctccttccctgcagagctttggccattaccacctgacctcttgctgccagctaataagaagtgccaagtggacagtctggccactgtcaaggcagggaaggggccatgacttttctgccctgccctcagcctgttgcccctgcctcccaaaccccattagtctagccttgtagctgttactgcaagtgtttcttctggcttagtctgttttctaaagccaggactattccctttcctccccaggaatatgtgttttcctttgtcttaatcgatctggtaggggagaaatggcgaatgtcatacacatgagatggtatatccttgcgatgtacagtatcagaaggtggtttgacagcatcataaacaggctgactggcaggaatgaaaacaaaaaaaaaaaaaaaaaaaaaaaaaaaaaaaaaaaaaaaaaaaaaaaaaaacacagacagaaaggagaacaaaccaccgaacaaaccacaacacaaaaccaaagaaccaaacacaaagaaaacaaccaaaacagacgcgacatgcagacataacaacacaaacagaacgagaagcgacgcaaccaatagacgcaacacacaaacaaatgggacacacaaggaagcacgaaataaaactcaaagagacaaagacgaacacacgacaccaccggggcaacaccacaaagcccctagcagcccgcatgacaaaaccatccagccaaaaacccgaaagagagaccgagcacacgggaagcca

SEQ ID NO: 341855 - DNA, 392 bp, Homo sapiens
tgaaagatgattcacacagatcgaagagcctccttgcatgtggtttggtagttgccattacacatgtctatctcagctgcacacagtccccctggagccagaggagctcatgttaaaagtgttgctatgggctgaattgcattacccaccccccaaaatgcctatgtcgaagtcctaccccctagtacttcggaatgtggctgtatttggagatagggcctttagaggagtgattaaattaaaatgaggtcattccggcagggcctaatctgatattactggtgtccttctatgaacaggaaatttggacacagacagctacagagggaagaccacgtgaggacacagggagaaggtggccgtctacaagccaaggagagagactgcaggag

SEQ ID NO: 341856 - DNA, 1630 bp, Homo sapiens
gctcagcaaggggtccgtccttctctgtcactgtctcttttgcctgttgtaattctgtctgcctctctgggactctgcctgtctcactctttctgtctgtgcctctcctcactcttgttctttctgcctgaatcacagccctcagtttttctgtcctcatgcatttgtctttgtggctctttccgtctttctgcccttgacaccatcccctctcccagtgcttcccctctgcttccagatcgcttcatgacttaggcagggaaacagaggtcagggcctccttccaggcttccctctgcatcttactgagtatgcaggtcggaagagcctcgggtcctgcctccgcgggtggcctagagccaaaggaaggcggagcccgtcggggcgggattggcccttagggccacctcataaagcctggggcgaggggcacaacggccttgggaaggagccctgctggggccgtccagtcccccagacctcacaggctcagtcgcggatctgcagtgtcatgcctgggagccctcggcccgcgccaagctgggtgctgttgctgcggctgctggcgttgctgcggcccccggggctgggtgaggcatgcagctgcgccccggcgcaccctcagcagcacatctgccactcggcacttgtgattcgggccaaaatctccagtgagaaggtagttccggccagtgcagaccctgctgacactgaaaaaatgctccggtatgaaatcaaacagataaagatgttcaaagggtttgagaaagtcaaggatgttcagtatatctatacgccttttgactcttccctctgtggtgtgaaactagaagccaacagccagaagcagtatctcttgactggtcaggtcctcagtgatggaaaagtcttcatccatctgtgcaactacatcgagccctgggaggacctgtccttggtgcagagggaaagtctgaatcatcactaccatctgaactgtggctgccaaatcaccacctgctacacagtaccctgtaccatctcggcccctaacgagtgcctctggacagactggctgttggaacgaaagctctatggttaccaggctcagcattatgtctgtatgaagcatgttgacggcacctgcagctggtaccggggccacctgcctctcaggaaggagtttgttgacatcgttcagccctagtagggaccagtgaccatcacatcccttcaagagtcctgaagatcaagccagttctccttccctgcagagctttggccattaccacctgacctcttgctgccagctaataagaagtgccaagtggacagtctggccactgtcaaggcagggaaggggccatgacttttctgccctgccctcagcctgttgcccctgcctcccaaaccccattagtctagccttgtagctgttactgcaagtgtttcttctggcttagtctgttttctaaagccaggactattccctttcctccccaggaatatgtgttttcctttgtcttaatcgatctggtaggggagaaatggcgaatgtcatacacatgagatggtatatccttgcgatgtacagtatcagaaggtggtttgacagcatcataaacaggctgactggcaggaatgaaaacaa

SEQ ID NO: 341857 - DNA, 1431 bp, Homo sapiens
ttctgtcaaccctatgatgtgaaacagcttgagaagctcgtgtgtagaggaagcttgacagaggctgaccgaggaatgaacttctcctgaaatcaagcccagagcattccaggaagaaaaaacaacatctgtagagatgctgagacaagaacaaacatggcgtgtgcggggagcttgcaagtcgttcagcatgacttaagtgaaatggaaagttctgagaagagtaagctgtcgaactagaaaggaaatttggacacagacagctacagagggaagaccacgtgaggacacagggagaaggtggccgtctacaagccaaggagagagactgcaggagaaaccaaccctgccaacaccctgatctcgaacttccagcctcgagaactgcccagccacagaacgttaagaggacatctgcctcccctacagctggaaacagaaggaactctaaaggtcaattgccttgcgcccagtgattcgggccaaaatctccagtgagaaggtagttccggccagtgcagaccctgctgacactgaaaaaatgctccgatgttcaaagggtttgagaaagtcaaggatgttcagtatatctatacgccttttgactcttccctctgtggtgtgaaactagaagccaacagccagaagcagtatctcttgactggtcaggtcctcagtgatggaaaagtcttcatccatctgtgcaactacatcgagccctgggaggacctgtccttggtgcagagggaaagtctgaatcatcactaccatctgaactgtggctgccaaatcaccacctgctacacagtaccctgtaccatctcggcccctaacgagtgcctctggacagactggctgttggaacgaaagctctatggttaccaggctcagcattatgtctgtatgaagcatgttgacggcacctgcagctggtaccggggccacctgcctctcaggaaggagtttgttgacatcgttcagccctagtagggaccagtgaccatcacatcccttcaagagtcctgaagatcaagccagttctccttccctgcagagctttggccattaccacctgacctcttgctgccagctaataagaagtgccaagtggacagtctggccactgtcaaggcagggaaggggccatgacttttctgccctgccctcagcctgttgcccctgcctcccaaaccccattagtctagccttgtagctgttactgcaagtgtttcttctggcttagtctgttttctaaagccaggactattccctttcctccccaggaatatgtgttttcctttgtcttaatcgatctggtaggggagaaatggcgaatgtcatacacatgagatggtatatccttgcgatgtacagtatcagaaggtggtttgacagcatcataaacaggctgactggcaggaatgaaaacaa

SEQ ID NO: 341858 - DNA, 407 bp, Homo sapiens
agaaggtccaagaaagtcgacatgttttctgccctcaagaaatgaacctctggcttaaaacaaaaaccttgcaagcaactaatgatgggctaacttggtaccggtatagaaggactcgttcaatttaccttaaatcattaagagtcccttgtcagggggcctgacaggatcccagaaaaagccaaatcctcgagcttcaagaagagctggagctaactctctatgatagttaatttacgtgtcagcttggctgggctgtggggcccagttgttccatcaaacacgagttcagatgttgctgggaaggtattttgttgatggaattaatgtcccaaatcatctggctttaagtcaaggtgaggaccgttgttcttatgggtgggcctcctccaaccagtgggcagcct

SEQ ID NO: 341859 - DNA, 402 bp, Homo sapiens
ccgggtgatctagaggatcccgtcgacggtaccaacactgacaacggcttagcacaaacccaaaaggctctgctagagctcagaggcagccacgagattgggagagctggatgacggtttgctaagagaattcaagctgtcagtcctcctgtgtatcctttggattctgttatgctgttgcttgtagagggaaaaagttcatgtgtcatttatatacaagtgcccatttgacattgagtgagtcacatttattttaccctatatgaacacaaaatctctgttttaaaatcagattctagaactttaaaagggttcttatgtattgttctgaagtaactcagtggctcttggtgagcccgccccacctggcctgttggtaccctcttcctgccccctcaccgg

SEQ ID NO: 341860 - DNA, 586 bp, Homo sapiens
cggagaaagaatcagttgcagtctggaggaatatacgtgtgttacatggtttccctgcctttaaattctctgttaatctgtattccttgtaaagtagatgacagcatgtatcttggcctacatgtttctaaagacaaacctctaagctcttgaagttctgccatggtgtatcatagtacattgaagtcagaaagcccattagaggaggaggatgcctggctagaatagtgttcttgagtttttccatgtgtattgtctcaggtaggaagatgacaagtcctactttgttcttgtgtgattccccatcattcagtctgtggaggctgagcttgttaatggtggtgaacacgagtttcgttctttgccaggagtgcccaccagtgcccataacgccctcccggagccgggcagtatgtttagggtaagactgactaacgacccaacactgacaacggcttagcacaaacccaaaaggctctgctagagctcagaggcagccacgagattgggagagctggatgacggtttgctaagagaattcaagctgtcagtcctcctgtgtatcctttggattctgttatgctgt

SEQ ID NO: 341861 - DNA, 370 bp, Homo sapiens
gtgaaaatttcttaatctacctacagtgaactagctggttacagaatcaactcttccacccatgaataatagccagaaaagctagacgatgtataaccacatttgtgtgaaggcaccagaaagctaccaaggcagagatggcttaatgggacaagcttccaaatagatggaaatccagagaggtgagtccagtgctttgcacaactgttcaccttgaggcgtttcctgtttccaaagtaatggctgagagactgaccagctgcacagagcttccatcaatctcaaaaggctgaggagacaaaaaaaaaaggaacttcagggccagccaaggaaaagagctctagaaaacaccatgttttcactttgggct

SEQ ID NO: 341862 - DNA, 655 bp, Homo sapiens
cttgatgtatcatagtgggattaagaataaagaattactctagtaactgccaacacagtacacgtttctctatttattttaagttagtttctccttgttgatttaaaggaattattgaaagttgcttacatggagattccttggagctctatcaacatggacaattatcaccagaggtgggaggttgagggtctcccttttgtgctatgtcacatggtccatactgctgtttaaatactttttccaaattactttctgtttgtgataaccgtaagtgtctttatcaaaagagttataaaagtcttttaaagttagggcaggactcctgcaattgtaattgcaaggtcattaatttgcataaccccgtggtttctttcctgttccgatgttccctgaagatgttcggctaaatgttgtaactccaccaaaggagtaacttcctattctagtgtatgattcttcaataaatcacttatctctgtatgcaatctattaacaaaatgggattacaagactaattcatcatctcagccattaaagccagtagtgggtcagccagtagtgggtcagccagtagtgggtcagccagtagtgggtcagccagtagtgggtcagccagtagtgggtcagccagtagtgggtcagccagtagtgg

SEQ ID NO: 341863 - DNA, 664 bp, Homo sapiens
aatatgtatccccatcttagtgaatggacttcaggcttatgcttatagctccactgatagctgacatgctgattgatgacagtttataaaagtatctttctgtagagacttttgtggtaaatatttcctgtgcaactgacctaattttgtttgcagtggaaatttctgaactttgaacatcaaaaactttcatacaatatcttttttcatcacaattttgacaatgttctgaatactagtataatgtattattgaacaggttatagaaagtacatttattattggaaagagtttgtatttcaagtcttgatcagtaggttcagttggtactttaaaatcatatattttgctgtatgattttcttgcattagtaacggtaaattcagttataatgcccaaccacacacacacaaaattatcttttgaggacaaatattaccaatctcctagattaaatgtggaaaatttgttaggaggtgttatgggctgaattgtgttcctactcttctccccagaattcatatattgacatcttaacccttagaagatggagtccttaaagaggtaaataagttaaaggtgagccctaatcaaatatggctggactcctcttaagaagatattaagacatagatacatacagaggtaagaccaggtgaagaca

SEQ ID NO: 341864 - DNA, 484 bp, Homo sapiens
agcatcagattcaccagctgcctaggaccccagtcggttcatcaaaatgcaagtcttaaattgtcactgagattgttaaacagagagacattctttttatgctggattttatgttgagattgttaaacaagagagatattctttttatgctggattttatgttgtgataatagaagctgagaaatgcttggagacaccatatagagataatttgcctacatagggagccacaaaatgcaaacagagataagtgattaaaaagccagaaaggccgagtcctgatgaaaagatttaagcccttggatctagccaggcctgaaatccatcagatcccctctggacatttcaatcatggatccaaagaatttgtgggagtttttttttgttttgttttgttttcattttctttaaagtccagcaattttacttgaacttggtgttggtcatgatgggtcactattcacaggatgcagcctgctctttt

SEQ ID NO: 341865 - DNA, 383 bp, Homo sapiens
acaaagatttatatgttaacaagctgaattcctgcttcatctggaggactgcacagtgtatctgagagaggattttcaggaggccagaaaatcaagctggagggattttcagccaattacaaaatttttggaatgcaattgggaagtacagctgaaaaacttcagcaacgtgggctgtttgattgtacaatcgcacttcttggaatttatcctacagaaatcagtagtcaagttcacaaaaactgacaatagccattacagagaagcagaagaaagggaaataaaaacattcaaacctaccaacaggagattggacaaataaatcatgttataactatacaatgggctattatgtaaccattaaaatgatcatctattctaga

SEQ ID NO: 341866 - DNA, 410 bp, Homo sapiens
tctgtagcaaggttctgtctaaaaataatgtctagttgtctaaaattagagcactctctctcccagagagcaggacagagattaaaattttcactcttcactcctccttatttccaatattcttttgttttttaagacagagttttgctcttgttgcccaggctggagaaactttttaaattgttaggagaatacctacagagcattttgaagagtagggattgaagtcagcccggaaaagcttcccggatcttgaagaaaagtaatagacatgagtgtagggtgtttccaggaaggttgagttgtttgaataaagatctaaaagtagttagataatggtgaaggtattatttgccattcatggagcaatgaggacgtgctatctggattcagataggagggggtaccgg

SEQ ID NO: 341867 - DNA, 690 bp, Homo sapiens
actcacccccatccagtcacccagtcctatgtgcctaccttccaagtagctctcaagtccattttctgctccccatccctatcaccaccacctacaggtcctcactacctctctctcagactaaagaaacaggttcctaattggtttccctgtttcaaatcttttttcctcctttcctgaagtagaagtatttagttataaaaatcacatgttaatcataaaaatattcaaatgatgcataaatgtaggaagtgaaatcatccataattccaccttcaagagaacctctgttaaacaatttctaattttgcctccttcttcctccccctcaaaatctttatactgcctccagaacaatcttccaaaacatcagtgcagtacttaaaaaaccctttactggacaatcaatgacagcttcttgattaagtcaatggtgaggaaaaaagggggagaggcgctggcctacattaaggaagacttcagaacatcatcggcaaatcaaaggtgtgggccttgatttaatcctgatacaaaccaatcaactgtaaaacagattggacaatgaggaaatttgattatggactggatagtaaattatgctaaagaatttttgtagttttcttaggtataataatggcatagttatcatctaagaaagtgaccatattttcctttttttttttttttttt

SEQ ID NO: 341868 - DNA, 110 bp, Homo sapiens
agcagattgccctccccaatgtaggtgagcatcatccaacctgctgagggcctgaataaaacaaaaaggccaaggtgggagagtcacttgaaggctgaagtctctgcctg

SEQ ID NO: 341869 - DNA, 205 bp, Homo sapiens
ctgcctcttcagagcccagcagaaagacagagaaagaagcctccttggggttccattacccacactccaaggtggaaatctttcagatggttagatgatgaaggtagtagaaggcaaggatgattgggagtagaaggaagagtgacaggctagcatgagctgtgcagcagcaagattccatatgagcaaagtgcagaaagtgaga

SEQ ID NO: 341870 - DNA, 428 bp, Homo sapiens
ctccaagttacaggcctctccacccaaacagcccaaggttcaaatccttgctccacagtttcccaaagactctccaaagcttcagtttccccatctgtaaaatggagccaagagcctcttttgcatagcccagtgagatgtcaccgagtatgtatgtcactcagtaagtgcccagcaccagggcaagatacaggattttcaggacccggtgcaaaatgaacacgtggtcctctagttcgaaaactaagaatttcaggccaagcatggcggctcacgcctgtaatcccagcactttgggaggccgaggcaggagagtcacctgaggccaggaggtggaggtagcagtgagccgaacgaaattgaggcacttcactccagcctgggtgacagagcgagactccgtctcaaaaaaaaaaggaaatccctaa

SEQ ID NO: 341871 - DNA, 407 bp, Homo sapiens
ccagagcacaggatccaagctccaagttacaggcctctccacccaaacagcccaaggttcaaatccttgctccacagtttcccaaagactctccaaagcttcagtttccccatctgtaaaatggagccaagagcctcttttgcatagcccagtgagatgtcaccgagtatgtatgtcactcagtaagtgcccagcaccagggcaagatacaggattttcaggacccggtgcaaaatgaacacgtggtcctctagttcgaaaactaagaatttcaggccaagcatggcggctcacgcctgtaatcccagcactttgggaggccgaggcaggagagtcacctgaggccaggagttcaagaccagcctgcgcaatacgacaataccccatctctacaaaaaaaaaaaata

SEQ ID NO: 341872 - DNA, 86 bp, Homo sapiens
ggccatcactcatgacgggtattacagatgcataatggtaacacctgatgggaatttccatcgtggatatcacctccaagtgttag

SEQ ID NO: 341873 - DNA, 450 bp, Homo sapiens
tgggccagtttctgaaagagccactttctgagcatattaaagaaaaatctcttgtaaaaacaaagagggcttagtgttaatgctcctttatgaattgtgttagtaggaactgattgttcaatcatggggcagtgcaaaacgttagctgtgttaactctgagcaaacaggggagatccttcaaggacctggaacactgtttcctagaaaagcttttaatcatgtgtccaaatcactgccacactcttctttaatgataagaattggatttagatttaaggctttagataaatgattctcaaccttcaagatgctatgaaatgacctaattaaggaattattttttcctaggcctatccagagattccagttcagtttgtggtatgaggctgaagtatggatatttttttcaaagctccttaagtatataaattgataaaattactttggaa

SEQ ID NO: 341874 - DNA, 348 bp, Homo sapiens
aagagaaaagaaggtagaacatgatgaagctaggtatgtatacaggatccagatcatggagtcatgtagccaaaaataagtttggattttactctaatgacaatgagaaaactttggaggtttttaagctgggtagtgacatgttccaatttaagagagcagaggaaaaggagatgctaagttcttgtcatgttaacttagattagtcactaagacattcaggaagatatgcttaatagacagtggggattatgagcctgggacaagggagattggcctggactatggtatcaaatttgtgagtgatcacatagatgccaaagaaccatgggtagaatgagaacagag

SEQ ID NO: 341875 - DNA, 300 bp, Homo sapiens
gtaaatttgagtctgctattccttcataattgagactgactgtggagtattctaccccttacatgaaatgattaatggactattcgtacccctagcttttgtaatgattttttaagttaaaaaatcttttaataattaagtttaattttaaacagttaaagattgggaatgaatctttacagccctctcattctatctttacaccaaaataatgaccaatactgtctgttaaattttttaacctatgcttctgtcatctatttaaaaatgtagagtattaaggctagttcttgtgcttta

SEQ ID NO: 341876 - DNA, 399 bp, Homo sapiens
aaaaaaaaaaaaagaccttgcagttttccagttggcaaatgggagaaaattgttaatgaattcccagtttgaagtaatgacttcaaagtcatatcctgtgttttcggtgaagcttgaagaaagagagcagatttgcctttattaatgtttcctttctgaaaaactattttccttcctgggttacagatttatactctatggtcacatctctaatatattagcccaaatgagatttaaaataaaataaaaaatgatgatagatgatttgtacccaaactgccatttagtggttagtaccctgccagcattcaatatttagttaggtcaaatgtgtttattcaactttgtataagtcataatgggaaagttcaaccaatttgtgacagatgaaaaaaagaa

SEQ ID NO: 341877 - DNA, 5451 bp, Homo sapiens
agaaatgtaaaaacagaaggggtccaatttttacacgtttttttctcaagtagcctttctggggatttttattttcttaatgaagtgccaatcagcttttcaaaatgttttctatttctcagcatttccaggaagtgataacgtttagctaaatgagtagaagtggacttccttcaacatattgttaccttgtctagccttaggaagaaaacaagagccacctgaaaataaatacaggctcttttcgagcatctgctgaaatactgttacagcaatttgaagttgatgtggtaggaaaggaaggtgacttttcttgcaaaagtctttctaaacattcacactgtcctaagagatgagctttcttgttttattccggtatattccacaaggtggcacttttagagaaaaacaaatctgatgaagactaaagaggtacttctaaaagagatttcattctaactttatttttctgcgcatatttaactctttcctagcacttgttttttgggatgattaatagtctctataatgttctgtaacttcaatattttacttgttacctaggttctgaacaattgtctgcaaataaattgttcttaaggatggataatacacccattttgatcatttaagtaaagaaagcctagtcattcattcagtcaagaaaaaatttttgaagtacccagttaccttacttttctagattaaaacaggcttagttactaaaaaggcagtcctcatctgtgaacaggatagtttcgttagaagtataaaactcctttagtggccccagttaaaacacacataccctctctgctgctttcaaattccctagcatggtggcctttcaacattgattaaattttaaaatcctaatttaaagatcaggtgagcaaaatgagtagcacatcagtaattcagtagacaaaacttttgtctgaaaaattgctgtattgaaacagagccctaaaataccaaaagaccaggtaattttaacatttgtggaatcacaaatgtaaattcataagaagctctaattaaaaaaaaaaagtctgaagtatatgagcataacaacttaggagtgtgtctacatacttaacttttgaagtttttgggcaactttatatactttttttaaatttacaagtctacttaaagacttcttataccccaaatgattaagttaattttagaggtcacctttctcacagcagtgtcacttgaaatttagtagggaaggatattgcagtatttttcagtttccttagcacagcaccacagaaagcagcttattccttttgagtggcagacactcgacggtgcctgcccaactttcctcctgagtggcaagcagatgagtctcagtaattcatactggaaccaaaatgccacatacactaggggcagtcagaaactggctgagaaatcccccgcctcattcgcccctctgctcccaggaactagagtccagttaaagcccctatgcgaaaggccgaattccaccccagggtttgttataacagtggccagtctgaaccccatttgctcgtgctcaaaacttgattcccacttgaaagccttccgggcgcgctgcctcgttgccccgcccctttggcaggagagaggcagtgggcgaggccgggctggggccccgcctcccactcacctgccggtgcctgaaattatgtgcggccccgcgggctgctttccgaggtcagagtgccctgctgctgtctcagaggcatctgttctgcaaatcttaggaagaaaaatgtccctagtagcaaacgggtgtcttctgtgcataaataagtacaacacaattctccgaaagttcgggtaaaaagagatgcggtagcagctgccctgtgtgaagctgtctaccccgcatctctcaggcgctaagctcagtttttgtttttgtttttgtttttttaaagaaaagatgtataattgcaggaatttttttttatttttttattttccatcattctatatatgtgatggtgaaagatatgcctggaaaagttttgttttgaaaagtttattttctgcttcgtcttcagttggcaaaagctctcaattctttagcttccagtttcttttctctctttttctttgttaggtaattaaaggtatgtaaacaaattatctcatgtagcaggggattttcatgttgagaggaatcttccgtgtgagttgtttggtcacacaaataaccctttctcaattttaggagtttggattgtcaaatgtaggtttttctcaaagggggcatataactacatattgactgccaagaactatgactgtagcactaatcagcacacatagagccacacaattatttaatttctaactctctgtggtccctagaaaaattccgttgatgtgcttaggttaaagttctgaagatacccgttgtacccttacttgaaagtttctaatcttaagttttatgaaatgcaataatatgtatcagctagcaatatttctgtgatcaccaacaactctcagtttgatcttaaagtctgaataataaaacaaatcccagcagtaatacatttcttaaacctcacagtgcatgatatatcttttcattctgatcctgtgtttgcaaaaatatacacatgtatatcatagttcctcactttttattcatttgttttcctattacctgtagtaaatatattagttagtacatggaatttatagcatcagctacccccaggaacagcacctgacaggcgggggattttttttcaagttgttctacatttgcataaattatttctattattattcatgtatgttatttatttctgaatcacactagtcctgtgaaagtacaactgaaggcagaaagtgttaggattttgcatctaatgttcattatcatggtattgatggacctaagaaaataaaaattagactaagcccccaaataagctgcatgcatttgtaacacgattagtagatttgaatatatagatgtagtattttgggtatctaggtgttttatcattatgtaaaggaattaaagtaaaggactttgtagttgtttttattaaatatgcatatagtagagtgcaaaaatatagcaaaaataaaaactaaaggtagaaaagcattttagatatgccttaatttagaaactgtgccaggtggccctcggaatagatgccaggcagagaccagtgcctgggtggtgcctcctcttgtctgccctcatgaagaagcttccctcacgtgatgtagtgccctcgtaggtgtcatgtggagtagtgggaacaggcagtactgttgagaggagagcagtgtgagagtttttctgtagaagcagaactgtcagcttgtgccttgaggcttccagaacgtgtcagatggagaagtccaagtttccatgcttcaggcaacttagctgtgtacagaagcaatccagtgtggtaataaaaagcaaggattgcctgtataatttattataaaataaaagggattttaacaaccaacaattcccaacacctcaaaagcttgttgcattttttggtatttgaggtttttatctgaaggttaaagggcaagtgtttggtatagaagagcagtatgtgttaagaaaagaaaaatattggttcgcgtagagtgcaaattagaactagaaagttttatacgattatcattttgagatgtgttaaagtaggttttcactgtaaaatgtattagtgtttctgcattgccatagggcctggttaaaactttctcttaggtttcaggaagactgtcacatacagtaagcttttttccttctgacttataatagaaaatgttttgaaagtaaaaaaaaaaaaatctaatttggaaatttgacttgttagtttctgtgtttgaaatcatggttctagaaatgtagaaattgtgtatatcagatactcatctaggctgtgtgaaccagcccaagatgaccaacatccccacacctctacatctctgtcccctgtatctcttcctttctaccactaaagtgttccctgctaccatcctggcttgtccacatggtgctctccatcttcctccacatcatggaccacaggtgtgcctgtctaggcctggccaccactcccaacttgacctagccacattcatctagagatggttcctgatgctgggcacagactgtgctcatggcacccattagaaatgcctctagcatctttgtatgcatcttgatttttaaaccaagtcattgtacagagcattcagttttggctgtggtaccaagagaaaaactaatcaagaatataaaccacattccaggctgctgttttctctccatctacaggccacacttttactgtatttcttcatacttgaaattcattctgctattttcatatcagggtacagacttataagggtgcatgttccttaaaggtgcataattattcttattccgtttgcttatattgctacagaatgctctgttttggtgctttgagttctgcagacccaagaagcagtgtggaaattcactgcctgggacacagtcttataagaatgttggcaggtgactttgtatcagatgttgcttctcttttctctgtacacagattgagagttaccacagtggcctgtcgggtccaccctgtgggtgcagcacagctctctgaaagcaagaaccttcctacctattctaacgtttttgccctctaagaaaaatggcctcaggtatggtatagacatagcaagaggggaagggctgtctcactctagcaaccatccctccattacacacagaaagccctcttgaagcaaaagaagaagaaagaaagaaagcttatctctaaggctactgtcttcagaatgctctgagctgaatgctcttgctcctttcccaagaggcagatgaaaatatagccagtttatctatacccttcctatctgaggaggagaatagaaaagtagggtaaatatgtaacgtaaaatatgtcattcaaggaccaccaaaactttaagtaccctatcattaaaaatctggttttaaaagtagctcaagtaagggatgctttgtgacccagggtttctgaagtcagatagccattcttacctgccccttactctgacttattgggaaagggagaactgcagtggtgtttctgttgcagtggcaaaggtaacatgtcagaaaattcagagggttgcataccaataatcctttggaaactggatgtcttactgggtgctagaatgaaaatgtaggtatttattgtcagatgatgaagttcattgtttttttcaaaattggtgttgaaatatcactgtccaatgtgttcacttatgtgaaagctaaattgaatgaggcaaaaagagcaaatagtttgtatatttgtaataccttttgtatttcttacaataaaaatattggtagcaaataaaaataataaaaacaataacttt

SEQ ID NO: 341878 - DNA, 5569 bp, Homo sapiens
agaaatgtaaaaacagaaggggtccaatttttacacgtttttttctcaagtagcctttctggggatttttattttcttaatgaagtgccaatcagcttttcaaaatgttttctatttctcagcatttccaggaagtgataacgtttagctaaatgagtagaagtggacttccttcaacatattgttaccttgtctagccttaggaagaaaacaagagccacctgaaaataaatacaggctcttttcgagcatctgctgaaatactgttacagcaatttgaagttgatgtggtaggaaaggaaggtgacttttcttgcaaaagtctttctaaacattcacactgtcctaagagatgagctttcttgttttattccggtatattccacaaggtggcacttttagagaaaaacaaatctgatgaagactaaagaggtacttctaaaagagatttcattctaactttatttttctgcgcatatttaactctttcctagcacttgttttttgggatgattaatagtctctataatgttctgtaacttcaatattttacttgttacctaggttctgaacaattgtctgcaaataaattgttcttaaggatggataatacacccattttgatcatttaagtaaagaaagcctagtcattcattcagtcaagaaaaaatttttgaagtacccagttaccttacttttctagattaaaacaggcttagttactaaaaaggcagtcctcatctgtgaacaggatagtttcgttagaagtataaaactcctttagtggccccagttaaaacacacataccctctctgctgctttcaaattccctagcatggtggcctttcaacattgattaaattttaaaatcctaatttaaagatcaggtgagcaaaatgagtagcacatcagtaattcagtagacaaaacttttgtctgaaaaattgctgtattgaaacagagccctaaaataccaaaagaccaggtaattttaacatttgtggaatcacaaatgtaaattcataagaagctctaattaaaaaaaaaaagtctgaagtatatgagcataacaacttaggagtgtgtctacatacttaacttttgaagtttttgggcaactttatatactttttttaaatttacaagtctacttaaagacttcttataccccaaatgattaagttaattttagaggtcacctttctcacagcagtgtcacttgaaatttagtagggaaggatattgcagtatttttcagtttccttagcacagcaccacagaaagcagcttattccttttgagtggcagacactcgacggtgcctgcccaactttcctcctgagtggcaagcagatgagtctcagtaattcatactggaaccaaaatgccacatacactaggggcagtcagaaactggctgagaaatcccccgcctcattcgcccctctgctcccaggaactagagtccagttaaagcccctatgcgaaaggccgaattccaccccagggtttgttataacagtggccagtctgaaccccatttgctcgtgctcaaaacttgattcccacttgaaagccttccgggcgcgctgcctcgttgccccgcccctttggcaggagagaggcagtgggcgaggccgggctggggccccgcctcccactcacctgccggtgcctgaaattatgtgcggccccgcgggctgctttccgaggtcagagtgccctgctgctgtctcagaggcatctgttctgcaaatcttaggaagaaaaatgtccctagtagcaaacgggtgtcttctgtgcataaataagtacaacacaattctccgaaagttcgggtaaaaagagatgcggtagcagctgccctgtgtgaagctgtctaccccgcatctctcaggcgctaagctcagtttttgtttttgtttttgtttttttaaagaaaagatgtataattgcaggaatttttttttatttttttattttccatcattctatatatgtgatggtgaaagatatgcctggaaaagttttgttttgaaaagtttattttctgcttcgtcttcagttggcaaaagctctcaattctttagcttccagtttcttttctctctttttctttgttaggtaattaaaggtatgtaaacaaattatctcatgtagcaggggattttcatgttgagaggaatcttccgtgtgagttgtttggtcacacaaataaccctttctcaattttaggagtttggattgtcaaatgtaggtttttctcaaagggggcatataactacatattgactgccaagaactatgactgtagcactaatcagcacacatagagccacacaattatttaatttctaactctctgtggtccctagaaaaattccgttgatgtgcttaggttaaagttctgaagatacccgttgtacccttacttgaaagtttctaatcttaagttttatgaaatgcaataatatgtatcagctagcaatatttctgtgatcaccaacaactctcagtttgatcttaaagtctgaataataaaacaaatcccagcagtaatacatttcttaaacctcacagtgcatgatatatcttttcattctgatcctgtgtttgcaaaaatatacacatgtatatcatagttcctcactttttattcatttgttttcctattacctgtagtaaatatattagttagtacatggaatttatagcatcagctacccccaggaacagcacctgacaggcgggggattttttttcaagttgttctacatttgcataaattatttctattattattcatgtatgttatttatttctgaatcacactagtcctgtgaaagtacaactgaaggcagaaagtgttaggattttgcatctaatgttcattatcatggtattgatggacctaagaaaataaaaattagactaagcccccaaataagctgcatgcatttgtaacacgattagtagatttgaatatatagatgtagtattttgggtatctaggtgttttatcattatgtaaaggaattaaagtaaaggactttgtagttgtttttattaaatatgcatatagtagagtgcaaaaatatagcaaaaataaaaactaaaggtagaaaagcattttagatatgccttaatttagaaactgtgccaggtggccctcggaatagatgccaggcagagaccagtgcctgggtggtgcctcctcttgtctgccctcatgaagaagcttccctcacgtgatgtagtgccctcgtaggtgtcatgtggagtagtgggaacaggcagtactgttgagaggagagcagtgtgagagtttttctgtagaagcagaactgtcagcttgtgccttgaggcttccagaacgtgtcagatggagaagtccaagtttccatgcttcaggcaacttagctgtgtacagaagcaatccagtgtggtaataaaaagcaaggattgcctgtataatttattataaaataaaagggattttaacaaccaacaattcccaacacctcaaaagcttgttgcattttttggtatttgaggtttttatctgaaggttaaagggcaagtgtttggtatagaagagcagtatgtgttaagaaaagaaaaatattggttcgcgtagagtgcaaattagaactagaaagttttatacgattatcattttgagatgtgttaaagtaggttttcactgtaaaatgtattagtgtttctgcattgccatagggcctggttaaaactttctcttaggtttcaggaagactgtcacatacagtaagcttttttccttctgacttataatagaaaatgttttgaaagtaaaaaaaaaaaaatctaatttggaaatttgacttgttagtttctgtgtttgaaatcatggttctagaaatgtagaaattgtgtatatcagatactcatctaggctgtgtgaaccagcccaagatgaccaacatccccacacctctacatctctgtcccctgtatctcttcctttctaccactaaagtgttccctgctaccatcctggcttgtccacatggtgctctccatcttcctccacatcatggaccacaggtgtgcctgtctaggcctggccaccactcccaacttgacctagccacattcatctagagatggttcctgatgctgggcacagactgtgctcatggcacccattagaaatgcctctagcatctttgtatgcatcttgatttttaaaccaagtcattgtacagagcattcagttttggctgtggtaccaagagaaaaactaatcaagaatataaaccacattccaggctgctgttttctctccatctacaggccacacttttactgtatttcttcatacttgaaattcattctgctattttcatatcagggtacagacttataagggtgcatgttccttaaaggtgcataattattcttattccgtttgcttatattgctacagaatgctctgttttggtgctttgagttctgcagacccaagaagcagtgtggaaattcactgcctgggacacagtcttataagaatgttggcaggtgactttgtatcagatgttgcttctcttttctctgtacacagattgagagttaccacagtggcctgtcgggtccaccctgtgggtgcagcacagctctctgaaagcaagaaccttcctacctattctaacgtttttgccctctaagaaaaatggcctcaggtatggtatagacatagcaagaggggaagggctgtctcactctagcaaccatccctccattacacacagaaagccctcttgaagcaaaagaagaagaaagaaagaaagcttatctctaaggctactgtcttcagaatgctctgagctgaatgctcttgctcctttcccaagaggcagatgaaaatatagccagtttatctatacccttcctatctgaggaggagaatagaaaagtagggtaaatatgtaacgtaaaatatgtcattcaaggaccaccaaaactttaagtaccctatcattaaaaatctggttttaaaagtagctcaagtaagggatgctttgtgacccagggtttctgaagtcagatagccattcttacctgccccttactctgacttattgggaaagggagaactgcagtggtgtttctgttgcagtggcaaaggtaacatgtcagaaaattcagagggttgcataccaataatcctttggaaactggatgtcttactgggtgctagaatgaaaatgtaggtatttattgtcagatgatgaagttcattgtttttttcaaaattggtgttgaaatatcactgtccaatgtgttcacttatgtgaaagctaaattgaatgaggcaaaaagagcaaatagtttgtatatttgtaataccttttgtatttcttacaataaaaatattggtagcaaataaaaataataaaaacaataactttaaactgctttctggagatgaattactctcctggctattttcttttttactttaatgtaaaatgagtataactgtagtgagtaaaattcattaaattccaagttttagcaaaaaaaaaa

SEQ ID NO: 341879 - DNA, 5374 bp, Homo sapiens
agaaatgtaaaaacagaaggggtccaatttttacacgtttttttctcaagtagcctttctggggatttttattttcttaatgaagtgccaatcagcttttcaaaatgttttctatttctcagcatttccaggaagtgataacgtttagctaaatgagtagaagtggacttccttcaacatattgttaccttgtctagccttaggaagaaaacaagagccacctgaaaataaatacaggctcttttcgagcatctgctgaaatactgttacagcaatttgaagttgatgtggtaggaaaggaaggtgacttttcttgcaaaagtctttctaaacattcacactgtcctaagagatgagctttcttgttttattccggtatattccacaaggtggcacttttagagaaaaacaaatctgatgaagactaaagaggtacttctaaaagagatttcattctaactttatttttctgcgcatatttaactctttcctagcacttgttttttgggatgattaatagtctctataatgttctgtaacttcaatattttacttgttacctaggttctgaacaattgtctgcaaataaattgttcttaaggatggataatacacccattttgatcatttaagtaaagaaagcctagtcattcattcagtcaagaaaaaatttttgaagtacccagttaccttacttttctagattaaaacaggcttagttactaaaaaggcagtcctcatctgtgaacaggatagtttcgttagaagtataaaactcctttagtggccccagttaaaacacacataccctctctgctgctttcaaattccctagcatggtggcctttcaacattgattaaattttaaaatcctaatttaaagatcaggtgagcaaaatgagtagcacatcagtaattcagtagacaaaacttttgtctgaaaaattgctgtattgaaacagagccctaaaataccaaaagaccaggtaattttaacatttgtggaatcacaaatgtaaattcataagaagctctaattaaaaaaaaaaagtctgaagtatatgagcataacaacttaggagtgtgtctacatacttaacttttgaagtttttgggcaactttatatactttttttaaatttacaagtctacttaaagacttcttataccccaaatgattaagttaattttagaggtcacctttctcacagcagtgtcacttgaaatttagtagggaaggatattgcagtatttttcagtttccttagcacagcaccacagaaagcagcttattccttttgagtggcagacactcgacggtgcctgcccaactttcctcctgagtggcaagcagatgagtctcagtaattcatactggaaccaaaatgccacatacactaggggcagtcagaaactggctgagaaatcccccgcctcattcgcccctctgctcccaggaactagagtccagttaaagcccctatgcgaaaggccgaattccaccccagggtttgttataacagtggccagtctgaaccccatttgctcgtgctcaaaacttgattcccacttgaaagccttccgggcgcgctgcctcgttgccccgcccctttggcaggagagaggcagtgggcgaggccgggctggggccccgcctcccactcacctgccggtgcctgaaattatgtgcggccccgcgggctgctttccgaggtcagagtgccctgctgctgtctcagaggcatctgttctgcaaatcttaggaagaaaaatgtccctagtagcaaacgggtgtcttctgtgcataaataagtacaacacaattctccgaaagttcgggtaaaaagagatgcggtagcagctgccctgtgtgaagctgtctaccccgcatctctcaggcgctaagctcagtttttgtttttgtttttgtttttttaaagaaaagatgtataattgcaggaatttttttttatttttttattttccatcattctatatatgtgatggtgaaagatatgcctggaaaagttttgttttgaaaagtttattttctgcttcgtcttcagttggcaaaagctctcaattctttagcttccagtttcttttctctctttttctttgttaggtaattaaaggtatgtaaacaaattatctcatgtagcaggggattttcatgttgagaggaatcttccgtgtgagttgtttggtcacacaaataaccctttctcaattttaggagtttggattgtcaaatgtaggtttttctcaaagggggcatataactacatattgactgccaagaactatgactgtagcactaatcagcacacatagagccacacaattatttaatttctaactctctgtggtccctagaaaaattccgttgatgtgcttaggttaaagttctgaagatacccgttgtacccttacttgaaagtttctaatcttaagttttatgaaatgcaataatatgtatcagctagcaatatttctgtgatcaccaacaactctcagtttgatcttaaagtctgaataataaaacaaatcccagcagtaatacatttcttaaacctcacagtgcatgatatatcttttcattctgatcctgtgtttgcaaaaatatacacatgtatatcatagttcctcactttttattcatttgttttcctattacctgtagtaaatatattagttagtacatggaatttatagcatcagctacccccaggaacagcacctgacaggcgggggattttttttcaagttgttctacatttgcataaattatttctattattattcatgtatgttatttatttctgaatcacactagtcctgtgaaagtacaactgaaggcagaaagtgttaggattttgcatctaatgttcattatcatggtattgatggacctaagaaaataaaaattagactaagcccccaaataagctgcatgcatttgtaacacgattagtagatttgaatatatagatgtagtattttgggtatctaggtgttttatcattatgtaaaggaattaaagtaaaggactttgtagttgtttttattaaatatgcatatagtagagtgcaaaaatatagcaaaaataaaaactaaaggtagaaaagcattttagatatgccttaatttagaaactgtgccaggtggccctcggaatagatgccaggcagagaccagtgcctgggtggtgcctcctcttgtctgccctcatgaagaagcttccctcacgtgatgtagtgccctcgtaggtgtcatgtggagtagtgggaacaggcagtactgttgagaggagagcagtgtgagagtttttctgtagaagcagaactgtcagcttgtgccttgaggcttccagaacgtgtcagatggagaagtccaagtttccatgcttcaggcaacttagctgtgtacagaagcaatccagtgtggtaataaaaagcaaggattgcctgtataatttattataaaataaaagggattttaacaaccaacaattcccaacacctcaaaagcttgttgcattttttggtatttgaggtttttatctgaaggttaaagggcaagtgtttggtatagaagagcagtatgtgttaagaaaagaaaaatattggttcgcgtagagtgcaaattagaactagaaagttttatacgattatcattttgagatgtgttaaagtaggttttcactgtaaaatgtattagtgtttctgcattgccatagggcctggttaaaactttctcttaggtttcaggaagactgtcacatacagtaagcttttttccttctgacttataatagaaaatgttttgaaagtaaaaaaaaaaaaatctaatttggaaatttgacttgttagtttctgtgtttgaaatcatggttctagaaatgtagaaattgtgtatatcagatactcatctaggctgtgtgaaccagcccaagatgaccaacatccccacatggtgctctccatcttcctccacatcatggaccacaggtgtgcctgtctaggcctggccaccactcccaacttgacctagccacattcatctagagatggttcctgatgctgggcacagactgtgctcatggcacccattagaaatgcctctagcatctttgtatgcatcttgatttttaaaccaagtcattgtacagagcattcagttttggctgtggtaccaagagaaaaactaatcaagaatataaaccacattccaggctgctgttttctctccatctacaggccacacttttactgtatttcttcatacttgaaattcattctgctattttcatatcagggtacagacttataagggtgcatgttccttaaaggtgcataattattcttattccgtttgcttatattgctacagaatgctctgttttggtgctttgagttctgcagacccaagaagcagtgtggaaattcactgcctgggacacagtcttataagaatgttggcaggtgactttgtatcagatgttgcttctcttttctctgtacacagattgagagttaccacagtggcctgtcgggtccaccctgtgggtgcagcacagctctctgaaagcaagaaccttcctacctattctaacgtttttgccctctaagaaaaatggcctcaggtatggtatagacatagcaagaggggaagggctgtctcactctagcaaccatccctccattacacacagaaagccctcttgaagcaaaagaagaagaaagaaagaaagcttatctctaaggctactgtcttcagaatgctctgagctgaatgctcttgctcctttcccaagaggcagatgaaaatatagccagtttatctatacccttcctatctgaggaggagaatagaaaagtagggtaaatatgtaacgtaaaatatgtcattcaaggaccaccaaaactttaagtaccctatcattaaaaatctggttttaaaagtagctcaagtaagggatgctttgtgacccagggtttctgaagtcagatagccattcttacctgccccttactctgacttattgggaaagggagaactgcagtggtgtttctgttgcagtggcaaaggtaacatgtcagaaaattcagagggttgcataccaataatcctttggaaactggatgtcttactgggtgctagaatgaaaatgtaggtatttattgtcagatgatgaagttcattgtttttttcaaaattggtgttgaaatatcactgtccaatgtgttcacttatgtgaaagctaaattgaatgaggcaaaaagagcaaatagtttgtatatttgtaataccttttgtatttcttacaataaaaatattggtagcaaataaaaataataaaaacaataacttt

SEQ ID NO: 341880 - DNA, 5515 bp, Homo sapiens
agaaatgtaaaaacagaaggggtccaatttttacacgtttttttctcaagtagcctttctggggatttttattttcttaatgaagtgccaatcagcttttcaaaatgttttctatttctcagcatttccaggaagtgataacgtttagctaaatgagtagaagtggacttccttcaacatattgttaccttgtctagccttaggaagaaaacaagagccacctgaaaataaatacaggctcttttcgagcatctgctgaaatactgttacagcaatttgaagttgatgtggtaggaaaggaaggtgacttttcttgcaaaagtctttctaaacattcacactgtcctaagagatgagctttcttgttttattccggtatattccacaaggtggcacttttagagaaaaacaaatctgatgaagactaaagaggtacttctaaaagagatttcattctaactttatttttctgcgcatatttaactctttcctagcacttgttttttgggatgattaatagtctctataatgttctgtaacttcaatattttacttgttacctaggttctgaacaattgtctgcaaataaattgttcttaaggatggataatacacccattttgatcatttaagtaaagaaagcctagtcattcattcagtcaagaaaaaatttttgaagtacccagttaccttacttttctagattaaaacaggcttagttactaaaaaggcagtcctcatctgtgaacaggatagtttcgttagaagtataaaactcctttagtggccccagttaaaacacacataccctctctgctgctttcaaattccctagcatggtggcctttcaacattgattaaattttaaaatcctaatttaaagatcaggtgagcaaaatgagtagcacatcagtaattcagtagacaaaacttttgtctgaaaaattgctgtattgaaacagagccctaaaataccaaaagaccaggtaattttaacatttgtggaatcacaaatgtaaattcataagaagctctaattaaaaaaaaaaagtctgaagtatatgagcataacaacttaggagtgtgtctacatacttaacttttgaagtttttgggcaactttatatactttttttaaatttacaagtctacttaaagacttcttataccccaaatgattaagttaattttagaggtcacctttctcacagcagtgtcacttgaaatttagtagggaaggatattgcagtatttttcagtttccttagcacagcaccacagaaagcagcttattccttttgagtggcagacactcgacggtgcctgcccaactttcctcctgagtggcaagcagatgagtctcagtaattcatactggaaccaaaatgccacatacactaggggcagtcagaaactggctgagaaatcccccgcctcattcgcccctctgctcccaggaactagagtccagttaaagcccctatgcgaaaggccgaattccaccccagggtttgttataacagtggccagtctgaaccccatttgctcgtgctcaaaacttgattcccacttgaaagccttccgggcgcgctgcctcgttgccccgcccctttggcaggagagaggcagtgggcgaggccgggctggggccccgcctcccactcacctgccggtgcctgaaattatgtgcggccccgcgggctgctttccgaggtcagagtgccctgctgctgtctcagaggcatctgttctgcaaatcttaggaagaaaaatgtccctagtagcaaacgggtgtcttctgtgcataaataagtacaacacaattctccgaaagttcgggtaaaaagagatgcggtagcagctgccctgtgtgaagctgtctaccccgcatctctcaggcgctaagctcagtttttgtttttgtttttgtttttttaaagaaaagatgtataattgcaggaatttttttttatttttttattttccatcattctatatatgtgatggtgaaagatatgcctggaaaagttttgttttgaaaagtttattttctgcttcgtcttcagttggcaaaagctctcaattctttagcttccagtttcttttctctctttttctttgttaggtaattaaaggtatgtaaacaaattatctcatgtagcaggggattttcatgttgagaggaatcttccgtgtgagttgtttggtcacacaaataaccctttctcaattttaggagtttggattgtcaaatgtaggtttttctcaaagggggcatataactacatattgactgccaagaactatgactgtagcactaatcagcacacatagagccacacaattatttaatttctaactctctgtggtccctagaaaaattccgttgatgtgcttaggttaaagttctgaagatacccgttgtacccttacttgaaagtttctaatcttaagttttatgaaatgcaataatatgtatcagctagcaatatttctgtgatcaccaacaactctcagtttgatcttaaagtctgaataataaaacaaatcccagcagtaatacatttcttaaacctcacagtgcatgatatatcttttcattctgatcctgtgtttgcaaaaatatacacatgtatatcatagttcctcactttttattcatttgttttcctattacctgtagtaaatatattagttagtacatggaatttatagcatcagctacccccaggaacagcacctgacaggcgggggattttttttcaagttgttctacatttgcataaattatttctattattattcatgtatgttatttatttctgaatcacactagtcctgtgaaagtacaactgaaggcagaaagtgttaggattttgcatctaatgttcattatcatggtattgatggacctaagaaaataaaaattagactaagcccccaaataagctgcatgcatttgtaacacgattagtagatttgaatatatagatgtagtattttgggtatctaggtgttttatcattatgtaaaggaattaaagtaaaggactttgtagttgtttttattaaatatgcatatagtagagtgcaaaaatatagcaaaaataaaaactaaaggtagaaaagcattttagatatgccttaatttagaaactgtgccaggtggccctcggaatagatgccaggcagagaccagtgcctgggtggtgcctcctcttgtctgccctcatgaagaagcttccctcacgtgatgtagtgccctcgtaggtgtcatgtggagtagtgggaacaggcagtactgttgagaggagagcagtgtgagagtttttctgtagaagcagaactgtcagcttgtgccttgaggcttccagaacgtgtcagatggagaagtccaagtttccatgcttcaggcaacttagctgtgtacagaagcaatccagtgtggtaataaaaagcaaggattgcctgtataatttattataaaataaaagggattttaacaaccaacaattcccaacacctcaaaagcttgttgcattttttggtatttgaggtttttatctgaaggttaaagggcaagtgtttggtatagaagagcagtatgtgttaagaaaagaaaaatattggttcgcgtagagtgcaaattagaactagaaagttttatacgattatcattttgagatgtgttaaagtaggttttcactgtaaaatgtattagtgtttctgcattgccatagggcctggttaaaactttctcttaggtttcaggaagactgtcacatacagtaagcttttttccttctgacttataatagaaaatgttttgaaagtaaaaaaaaaaaaatctaatttggaaatttgacttgttagtttctgtgtttgaaatcatggttctagaaatgtagaaattgtgtatatcagatactcatctaggctgtgtgaaccagcccaagatgaccaacatccccacacctctacatctctgtcccctgtatctcttcctttctaccactaaagtgttccctgctaccatcctggcttgtccacatggtgctctccatcttcctccacatcatggaccacaggtgtgcctgtctaggcctggccaccactcccaacttgacctagccacattcatctagagatggttcctgatgctgggcacagactgtgctcatggcacccattagaaatgcctctagcatctttgtatgcatcttgatttttaaaccaagtcattgtacagagcattcagttttggctgtggtaccaagagaaaggccacacttttactgtatttcttcatacttgaaattcattctgctattttcatatcagggtacagacttataagggtgcatgttccttaaaggtgcataattattcttattccgtttgcttatattgctacagaatgctctgttttggtgctttgagttctgcagacccaagaagcagtgtggaaattcactgcctgggacacagtcttataagaatgttggcaggtgactttgtatcagatgttgcttctcttttctctgtacacagattgagagttaccacagtggcctgtcgggtccaccctgtgggtgcagcacagctctctgaaagcaagaaccttcctacctattctaacgtttttgccctctaagaaaaatggcctcaggtatggtatagacatagcaagaggggaagggctgtctcactctagcaaccatccctccattacacacagaaagccctcttgaagcaaaagaagaagaaagaaagaaagcttatctctaaggctactgtcttcagaatgctctgagctgaatgctcttgctcctttcccaagaggcagatgaaaatatagccagtttatctatacccttcctatctgaggaggagaatagaaaagtagggtaaatatgtaacgtaaaatatgtcattcaaggaccaccaaaactttaagtaccctatcattaaaaatctggttttaaaagtagctcaagtaagggatgctttgtgacccagggtttctgaagtcagatagccattcttacctgccccttactctgacttattgggaaagggagaactgcagtggtgtttctgttgcagtggcaaaggtaacatgtcagaaaattcagagggttgcataccaataatcctttggaaactggatgtcttactgggtgctagaatgaaaatgtaggtatttattgtcagatgatgaagttcattgtttttttcaaaattggtgttgaaatatcactgtccaatgtgttcacttatgtgaaagctaaattgaatgaggcaaaaagagcaaatagtttgtatatttgtaataccttttgtatttcttacaataaaaatattggtagcaaataaaaataataaaaacaataactttaaactgctttctggagatgaattactctcctggctattttcttttttactttaatgtaaaatgagtataactgtagtgagtaaaattcattaaattccaagttttagcaaaaaaaaaa

SEQ ID NO: 341881 - DNA, 5341 bp, Homo sapiens
agaaatgtaaaaacagaaggggtccaatttttacacgtttttttctcaagtagcctttctggggatttttattttcttaatgaagtgccaatcagcttttcaaaatgttttctatttctcagcatttccaggaagtgataacgtttagctaaatgagtagaagtggacttccttcaacatattgttaccttgtctagccttaggaagaaaacaagagccacctgaaaataaatacaggctcttttcgagcatctgctgaaatactgttacagcaatttgaagttgatgtggtaggaaaggaaggtgacttttcttgcaaaagtctttctaaacattcacactgtcctaagagatgagctttcttgttttattccggtatattccacaaggtggcacttttagagaaaaacaaatctgatgaagactaaagaggtacttctaaaagagatttcattctaactttatttttctgcgcatatttaactctttcctagcacttgttttttgggatgattaatagtctctataatgttctgtaacttcaatattttacttgttacctaggttctgaacaattgtctgcaaataaattgttcttaaggatggataatacacccattttgatcatttaagtaaagaaagcctagtcattcattcagtcaagaaaaaatttttgaagtacccagttaccttacttttctagattaaaacaggcttagttactaaaaaggcagtcctcatctgtgaacaggatagtttcgttagaagtataaaactcctttagtggccccagttaaaacacacataccctctctgctgctttcaaattccctagcatggtggcctttcaacattgattaaattttaaaatcctaatttaaagatcaggtgagcaaaatgagtagcacatcagtaattcagtagacaaaacttttgtctgaaaaattgctgtattgaaacagagccctaaaataccaaaagaccaggtaattttaacatttgtggaatcacaaatgtaaattcataagaagctctaattaaaaaaaaaaagtctgaagtatatgagcataacaacttaggagtgtgtctacatacttaacttttgaagtttttgggcaactttatatactttttttaaatttacaagtctacttaaagacttcttataccccaaatgattaagttaattttagaggtcacctttctcacagcagtgtcacttgaaatttagtagggaaggatattgcagtatttttcagtttccttagcacagcaccacagaaagcagcttattccttttgagtggcagacactcgacggtgcctgcccaactttcctcctgagtggcaagcagatgagtctcagtaattcatactggaaccaaaatgccacatacactaggggcagtcagaaactggctgagaaatcccccgcctcattcgcccctctgctcccaggaactagagtccagttaaagcccctatgcgaaaggccgaattccaccccagggtttgttataacagtggccagtctgaaccccatttgctcgtgctcaaaacttgattcccacttgaaagccttccgggcgcgctgcctcgttgccccgcccctttggcaggagagaggcagtgggcgaggccgggctggggccccgcctcccactcacctgccggtgcctgaaattatgtgcggccccgcgggctgctttccgaggtcagagtgccctgctgctgtctcagaggcatctgttctgcaaatcttaggaagaaaaatgtccctagtagcaaacgggtgtcttctgtgcataaataagtacaacacaattctccgaaagttcgggtaaaaagagatgcggtagcagctgccctgtgtgaagctgtctaccccgcatctctcaggcgctaagctcagtttttgtttttgtttttgtttttttaaagaaaagatgtataattgcaggaatttttttttatttttttattttccatcattctatatatgtgatggtgaaagatatgcctggaaaagttttgttttgaaaagtttattttctgcttcgtcttcagttggcaaaagctctcaattctttagcttccagtttcttttctctctttttctttgttaggtaattaaaggtatgtaaacaaattatctcatgtagcaggggattttcatgttgagaggaatcttccgtgtgagttgtttggtcacacaaataaccctttctcaattttaggagtttggattgtcaaatgtaggtttttctcaaagggggcatataactacatattgactgccaagaactatgactgtagcactaatcagcacacatagagccacacaattatttaatttctaactctctgtggtccctagaaaaattccgttgatgtgcttaggttaaagttctgaagatacccgttgtacccttacttgaaagtttctaatcttaagttttatgaaatgcaataatatgtatcagctagcaatatttctgtgatcaccaacaactctcagtttgatcttaaagtctgaataataaaacaaatcccagcagtaatacatttcttaaacctcacagtgcatgatatatcttttcattctgatcctgtgtttgcaaaaatatacacatgtatatcatagttcctcactttttattcatttgttttcctattacctgtagtaaatatattagttagtacatggaatttatagcatcagctacccccaggaacagcacctgacaggcgggggattttttttcaagttgttctacatttgcataaattatttctattattattcatgtatgttatttatttctgaatcacactagtcctgtgaaagtacaactgaaggcagaaagtgttaggattttgcatctaatgttcattatcatggtattgatggacctaagaaaataaaaattagactaagcccccaaataagctgcatgcatttgtaacacgattagtagatttgaatatatagatgtagtattttgggtatctaggtgttttatcattatgtaaaggaattaaagtaaaggactttgtagttgtttttattaaatatgcatatagtagagtgcaaaaatatagcaaaaataaaaactaaaggtagaaaagcattttagatatgccttaatttagaaactgtgccaggtggccctcggaatagatgccaggcagagaccagtgcctgggtggtgcctcctcttgtctgccctcatgaagaagcttccctcacgtgatgtagtgccctcgtaggtgtcatgtggagtagtgggaacaggcagtactgttgagaggagagcagtgtgagagtttttctgtagaagcagaactgtcagcttgtgccttgaggcttccagaacgtgtcagatggagaagtccaagtttccatgcttcaggcaacttagctgtgtacagaagcaatccagtgtggtaataaaaagcaaggattgcctgtataatttattataaaataaaagggattttaacaaccaacaattcccaacacctcaaaagcttgttgcattttttggtatttgaggtttttatctgaaggttaaagggcaagtgtttggtatagaagagcagtatgtgttaagaaaagaaaaatattggttcgcgtagagtgcaaattagaactagaaagttttatacgattatcattttgagatgtgttaaagtaggttttcactgtaaaatgtattagtgtttctgcattgccatagggcctggttaaaactttctcttaggtttcaggaagactgtcacatacagtaagcttttttccttctgacttataatagaaaatgttttgaaagtaaaaaaaaaaaaatctaatttggaaatttgacttgttagtttctgtgtttgaaatcatggttctagaaatgtagaaattgtgtatatcagatactcatctaggctgtgtgaaccagcccaagatgaccaacatccccacacctctacatctctgtcccctgtatctcttcctttctaccactaaagtgttccctgctaccatcctggcttgtccacatggtgctctccatcttcctccacatcatggaccacaggtgtgcctgtctaggcctggccaccactcccaacttgacctagccacattcatctagagatggttcctgatgctgggcacagactgtgctcatggcacccattagaaatgcctctagcatctttgtatgcatcttgatttttaaaccaagtcattgtacagagcattcagttttggctgtggtaccaagagaaaaactaatcaagaatataaaccacattccaggctgctgttttctctccatctacaggccacacttttactgtatttcttcatacttgaaattcattctgctattttcatatcagggtacagacttataagggtgcatgttccttaaaggtgcataattattcttattccgtttgcttatattgctacagaatgctctgttttggtgctttgagttctgcagacccaagaagcagtgtggaaattcactgcctgggacacagtcttataagaatgttggcaggtgactttgtatcagatgttgcttctcttttctctgtacacagattgagagttaccacagtggcctgtcgggtccaccctgtgggtgcagcacagctctctgaaagcaagaaccttcctacctattctaacgtttttgccctctaagaaaaatggcctcaggtatggtatagacatagcaagaggggaagggctgtctcactctagcaaccatccctccattacacacagaaagccctcttgaagcaaaagaagaagaaagaaagaaagcttatctctaaggctactgtcttcagaatgctctgagctgaatgctcttgctcctttcccaagaggcagatgaaaatatagccagtttatctatacccttcctatctgaggaggagaatagaaaagtagggtaaatatgtaacgtaaaatatgtcattcaaggaccaccaaaactttaagtaccctatcattaaaaatctggttttaaaagtagctcaagtaagggatgctttgtgacccagggtttctgaagtcagatagccattcttacctgccccttactctgacttattgggaaagggagaactgcagtggtgtttctgttgcagtggcaaaggtaacatgtcagaaaattcagagggttgcataccaataatcctttggaaactggatgtcttactgggtgctagaatgaaaatgtaggtatttattgtcagatgatgaccctctttatccgtttccccattgatgcctgttatctcgctgtccactgtctgcccgtatatccggc

SEQ ID NO: 341882 - DNA, 3834 bp, Homo sapiens
agaaatgtaaaaacagaaggggtccaatttttacacgtttttttctcaagtagcctttctggggatttttattttcttaatgaagtgccaatcagcttttcaaaatgttttctatttctcagcatttccaggaagtgataacgtttagctaaatgagtagaagtggacttccttcaacatattgttaccttgtctagccttaggaagaaaacaagagccacctgaaaataaatacaggctcttttcgagcatctgctgaaatactgttacagcaatttgaagttgatgtggtaggaaaggaaggtgacttttcttgcaaaagtctttctaaacattcacactgtcctaagagatgagctttcttgttttattccggtatattccacaaggtggcacttttagagaaaaacaaatctgatgaagactaaagaggtacttctaaaagagatttcattctaactttatttttctgcgcatatttaactctttcctagcacttgttttttgggatgattaatagtctctataatgttctgtaacttcaatattttacttgttacctaggttctgaacaattgtctgcaaataaattgttcttaaggatggataatacacccattttgatcatttaagtaaagaaagcctagtcattcattcagtcaagaaaaaatttttgaagtacccagttaccttacttttctagattaaaacaggcttagttactaaaaaggcagtcctcatctgtgaacaggatagtttcgttagaagtataaaactcctttagtggccccagttaaaacacacataccctctctgctgctttcaaattccctagcatggtggcctttcaacattgattaaattttaaaatcctaatttaaagatcaggtgagcaaaatgagtagcacatcagtaattcagtagacaaaacttttgtctgaaaaattgctgtattgaaacagagccctaaaataccaaaagaccaggtaattttaacatttgtggaatcacaaatgtaaattcataagaagctctaattaaaaaaaaaaagtctgaagtatatgagcataacaacttaggagtgtgtctacatacttaacttttgaagtttttgggcaactttatatactttttttaaatttacaagtctacttaaagacttcttataccccaaatgattaagttaattttagaggtcacctttctcacagcagtgtcacttgaaatttagtagggaaggatattgcagtatttttcagtttccttagcacagcaccacagaaagcagcttattccttttgagtggcagacactcgacggtgcctgcccaactttcctcctgagtggcaagcagatgagtctcagtaattcatactggaaccaaaatgccacatacactaggggcagtcagaaactggctgagaaatcccccgcctcattcgcccctctgctcccaggaactagagtccagttaaagcccctatgcgaaaggccgaattccaccccagggtttgttataacagtggccagtctgaaccccatttgctcgtgctcaaaacttgattcccacttgaaagccttccgggcgcgctgcctcgttgccccgcccctttggcaggagagaggcagtgggcgaggccgggctggggccccgcctcccactcacctgccggtgcctgaaattatgtgcggccccgcgggctgctttccgaggtcagagtgccctgctgctgtctcagaggcatctgttctgcaaatcttaggaagaaaaatgtccctagtagcaaacgggtgtcttctgtgcataaataagtacaacacaattctccgaaagttcgggtaaaaagagatgcggtagcagctgccctgtgtgaagctgtctaccccgcatctctcaggcgctaagctcagtttttgtttttgtttttgtttttttaaagaaaagatgtataattgcaggaatttttttttatttttttattttccatcattctatatatgtgatggtgaaagatatgcctggaaaagttttgttttgaaaagtttattttctgcttcgtcttcagttggcaaaagctctcaattctttagcttccagtttcttttctctctttttctttgttaggtaattaaaggtatgtaaacaaattatctcatgtagcaggggattttcatgttgagaggaatcttccgtgtgagttgtttggtcacacaaataaccctttctcaattttaggagtttggattgtcaaatgtaggtttttctcaaagggggcatataactacatattgactgccaagaactatgactgtagcactaatcagcacacatagagccacacaattatttaatttctaactctctgtggtccctagaaaaattccgttgatgtgcttaggttaaagttctgaagatacccgttgtacccttacttgaaagtttctaatcttaagttttatgaaatgcaataatatgtatcagctagcaatatttctgtgatcaccaacaactctcagtttgatcttaaagtctgaataataaaacaaatcccagcagtaatacatttcttaaacctcacagtgcatgatatatcttttcattctgatcctgtgtttgcaaaaatatacacatgtatatcatagttcctcactttttattcatttgttttcctattacctgtagtaaatatattagttagtacatggaatttatagcatcagctacccccaggaacagcacctgacaggcgggggattttttttcaagttgttctacatttgcataaattatttctattattattcatgtatgttatttatttctgaatcacactagtcctgtgaaagtacaactgaaggcagaaagtgttaggattttgcatctaatgttcattatcatggtattgatggacctaagaaaataaaaattagactaagcccccaaataagctgcatgcatttgtaacacgattagtagatttgaatatatagatgtagtattttgggtatctaggtgttttatcattatgtaaaggaattaaagtaaaggactttgtagttgtttttattaaatatgcatatagtagagtgcaaaaatatagcaaaaataaaaactaaaggtagaaaagcattttagatatgccttaatttagaaactgtgccaggtggccctcggaatagatgccaggcagagaccagtgcctgggtggtgcctcctcttgtctgccctcatgaagaagcttccctcacgtgatgtagtgccctcgtaggtgtcatgtggagtagtgggaacaggcagtactgttgagaggagagcagtgtgagagtttttctgtagaagcagaactgtcagcttgtgccttgaggcttccagaacgtgtcagatggagaagtccaagtttccatgcttcaggcaacttagctgtgtacagaagcaatccagtgtggtaataaaaagcaaggattgcctgtataatttattataaaataaaagggattttaacaaccaacaattcccaacacctcaaaagcttgttgcattttttggtatttgaggtttttatctgaaggttaaagggcaagtgtttggtatagaagagcagtatgtgttaagaaaagaaaaatattggttcgcgtagagtgcaaattagaactagaaagttttatacgattatcattttgagatgtgttaaagtaggttttcactgtaaaatgtattagtgtttctgcattgccatagggcctggttaaaactttctcttaggtttcaggaagactgtcacatacagtaagcttttttccttctgacttataatagaaaatgttttgaaagta

SEQ ID NO: 341883 - DNA, 3797 bp, Homo sapiens
agaaatgtaaaaacagaaggggtccaatttttacacgtttttttctcaagtagcctttctggggatttttattttcttaatgaagtgccaatcagcttttcaaaatgttttctatttctcagcatttccaggaagtgataacgtttagctaaatgagtagaagtggacttccttcaacatattgttaccttgtctagccttaggaagaaaacaagagccacctgaaaataaatacaggctcttttcgagcatctgctgaaatactgttacagcaatttgaagttgatgtggtaggaaaggaaggtgacttttcttgcaaaagtctttctaaacattcacactgtcctaagagatgagctttcttgttttattccggtatattccacaaggtggcacttttagagaaaaacaaatctgatgaagactaaagaggtacttctaaaagagatttcattctaactttatttttctgcgcatatttaactctttcctagcacttgttttttgggatgattaatagtctctataatgttctgtaacttcaatattttacttgttacctaggttctgaacaattgtctgcaaataaattgttcttaaggatggataatacacccattttgatcatttaagtaaagaaagcctagtcattcattcagtcaagaaaaaatttttgaagtacccagttaccttacttttctagattaaaacaggcttagttactaaaaaggcagtcctcatctgtgaacaggatagtttcgttagaagtataaaactcctttagtggccccagttaaaacacacataccctctctgctgctttcaaattccctagcatggtggcctttcaacattgattaaattttaaaatcctaatttaaagatcaggtgagcaaaatgagtagcacatcagtaattcagtagacaaaacttttgtctgaaaaattgctgtattgaaacagagccctaaaataccaaaagaccaggtaattttaacatttgtggaatcacaaatgtaaattcataagaagctctaattaaaaaaaaaaagtctgaagtatatgagcataacaacttaggagtgtgtctacatacttaacttttgaagtttttgggcaactttatatactttttttaaatttacaagtctacttaaagacttcttataccccaaatgattaagttaattttagaggtcacctttctcacagcagtgtcacttgaaatttagtagggaaggatattgcagtatttttcagtttccttagcacagcaccacagaaagcagcttattccttttgagtggcagacactcgacggtgcctgcccaactttcctcctgagtggcaagcagatgagtctcagtaattcatactggaaccaaaatgccacatacactaggggcagtcagaaactggctgagaaatcccccgcctcattcgcccctctgctcccaggaactagagtccagttaaagcccctatgcgaaaggccgaattccaccccagggtttgttataacagtggccagtctgaaccccatttgctcgtgctcaaaacttgattcccacttgaaagccttccgggcgcgctgcctcgttgccccgcccctttggcaggagagaggcagtgggcgaggccgggctggggccccgcctcccactcacctgccggtgcctgaaattatgtgcggccccgcgggctgctttccgaggtcagagtgccctgctgctgtctcagaggcatctgttctgcaaatcttaggaagaaaaatgtccctagtagcaaacgggtgtcttctgtgcataaataagtacaacacaattctccgaaagttcgggtaaaaagagatgcggtagcagctgccctgtgtgaagctgtctaccccgcatctctcaggcgctaagctcagtttttgtttttgtttttgtttttttaaagaaaagatgtataattgcaggaatttttttttatttttttattttccatcattctatatatgtgatggtgaaagatatgcctggaaaagttttgttttgaaaagtttattttctgcttcgtcttcagttggcaaaagctctcaattctttagcttccagtttcttttctctctttttctttgttaggtaattaaaggtatgtaaacaaattatctcatgtagcaggggattttcatgttgagaggaatcttccgtgtgagttgtttggtcacacaaataaccctttctcaattttaggagtttggattgtcaaatgtaggtttttctcaaagggggcatataactacatattgactgccaagaactatgactgtagcactaatcagcacacatagagccacacaattatttaatttctaactctctgtggtccctagaaaaattccgttgatgtgcttaggttaaagttctgaagatacccgttgtacccttacttgaaagtttctaatcttaagttttatgaaatgcaataatatgtatcagctagcaatatttctgtgatcaccaacaactctcagtttgatcttaaagtctgaataataaaacaaatcccagcagtaatacatttcttaaacctcacagtgcatgatatatcttttcattctgatcctgtgtttgcaaaaatatacacatgtatatcatagttcctcactttttattcatttgttttcctattacctgtagtaaatatattagttagtacatggaatttatagcatcagctacccccaggaacagcacctgacaggcgggggattttttttcaagttgttctacatttgcataaattatttctattattattcatgtatgttatttatttctgaatcacactagtcctgtgaaagtacaactgaaggcagaaagtgttaggattttgcatctaatgttcattatcatggtattgatggacctaagaaaataaaaattagactaagcccccaaataagctgcatgcatttgtaacacgattagtagatttgaatatatagatgtagtattttgggtatctaggtgttttatcattatgtaaaggaattaaagtaaaggactttgtagttgtttttattaaatatgcatatagtagagtgcaaaaatatagcaaaaataaaaactaaaggtagaaaagcattttagatatgccttaatttagaaactgtgccaggtggccctcggaatagatgccaggcagagaccagtgcctgggtggtgcctcctcttgtctgccctcatgaagaagcttccctcacgtgatgtagtgccctcgtaggtgtcatgtggagtagtgggaacaggcagtactgttgagaggagagcagtgtgagagtttttctgtagaagcagaactgtcagcttgtgccttgaggcttccagaacgtgtcagatggagaagtccaagtttccatgcttcaggcaacttagctgtgtacagaagcaatccagtgtggtaataaaaagcaaggattgcctgtataatttattataaaataaaagggattttaacaaccaacaattcccaacacctcaaaagcttgttgcattttttggtatttgaggtttttatctgaaggttaaagggcaagtgtttggtatagaagagcagtatgtgttaagaaaagaaaaatattggttcgcgtagagtgcaaattagaactagaaagttttatacgattatcattttgagatgtgttaaagtaggttttcactgtaaaatgtattagtgtttctgcattgccatagggccagggtattacaatctcagtagacttcaagaatatgcgcgggttactctaggaat

SEQ ID NO: 341884 - DNA, 3482 bp, Homo sapiens
agaaatgtaaaaacagaaggggtccaatttttacacgtttttttctcaagtagcctttctggggatttttattttcttaatgaagtgccaatcagcttttcaaaatgttttctatttctcagcatttccaggaagtgataacgtttagctaaatgagtagaagtggacttccttcaacatattgttaccttgtctagccttaggaagaaaacaagagccacctgaaaataaatacaggctcttttcgagcatctgctgaaatactgttacagcaatttgaagttgatgtggtaggaaaggaaggtgacttttcttgcaaaagtctttctaaacattcacactgtcctaagagatgagctttcttgttttattccggtatattccacaaggtggcacttttagagaaaaacaaatctgatgaagactaaagaggtacttctaaaagagatttcattctaactttatttttctgcgcatatttaactctttcctagcacttgttttttgggatgattaatagtctctataatgttctgtaacttcaatattttacttgttacctaggttctgaacaattgtctgcaaataaattgttcttaaggatggataatacacccattttgatcatttaagtaaagaaagcctagtcattcattcagtcaagaaaaaatttttgaagtacccagttaccttacttttctagattaaaacaggcttagttactaaaaaggcagtcctcatctgtgaacaggatagtttcgttagaagtataaaactcctttagtggccccagttaaaacacacataccctctctgctgctttcaaattccctagcatggtggcctttcaacattgattaaattttaaaatcctaatttaaagatcaggtgagcaaaatgagtagcacatcagtaattcagtagacaaaacttttgtctgaaaaattgctgtattgaaacagagccctaaaataccaaaagaccaggtaattttaacatttgtggaatcacaaatgtaaattcataagaagctctaattaaaaaaaaaaagtctgaagtatatgagcataacaacttaggagtgtgtctacatacttaacttttgaagtttttgggcaactttatatactttttttaaatttacaagtctacttaaagacttcttataccccaaatgattaagttaattttagaggtcacctttctcacagcagtgtcacttgaaatttagtagggaaggatattgcagtatttttcagtttccttagcacagcaccacagaaagcagcttattccttttgagtggcagacactcgacggtgcctgcccaactttcctcctgagtggcaagcagatgagtctcagtaattcatactggaaccaaaatgccacatacactaggggcagtcagaaactggctgagaaatcccccgcctcattcgcccctctgctcccaggaactagagtccagttaaagcccctatgcgaaaggccgaattccaccccagggtttgttataacagtggccagtctgaaccccatttgctcgtgctcaaaacttgattcccacttgaaagccttccgggcgcgctgcctcgttgccccgcccctttggcaggagagaggcagtgggcgaggccgggctggggccccgcctcccactcacctgccggtgcctgaaattatgtgcggccccgcgggctgctttccgaggtcagagtgccctgctgctgtctcagaggcatctgttctgcaaatcttaggaagaaaaatgtccctagtagcaaacgggtgtcttctgtgcataaataagtacaacacaattctccgaaagttcgggtaaaaagagatgcggtagcagctgccctgtgtgaagctgtctaccccgcatctctcaggcgctaagctcagtttttgtttttgtttttgtttttttaaagaaaagatgtataattgcaggaatttttttttatttttttattttccatcattctatatatgtgatggtgaaagatatgcctggaaaagttttgttttgaaaagtttattttctgcttcgtcttcagttggcaaaagctctcaattctttagcttccagtttcttttctctctttttctttgttaggtaattaaaggtatgtaaacaaattatctcatgtagcaggggattttcatgttgagaggaatcttccgtgtgagttgtttggtcacacaaataaccctttctcaattttaggagtttggattgtcaaatgtaggtttttctcaaagggggcatataactacatattgactgccaagaactatgactgtagcactaatcagcacacatagagccacacaattatttaatttctaactctctgtggtccctagaaaaattccgttgatgtgcttaggttaaagttctgaagatacccgttgtacccttacttgaaagtttctaatcttaagttttatgaaatgcaataatatgtatcagctagcaatatttctgtgatcaccaacaactctcagtttgatcttaaagtctgaataataaaacaaatcccagcagtaatacatttcttaaacctcacagtgcatgatatatcttttcattctgatcctgtgtttgcaaaaatatacacatgtatatcatagttcctcactttttattcatttgttttcctattacctgtagtaaatatattagttagtacatggaatttatagcatcagctacccccaggaacagcacctgacaggcgggggattttttttcaagttgttctacatttgcataaattatttctattattattcatgtatgttatttatttctgaatcacactagtcctgtgaaagtacaactgaaggcagaaagtgttaggattttgcatctaatgttcattatcatggtattgatggacctaagaaaataaaaattagactaagcccccaaataagctgcatgcatttgtaacacgattagtagatttgaatatatagatgtagtattttgggtatctaggtgttttatcattatgtaaaggaattaaagtaaaggactttgtagttgtttttattaaatatgcatatagtagagtgcaaaaatatagcaaaaataaaaactaaaggtagaaaagcattttagatatgccttaatttagaaactgtgccaggtggccctcggaatagatgccaggcagagaccagtgcctgggtggtgcctcctcttgtctgccctcatgaagaagcttccctcacgtgatgtagtgccctcgtaggtgtcatgtggagtagtgggaacaggcagtactgttgagaggagagcagtgtgagagtttttctgtagaagcagaactgtcagcttgtgccttgaggcttccagaacgtgtcagatggagaagtccaagtttccatgcttcaggcaacttagctgtgtacagaagcaatccagtgtggtaataaaaagcaaggattgcctgtataatttatta

SEQ ID NO: 341885 - DNA, 626 bp, Homo sapiens
tgtcagcttctacagaaaaactctcacactgctctcctctcaacagtactgcctgttcccactactccacatgacacctacgagggcactacatcacgtgagggaagcagtgtgagagtttttctgtagaagcagaactgtcagcttgtgccttgaggcttccagaacgtgtcagatggagaagtccaagtttccatgcttcaggcaacttagctgtgtacagaagcaatccagtgtggtaataaaaagcaaggattgcctgtataatttattataaaataaaagggattttaacaaccaacaattcccaacacctcaaaagcttgttgcattttttggtatttgaggtttttatctgaaggttaaagggcaagtgtttggtatagaagagcagtatgtgttaagaaaagaaaaatattggttcgcgtagagtgcaaattagaactagaaagttttatacgattatcattttgagatgtgttaaagtaggttttcactgtaaaatgtattagtgtttctgcattgccatagggcctggttaaaactttctcttaggtttcaggaagactgtcacatacagtaagcttttttccttctgacttataatagaaaatgttttgaaagta

SEQ ID NO: 341886 - DNA, 460 bp, Homo sapiens
gtgactgtatcctgattgggaagtcatcccccttcagttcatttttttcgtctataaagaacttcagtgccagcgaattaaaagtccattagactatggtttgtagggatctgaacttgccattagatgtcagtgttaacttttagagtcttggtaatagggtggtcagtactgagggaggtgctgtaggatgtaataagcaggatggagtagtggagaaagagctagattagccatccagagacttgccactgactcctgtgtgatcttgagcagttcactccattgttattctgacactgactcctgtatgatctttggcagttcatgccactgttctgtcactgattagctatgtgatcttggacagttcactctactcttctgacactgactagctgtgtgatcttgggcagttcaccccactgttctcctgccactgactcctgtgtgatattgg

SEQ ID NO: 341887 - DNA, 417 bp, Homo sapiens
agaatccatgtcttgggaacctgagctcaagtgggagggaggcgtttcgcgcagagcggcagccagttccaggctctgcaattgccctgtctgtggggagagcccaccatggggcgtcctctggcctcatcagcctgtccacgcctttcctctacttctgcctgccccgctcctgttctgagaacgtgctccacgtgggccgtttcataccattcacttcctcttccttcatctgagcaagctctgtcccctgactcggacccttcgtaagaacatcgtggaggtgttttcagcctccacccaaggaaatggtgtgttctccagacagggagggcttcattcctttagatttgttcgttcatgaaaatgcaggctgctgtgtggacgaggcgttactctaggctcccaagtctgagg

SEQ ID NO: 341888 - DNA, 1821 bp, Homo sapiens
  misc_feature (1295)..(1295): n is a, c, g, or t
ctcccgcctgccttcctttcggcgaggctttcctctgcgcgcttactgtgcgcgcatgccgggctcgctgcacgcagggggcgctctaggggccccgcccgggcagctgggaccctgcctgcccaaccctccggcccattttccttgaggccgccgcccggggtgggaccaggctgtgtgcttgctaactgtgcttcaggaatccgctctgggatgccttcctgtctggcaaaaggggttacccccagttctacccagtccctgtcctcggtcacatgctgccgccgcctcttcccccgcggtgccgggagcccgcgttttgtttgtcagcagttaggcggtgagtatttatagacgccacggcagtcctgcggtgcgcaaggtttcaattactgcgatgcgccccacaagacgaaaggttcacgcgctgcgtctgagctgcacgtctgccccggagacccgcgtggaaaaagctctgggctggaatctccgggcttccctgcttgggcagaattctggacctgttgcccagacgacacgtgcacattcagatgacccatgctaaggaccaaagggatgccaccggcccaatgtactgccttcatcccccaccatcctcaagggacccttgctgatcaagcccgggagactaccctttttgacctctctttggtgatcctgaccaccgtagaaatttgcagtcatgacatttcattgccctacatactgcaaaatgtcaaagtgctgagctgtggtaaattgctctggggtggaaggcgctgttactgacaacacgaagcagctagcgggtcaggaggggaaatggagcttgcagaaactaatttagccacatttaaaatttagcccctggtaaggttcccagtatgactgacgaaggtgcagggctcctgtctgtggaacctggctggttagtcttctctggttgcagccctagaatcaggatcaagggtgctgtttagagcggtttctgtagcatgtagcctttcagataagggaagtgatgcttggtcaatccacaaagttgtcttcagtttttccaactgcaaccattgttctttgagtatgttactgatgcttctaacaactggaaccactaatatgtaaaagaagaaaggcactagaaataagaaagtctaactagcttatttctcaaaggcttagtttagactactttgtttctcaagggtgggacctcatttctttcaggtccagagggccatggatatatatttatttctgtgggtgaaatttcaataatgttctgtcttagaacnttacaaatatgtgccacttgttttaaaaaggggaaaggtgcaaatgcctcttgaggtcttaatgatgtcttaaactttgcactgagagactttgataatattatatactcctcatgcaaacaatgatataggtactattatatccctatcatatagatgagcccactgaggcttggagaatttaagtaatttgtctaaagccatacacacagggatggagctgagaatggattacagatttgttactccagactcatagtctggacatgtctttcccttcaattctccattgttgattagctcacgttatagttgattagatggatggctttttatttattttcaaaatttcacagaatgttacaaattggctcagttattggggaaaaaagccctaatcttgtctttagaaaactgttatattggttatctgaaaatctcttgctgatagtccagacctaaatcataatcctcactttgctccttgacttaatgtatcttcagcattaaagccatttatctgtag

SEQ ID NO: 341889 - DNA, 2190 bp, Homo sapiens
  misc_feature (1242)..(1242): n is a, c, g, or t
ctcccgcctgccttcctttcggcgaggctttcctctgcgcgcttactgtgcgcgcatgccgggctcgctgcacgcagggggcgctctaggggccccgcccgggcagctgggaccctgcctgcccaaccctccggcccattttccttgaggccgccgcccggggtgggaccaggctgtgtgcttgctaactgtgcttcaggaatccgctctgggatgccttcctgtctggcaaaaggggttacccccagttctacccagtccctgtcctcggtcacatgctgccgccgcctcttcccccgcggtgccgggagcccgcgttttgtttgtcagcagttaggcggtgagtatttatagacgccacggcagtcctgcggtgcgcaaggtttcaattactgcgatgcgccccacaagacgaaaggttcacgcgctgcgtctgagctgcacgtctgccccggagacccgcgtggactgttgcccagacgacacgtgcacattcagatgacccatgctaaggaccaaagggatgccaccggcccaatgtactgccttcatcccccaccatcctcaagggacccttgctgatcaagcccgggagactaccctttttgacctctctttggtgatcctgaccaccgtagaaatttgcagtcatgacatttcattgccctacatactgcaaaatgtcaaagtgctgagctgtggtaaattgctctggggtggaaggcgctgttactgacaacacgaagcagctagcgggtcaggaggggaaatggagcttgcagaaactaatttagccacatttaaaatttagcccctggtaaggttcccagtatgactgacgaaggtgcagggctcctgtctgtggaacctggctggttagtcttctctggttgcagccctagaatcaggatcaagggtgctgtttagagcggtttctgtagcatgtagcctttcagataagggaagtgatgcttggtcaatccacaaagttgtcttcagtttttccaactgcaaccattgttctttgagtatgttactgatgcttctaacaactggaaccactaatatgtaaaagaagaaaggcactagaaataagaaagtctaactagcttatttctcaaaggcttagtttagactactttgtttctcaagggtgggacctcatttctttcaggtccagagggccatggatatatatttatttctgtgggtgaaatttcaataatgttctgtcttagaacnttacaaatatgtgccacttgttttaaaaaggggaaaggtgcaaatgcctcttgaggtcttaatgatgtcttaaactttgcactgagagactttgataatattatatactcctcatgcaaacaatgatataggtactattatatccctatcatatagatgagcccactgaggcttggagaatttaagtaatttgtctaaagccatacacacagggatggagctgagaatggattacagatttgttactccagactcatagtctggacatgtctttcccttcaattctccattgttgattagctcacgttatagttgattagatggatggctttttatttattttcaaaatttcacagaatgttacaaattggctcagttattggggaaaaaagccctaatcttgtctttagaaaactgttatattggttatctgaaaatctcttgctgatagtccagacctaaatcataatcctcactttgctccttgacttaatgtatcttcagcattaaagccatttatctgtagaaaattgaattcagtaaggactttgtggattacttaattttttcagatttctccatactaatgatttgtaggtatgcatgtgtctgttttcctgtggctgttccttttgtacaaggtaaaatatgctgaaatctctcttaaattgcagcctttttccttttcattctttttgcagagctagacccaatacagaattgatttgaaaaacagtgtgtgagttcctctgaaagatccttacaatgtctaatgttcatcattaaaggtttgttctcaagagttgcctctctgtatgtaaaatgtaaatacatgttaaaggcaatgcttgtagaaatgaccctttgttaacaagtcagtgtgaattaatattttagttgctgaaatataggaataaaatattttgtggattttgtacagaatattat

SEQ ID NO: 341890 - DNA, 699 bp, Homo sapiens
gaatccccctccattgagagttgccatcactgggagcctttcttacccaggagagaggatatggaggcagaatttagggtgagaactgttacactcgtaattgaggccctgaatggaaatgtgctgagaaagaaaaacataacgagaaagacatagaaagaaatgaagatagccagacaggtatagaaggaacatgactccctttaaatagagaaacagccacacgatactctcaagtaatgctgctttgttatgtccatattttgacccattgtggtacctgtccaaatagccctgatttcaggccaagccctgccttgataaatggaactcacatagtaacaacaggtttcctaccacatcgatcttgttgatgttggagcaaattaaagcagatgtttcctgtcaactgtgaatctcttcccaaagaacacatcagcatcctcaacctcttcaagccacaccaaagacaaaggacctccatgcaactggatttctccttaaccgcaccattctatttgttaggtccattatctctgaacaattaacatgctctggaatactgtgttccagaatgtgtatataaatggaatatagcacgtggccctataaaagaaagaaactattaagaaaatggtccctttagccaattagaggaaatataatttctgacacgggccgctatggccagctggatac

SEQ ID NO: 341891 - DNA, 688 bp, Homo sapiens
tttaacaggcaaataagtttccttgggagactgaggtcccttaaaggggggacagcaatatgtgacaagtgtgtccctattctaaagaggactgttaaatcatctggaggccaggcggggtggctcatgcctgtaatttcagcactttgggaggccgaggtgggtggatcacttgaggtcaggagtttgagaccagcctggccaacatggtgaaaccctgtctttactaaaaatacaaaaattagctgggcgtggtgacaggtgtctgtgatctcagctactcaggagtctggggcaggacaattgcttgggcctagaaggcagaggttgcagtgagctgagattttgccactgtactccatcatgggtgacagagtgagactgtgtctttaaaaaataatgaaaagctgggcgcggtggctcactcgtgtaatcccagcactttgggaggccgaggtgggcatgtcaagaggtcaggagtttaagaccagcctggccaacatggcaaaaccccgtttctactaaaaatacttaaattagctgagcatggtggcgggcacctgtaatcccagctactccggaggctgaggcaggggaattgcttgaacctgggaggcagatgttgcagtgagccgagataacgccattgcaccccagcctgggtagcaaaagcaaaactccatctcaa

SEQ ID NO: 341892 - DNA, 451 bp, Homo sapiens
taacgacttcttgaaactcagtcctgtccctacgagattttgccataaatgtagggttcatttaaagatgacttttcccaaaactatacatgtgaaattcagttttcaaatcttaaattctgacatgagaatgagaaacaaaaaagacccagatgaactcccaggtaatccaatctcacaatcatggtttaaaaaaaaaaaggacttgaatacattcactcaagtatgtttgagcagctacaatattctaggcacaatggacagagataaagacagtgacctgaaactcagtctactgagaagagaacagtatggggtggtgtcagagaaagaaaaacacaggatgcaaacctcaattcagattgcagtcaactgacagaacacttcctaggggaagtgacagctcaagaggtctttgaaggatgagtaaaagtgaccacacaaaagaggc

SEQ ID NO: 341893 - DNA, 2315 bp, Homo sapiens
  misc_feature (2315)..(2315): n is a, c, g, or t
gggcttacagtttgatagatgcaaaataataaagcagtatgtattaagtgaggtaatagaagtacaaatgctctaggattttagaggaaggaagcccatatttgcagggaaggtttccttacgatatttatactaggccttgaaagatgcctgggatttctttagacagaagaggcagagaaatgtatttctggaaaaagttacaggagtgagaaaggacatatttaggaaatgacaagtgcttcagtttggctgcaatataaggtgtgtgcgaggtatgtagggaatgttaggaaataaggttgatatataggttggggtcagaatagaactttgaatatgccatgcaacaagggttgaatttacatgatagttgatcttgaagactgaaaactaggaaattacccagtcagaactgtgctttagaaggatgtgctgggggactgggcatggtggtttacacctgtaatctcagcacttcgggaagccaaggtgggaaaattgaggccaagagtttaagaaaaatgtactggaaagccatgagtaaaatagattagaatgaaggatagagggtacagagaaattggaattcagaaattctattggaattacctataaaaaacaaaggtagagccactttaaacatgtgcagtttatatatgccagtaatacctaagtaaggccgtttaaagaaaaaaaagtaagctatgataacgaggcactgaacttggaaagatgaaagaaagttcagatttgaatgacattttggaaatagaatctacagaggaggatggaaagagtgaagaagtaggagtggagtcaaacatgatgaaatttttaagcttgggtaatttaggaaaattgtggagccagaatagaaatagagaagtcaagaggaaggaggaaaaagcattttgaacgtgactattgatgaatctcttggacacattgtaactgaagtgtccacaaggtatcagtgattttgtcccagaggcaggtgaaaatgtggaatggtggtgcatggcgtagatcaccttctcagttgatgctgtacaagctgaagcaatggatatgaatggaacaaattgctcagcagtttcttataactctaactttctgtgacctgagttcaactatctctagtatacctgaataatatataagttggtattgtggcctaatatggggggaggtaatttctgatttttacattggttttatttctaaggtatttgtatacatagactctaacagaacacaaattcagaaacagatagttttgtatttgttcaggcgaaaatgacagacatcctctcttagctgtaggggaagaaactttgaggaaaagaagcgtctgacggtttctgaaaaccaagctaaaagggacaaaaatagaatgagatccttttctatggcattctttctctgtggttttaggaaatggtcttaataatttcttttaattctgtaattcttttttgtttgtttgttttaattcaggaccacaaataggaaaatctgccatttgtatttttgtttaatcagctctctcattagcacattctaatgtaaatgttccctgatttattgactgaagtttagtggattctccatgtatgtttggttatgcatagactggttgctgttaattgcacttgaattttgggatttttattttatcaataatagagcttctctaggcatgagtgatgttccagatatatagttgtcttaaaaatgtgattgaggaagggtacggtggctcacgcctgtaatcccagcacttcgggaggctgagacaggtggatcacttgaggtcaggacttcgataccagcctggccaacattacagaaccctttctccactaaaaatacaaaaatcagctgggcatggtggtgggcacgtgtaaccccagctactcgggaggctgagacacgaaaataacttgaacctgggaagttttagttcaagaccacaaaccaacaaaaactcacaaaaaacctgctttgccttctttaagaaggaaaaagggccgggtgcggtagcccatgcctgtagtccctagcaatttgggaggccgaggagggcagatcacctgaggtcaggagtttgagaccagcctggccggcagggtgaaaccccgtctctactaaaaaaatgcaaaattagtcaggcgtggtgatacatgcctgtagtctcagctactcgggaagctgacgcaggagaattgcttgaatccgggaggcagagctgcagtgagccaagatagctccattgcactccagcctgggcaacaagagtgaaactccatctn

SEQ ID NO: 341894 - DNA, 304 bp, Homo sapiens
gctcctccacccactgtctgcacctcagcaaatgcctcctatgctctgtggatcccccagacctctgtgtttaaaaaaaataaaataaaggaaaaagaaattaaatgcagttccaaccaaaatcctaaataagtttgagaaactgattttgaagtttttgaaacagtttttaaaaagaacgaggttttgtagggaaaaggggacttccctattagatataaaaattactataaagactatttatatcttattataaagtaacagtaattaagacaatgtgctttgagcacagtgataaacgcat

SEQ ID NO: 341895 - DNA, 295 bp, Homo sapiens
caccacgcccggccagttcttgtatttttagaagagacggggtttcaccctgttggccaggctcgtctgggactcctgacctcaggtaatccgcccacctcagcctcccaaagtgctgggattgcaggcatgagccaccgtgcccagtcaactccttctcaaaaaaaaaaaaatagtgctgctttctctttcaagtgtcctgatttgggtgatagtaaatgccactctacttataagggatctacctcagaatgctaattgggacatttttgtagcactctactgttggcagcag

SEQ ID NO: 341896 - DNA, 108 bp, Homo sapiens
gtgctcaataaatacttattgtatgaatgtggatgattcctattctgatcattgcccaataaaacatagctattattttatgagctatttattagttggaaaaattca

SEQ ID NO: 341897 - DNA, 603 bp, Homo sapiens
caagagtaaaactccatctcaaaaaaaaagctctttggaaccctcagtaatattttagaatataaagagtcctaaaagctaagaactgtttacataatttactactcttctctattgaaggctctttggattgcccaaatattcaattattacaattattatgctgcagtaatgtccttttactcatttaagcagaatgtttcaacccaggagcagttggaccatgaatgcgccaaatgctcttctctaagaagtcagtatgaactattagtcttttatccaaacaatttgctttagacataaactgattagtgaatcagaactttgttttaaattttgcatagaaaagaatcttgaaataatttcaggaaaataaaaatagaaaaaatttggtacagaaggaacaggattggaattttggaaaattagaaacaaacggactttgccattttaaaattgaatcaaggaatttaattggcttaatgatgtttaatctgggatatatttgctgaataacagaaactctcaatgctgaaatagttctgtgtattcatgaacttgttcctcccccccagatggcagatggcagttctgtcctcccaa

SEQ ID NO: 341898 - DNA, 244 bp, Homo sapiens
tcgtctatatactttctataagacttacttaataagggatatattttcattacaaagaccccaggctcttctctgattctactatatggattttaggatcaattatattcatcaaggtaagcataacttgcaaagttggcatttgatactgtagaatcagagatcagacaggtctcaagatgcccagttattaatctgtgtccagaaattactactctgctactctgatggagtcactgtgtag

SEQ ID NO: 341899 - DNA, 502 bp, Homo sapiens
ttatgacttctggggtaaaattctctgttgagagacacaaaggtgcaaatgatgggtgttgcttaaaatgctaagaagggtcatggacgccctaagctgagcatcttgtttagtaccaggtactttcatcccttcttgactccatctgccttctgtcctggggggccttggttccagaaaccagctcccttctgatcaggtattgtcattaataaactgtgtggtaccagtccagtttaatagaggactacagaagaaattaaaacacaaataaatgagttaggactatagaggtattttagatatggtgggagatggtagaagaaatatgtatttaatgtagagcctgccagtgctttcatatcttgcttcctgctctgtcttcataagaactgtgtcattcttcttataaatgagggtctgtgtgaccctgagtgtccatcttcatagcagttaagtagataggacattacaataatatatttaaaatttaaaatgataa

SEQ ID NO: 341900 - DNA, 480 bp, Homo sapiens
atgaggatcccccgtgaagccttaaccctccatctccctgtctgcactgctctcctgctccatctccccatctgcaccgtctctccctgccccgtctccatctccctgtctgcactgtctctcccagaggtgtttgctggtgccttctttgcagttccctgtgctgtgtcatgcccgtttgctgacccagcccctgctgtgtcttccccatcccagtgtgactgtcgctcttggtagttcctccgtgtttcctttgtttccttaggtgacttgtctttgccccactccctgcagtccgcagcacctgttgtctccttccctctcctcccgcttctcctcagacgtcatctgttctttctagagttgttccccttgccccagggtccagggttcctaacagcctgttttttttctttctttttttttttttagtgagacagagtctcgctctgttgcccaggctggagtgcagtggtgcgg

SEQ ID NO: 341901 - DNA, 244 bp, Homo sapiens
  misc_feature (152)..(152): n is a, c, g, or t
  misc_feature (190)..(190): n is a, c, g, or t
ggcatctagagcaaagaggtagtctccctgccccgtctccatctccctgtctgcactgtctctcccagaggtgtttgctggtgccttctttgcagttccctgtgctgtgtcatgcccgtttgctgacccagcccctgctgtgtcttccccangcctggctaattaaaattttttttttgtagagacgggntcttgctatgttgcccaggctggtctcaaactcttggcgatcctatagaggtcc

SEQ ID NO: 341902 - DNA, 679 bp, Homo sapiens
gagtacagtggcatgatcacggctcactgcatccctgacctcctaggctcaagccatcctcccacctcagccttctggagtagctgggaatataagcgtgtaccatcctacctggctaatttgtttgaatttttgtggaaacaggggtctcatttatgttttagatataccttctacacatagcctgcgggtaactttatataatactttaaataattttcttcatgaaacaaagtttttttcttttttttttgagacggagtctcactctgtcacccaggctggaatgcagtggcatgatctcctgacttcgtgatctgcctgccttggcctcccaaagtgctgggattacaggcatgagccaccatgcacagccactaatttttgtatttttttgtagagatggggtttcaccatgttgcccagggtggttttgaactccttagctcaagtgattcacccaccttggcctcccaaagtgctagaattacaggcatgagccactgtgccgggccagttttaggtttttgttttgttttgtttttcagagacagggtcttgctgtgctaaggctggagagtagtggtgtgatcatatcttgctacagccttgaactcctgggttcacatgtttctttcaccttagccttcccagtagtggactgtaggtatgtgccact

SEQ ID NO: 341903 - DNA, 471 bp, Homo sapiens
cctttgccttttcataccaccttgtttgtattccttttatggcaaatattagaattattatttacaaacatgtcttatcttcaaaatatatccagaatccaactgcttctaactaatcattttcaccgctaccgctttggtccaaaccactgtcatcttttccttgcattacggtgatatccttctaactggttctgctgttttcactctggccctcccacttccacaccagactattcttaacagcagttagcatgatcccatagaaacttaggccatactgtgtcactcctctcctaaatccacctcacccagagtaaaggccaaagttctttttatttttttaagatagagtctcactctgttgcccaggctggagtgcagtggcacaatctcggctcactgcaacctccgcctctcgggttcaagcaattctcctgcctcagcctcccaagtagctgggattacagg

SEQ ID NO: 341904 - DNA, 762 bp, Homo sapiens
ggctttggattttattcaaagaataatggaaaccatgtaagagttttaaaaaggggaatgacatgatttctattatatatgagaacaacttcaactgctgtatctccagtacctaccaagtaagtccctgacatttattaggtctataataaatcatttgttcaagttgttggggccggacatggtggctcacacctgtaatcccagaactttgggaggccgaggcaggcaaatggcttgagttcaggagttcgagaccagcctggacgatgtggcaaaaacccatttctaccaaaataaaaatacaaaaagtagccaggcatggtggcacatgcctgtactgtagtcccagctacctgagaggctgaggcaggagggtcgtttgagcctgagattcggaggttgctgtaagccaagatagcgccattgcactccatcctcggtgacagagcaagaccctgtctaaataaataaataaggttgttggaattgcttcccttagagaatctatgttactcctgagtaaggaggcagaataatgagagctaggggtgctcagggagaggctagtcaagtaaggccttgcgagatgggaaaccaatggagcattctaaacagaaaagtatcaccatttgatatatatgatctgatataaatttaggagcaaaatcctcaattaggaatttttgaaccatgtttcttggcaatgctatcagcctgttgaattatgatggtagctaaaactttctaaaacttagctca

SEQ ID NO: 341905 - DNA, 358 bp, Homo sapiens
cccaccagctgttagggactcctcccctctttacgcagatcaccagttatcttacactgtctggctttagtctcagatgaagacattctaataagcaccaagttgttcagctcagtgctaactctgccaggaatgtgtgcatttcctaagagctgccgaaaatggaaattaaatagtttgaaagaattaaatgataatggtggcatttcatacaccagaagggcagattggcatcagtgtaagcaccttttcagtccttctttgagaacaccaggaaagtggctacctgttttgctcatgcgaaatttggatctctatacaaaagcaaaaagacagtttgtgaagcgttacaatattg

SEQ ID NO: 341906 - DNA, 228 bp, Homo sapiens
catacattatggctgattccggttcaagggctcattgctgtttgtaatgcagcatcttcaacatccatggagccaccccacttactatcttcataaaccaacatagatgaccaccattgtttcctagcaatcaacttactatgatttatgcttcagactattttgtctttcctgtattttttgttctctccttgcgtttatttaacccctcatcatttgcaataagga

SEQ ID NO: 341907 - DNA, 544 bp, Homo sapiens
ccctaagtaacatatgtagaaccaaaaacggcaaacataaaagtattattcttgtgttaggaaaaagtccccagtacttccagcttaattagctggtactggtagtttagtatcctagagatcataaactagtagatcagaatttgcctttaagtttcattaggaagaaataaagacactattactaattcatgtttctggtttgcagttaactcatttaagctatatttagttactcattttggtcaatctactgaaaagaaatactgtaagggatttgcaatgccccctaatttctccttctctgtcaacttctcacatttgctttctaaaaaattcttaatatttaccttccaaatagtaaatgcaatcttctacaaatatctttgatatgaaaatgctcagtttaagaaaaatgtttcagtcacataaatctttgctatatagtattgagggcatttaaatactaagaacataaattattatgttaaatgttgtcagccaagtgtggtggctcatgcatgtaatcctagcactttgggag

SEQ ID NO: 341908 - DNA, 718 bp, Homo sapiens
agaaatgaagagattacagctgcatagagatgcctgtcaaatgacaagtgcctggagaaagcattttgatgaatgaacaacagaatgatcacaaaacagcctttggggccagcagtgtgatctgggttgagactccactgctcttgtgggatcctggagtgtctgatgggatgggaattacagtggatccttcacgacaggggtttgaagggcatggtccactttggtccacctctgccactctgagacagaagcaccaacccctcttcttcctcctcctcctcagtctactcagtgtgaagataacaagaatgaagaactttatgatgatgcatttccacttaacgaacaataaatatattttcttttccttgtgactttcttaataatattttcttttctctatcttactttatggtaagaatcagtatataatacatataacatacaaaatatgtgttaatcagctgtttatgttattgataaggctctggttgacagtaggctattagtagtagttctgtttggggggactcaaagttatacatggattttcagttgcatgggagctggcaccccaatccttgcgttattcaagggtcaactgtgcatagtttcagtggtaaatttgaaatgcataatgcggggattctcaaatttgaaggaagtgatatggggcaaatgaagcaatcgtagtgtgaatggggttatctgggac

SEQ ID NO: 341909 - DNA, 856 bp, Homo sapiens
attccagggtctgagagagagccaagatgaatatggccttccaagaagacatgctgacaagaaaagactcagagtgcccaggagcttccccttcctaccaaccctgcagcctggaaccctagccatacctctccctgactgtggacagtacagcctttgagctgagccaagctgctcccctggcgatttccataagagtaccacttatcagcaccttggacagcatacaaatgattctgcatctccaggaagaactggtccttcagccaagggcagcactgagccccaagtggccccagatgagtgcaaaggactaccagttttgatcagcgactggttgaattcgtggatgcaaaacctgtggatacagagggacagaggcctactgtacatggcacatgctcgcttccccaccccagcctgggcactgctgttcgactgagaccaggattattcccaccgcccaagagcagagagggctcagatgcacagcctctgccttcgtggagtgggcattttcaggaagtgcttagcctccaagtatgggctacttattttttaacaattactttcactccaagacgtacataattttttaaacatgggaatccctgatgtttcatttttgttttggaaatgatttttagagaagatgaattatcctgtctgatgccatgagatctatttttatcatttgggatgttgagactaaaactgacaacatatttagtattgcttatagtactcagtgacactgcctccctttgaagcccgccagagagccaccatgcaggaacatgagttactaattaattcaacctgctcactgggacaaaatgggaaggaagaacccaca

SEQ ID NO: 341910 - DNA, 737 bp, Homo sapiens
attccagggtctgagagagagccaagatgaatatggccttccaagaagacatgctgacaagaaaagactcagagtgcccaggagcttccccttcctaccaaccctgcagcctggaaccctagccatacctctccctgactgtggacagtacagcctttgagctgagccaagctgctcccctggcgatttccataagagtaccacttatcagcaccttggacagcatacaaatgattctgcatctccagaaattgtcacagccaccccaaccttcagctaccactaccctgattcatcagcatcaataccaaggcaacatcctccaccagaaaaagattacaactcaagcacattcacctggggatctggcaagatggctgaatagcaacagctccagtctgcagctcccagtgagaccaacacagaagggtctccctatcacccaggctggatggagtgcagtggcgtactcacagctcaccgcagcctcgacctcccaggctcagttgatcctcccacctcagcctcctgagtagctaggaatataggtgtgcacgaccacacacacctagtttttgtattttttgtagagacagggttttgccatgtttccccggctggtcttgaattcctaagctcaagcaatccacctacctcagcctcccaaagtgctattacaggcatgagccactgtgcccggccaacttcttttcctgttaaagaatctgaacatttat

SEQ ID NO: 341911 - DNA, 560 bp, Homo sapiens
attccagggtctgagagagagccaagatgaatatggccttccaagaagacatgctgacaagaaaagactcagagtgcccaggagcttccccttcctaccaaccctgcagcctggaaccctagccatacctctccctgactgtggacagtacagcctttgagctgagccaagctgctcccctggcgatttccataagagtaccacttatcagcaccttggacagcatacaaatgattctgcatctccaggaagaactggtccttcagccaagggcagcactgagccccaagtggccccagatgagtgcaaaggactaccagggctccatttaaatcttcctttgggcaaaacgggatcttgctgctcaaaaataatttgaaaaaactttgacattttgggtttgtgtcagaaagtcatggatttttttttttttttcgcctaagaagctatcaccaggaagcgtcaaatgagccctgtggaccatggctggcctcttatctttgggtttcaggagggacctcctgctaggttcatctccccccacagctcctgaaatggag

SEQ ID NO: 341912 - DNA, 283 bp, Homo sapiens
gtaaggacagatttattgaaaccaaagtacactccacagagtggaagtgggcttgagcaagcagcccaagagccgtttaccactcatacatttgattccgctgttttgactttgttaatcttttctttgtagattttaaaatgcagagggcagaatattattttgttcttctgtaagtttttaacaagtgatgaaatgataacttcatagatatcaagattcatttttgggttagtgtttttgaaaagctgggtctacttttgattcaatgggattcttaagt

SEQ ID NO: 341913 - DNA, 94 bp, Homo sapiens
aggtggcattctggagagaagcacaaaaaggagaaatcgcatatgagtggcaaaacccagcagagctctctgttgctgaagcctgaagttttaa

SEQ ID NO: 341914 - DNA, 667 bp, Homo sapiens
aaaagtccattctcatagaaattatgtttaaatttccagaggaattaaataaaacccagagagtttaagtaacttatccagcatcatagagcaaagatgacactggaattcaagtcttgagacttccaaacattatctttcaaagggaactgtcacatctttagaatgctagtccatgtatgaattgtaacagctaatacgttttgaagttggggaatcgggggggtaaagaactttaaagtttttgaacttttaatataattcaaagcaaattggcagtccacgttggcataaaaatagctagaatttatgaatttgtattcttggatttgtaaataatatttagcccttagggtcagttcataatatagtaaagcattaagagaatgctcatataaatagccagaatcttctgtttagctgttggaaaactagtcaactgctgcagctctcaagctaaactgttgatgattagtataggcacgggtaagattgaatatgaaggaagcattggggacacaaaattcaagtgaatattagtcacaaagtagtccatattcagataaatttctgtaataaccattttaccattatgtaatcagaaccagaccacctgggtctgagttgtagttcccctatctgatgaccaaagggtaagccagtaaat

SEQ ID NO: 341915 - DNA, 494 bp, Homo sapiens
tggaccaggagcaccatttccaagacaaatatttattctatcgatttctggatgatgagcacgaggatgcccctttgcctactgaggaggagaagaaggagtgtgatgaggagctccaggacaccatgctgctgctgtcacagatgggccccgacgcccacatgaggatgatccttcgcaaaccacctggccagaggactgtggatgacctagagattatctatgaggagcttcttcatattaaagccttatcccatctttctaccacagtgaaacgagagttagcaggtgttctcatttttgagtctcacgccaaaggagggactgtgttgtttaaccagggggaagaaggtacctcctggtacattattctaaaaggatcagtgaatgtagtcatttacggcaagggtgtggtctgcaccctgcatgaaggagatgacttcggcaagttagcactagtgaatgatgccccacgagctgcctctatcgtctta

SEQ ID NO: 341916 - DNA, 452 bp, Homo sapiens
ttagacagagtttcgctcttgtcacccaggctggagtgcaatggcgcaatcttggctcactgcaacctccacctcccaggttcagtgattctcctacctcagcctcccgagtagctgggactacaggcacatgccaccatgcccagctattttatcctttaatataacaataattctaatactctgttggaaggcaattcatcgatgtcccttgtttcttcatgtcctgtgagaagatgcactgacttattgttctgaactattttgtttacaccgtaaacacttggaagataagctctgcttcagcaacagatttgggggcagctttggaaataataatgtctccttctaggtcaaagggcagtaaagcatacttactacatgctataaaagatttgacgccctagcctcagagctcctctcctataattcagctcactgcatgtgtaggt

SEQ ID NO: 341917 - DNA, 305 bp, Homo sapiens
ccactgcacactgtccctggatgaggacacagctctgtgaaggtggggacccaggctgaccaattcacatccggccttcagcagccaacacagagcttggcatgtgggtggtgcttaacagactggctgatgagacaacgtgcatcaacaaaggacaccggacggggtttcaccatgttagccaggatggtcttgatctcctgacctcgtgattcacccacctcggcctcccaaagtgctgggattataggcgtgagccaccgcgcccggccctgaccctgtcttaaaaaataaataaaaaacaa

SEQ ID NO: 341918 - DNA, 1773 bp, Homo sapiens
  misc_feature (860)..(860): n is a, c, g, or t
  misc_feature (1117)..(1117): n is a, c, g, or t
gggatagactggaggggaaggtggacaggtctggagtacagtaggtggagggagggaagcacaggtttggggcactgaattttgtgctgtagggagaagggaggtagggagaaagaaggaaggtagacaggctattttggggtagaggatgtagaagaatgcttaatacctatagtggagtaagagaagggcaaggcagaggtgtatgtggacatgtctgtaactagaaaggcataggtgatggattggagtggtggtggtggtggtgggggaaataggatgcccaggtttagggcaggaaatgactgcttaagttggagagagctaggaacacaggttgcttaagagagtatggaagatccaaggagtggaagtatggggagagattggaacactttgagtttgagagatgaaaggggccaagatttttaggtcactgagagtctaaggaagatcaggcagagtgcagaagttggaaaaataactaaatggagaggattaaattccatactgagagaaactggagattgaggggtggggggacctggatcctggaatgatgttaatggaaagtggaggacattaaactcagtgtcatatctgaaagttcatactcctagggtcagagagatcgttgagcctgcttttaattccagaacccagtaaatgaggaagggggaaggggtaagggagagctgagtgcacatccccaaatttgggagaggtgtgtagtgggtatcatcctagcatattggtttgacgagtggacagaagggccacacagggtcacgaggagcgcaccaagagtgaatggaaatgggattgcagcaggtgcagggcagatgtctttgtgaaactgnaagagaccaggcccagtggccagtagcattcaagggctatgcataagagaggaagaaagggataccttggtgcagtgtctcagataccctggtgctttctgggtaatgggtcagtattcaggcagcatggggtgatgtaatatctgagtcccatgctataggcagacagaagtaatgtacacctagctcctaaaagtggcagaattggagctttctgactcttaacactctttcaaggcgtgaataactgatctggnttgttgactttttctcccaaatggttcaggtaaaatttagttggaggcttttggattctctggtattttgatttgagttgggaagtgtaatgttagctttattgaggaaagacacttatgggttgggcggacatatggccttcagcttgccaaacacatgggaagtaacctttaggggtttgaacacagacatttatttcagtgcaagtctcattcactgttctgtggcttgtgttagattcttaggggtttgaaaggattaagcaaactactttgagactgcttcagtaagcaaggtttcctagaatcttggaaaacgatttcccttttgacagttgaaaattaagtcttgtcagattttgctaagaaataaatttcatcatgttgcagaaataacttcaattatcactctgtgggcttcacgtaatgtgtagtgtggtacctagtatgatttcaaataaaaggttcgctttggtagcttgggagctttctgggttgattagttttcttcttttgtcgatttaggaagtatcttaatgcagccattgtatgttcgaataataagtttgagtggaagtgggaatcttgcctaaacataatgagggcggagcagaacaccaaattttaagtaatcggaatccgttaatataaatatt

SEQ ID NO: 341919 - DNA, 177 bp, Homo sapiens
tatccctaaaattctatgaaatgtaatagctgtagtcatgggccagacaaataattgttttacatcaaattctaattgctgatgttatctctcagtttcagtaaggctattgtatctgtactctagaaagacaaaatacttattaaacaataagatagaaaaacataggtagaccag

SEQ ID NO: 341920 - DNA, 513 bp, Homo sapiens
ttttttttttttggtgctatattaagttggattgctgccactaaaaatacaagtgaaggacatgaatcaaaatagctttaccaaatggcttaaacaaacacaaaaaccttctgctaggttgtgtgtgaggaaaattcatctcttatttttaaagtccacatattatatccatacataacagtatttactatcaaagtgaaaaaaatccatgagattaatatcatgggatgtttccctatgaatccacagtcaacgttttttattccttttaatacataaatactatctttaattgtactttcaagcacattttatgcccctcttactaaaaacacacaaaacgtatgagataaaatagaactagagtgctttattcttaaagcttgggctacaatttcccaaaatgtctctgatttataatattaaagattatgattttagatttcagcctaaaggcaagcattcaatctagtggataaatttagatcccactattcattgatattttgaaga

SEQ ID NO: 341921 - DNA, 661 bp, Homo sapiens
ggaagggtgactcactagacaggagttgaaaatgcctgggtttttgtgacactaacatctgtgtcctccatagatggagctcacatcacggagctcatgagaagctgagtgccagctaccacacacacattcagacatttgctgtcgggccacgggccatgctgatggagaaaaggtagcctaaattctctggtaacgggggtgagagagagagagagagatgtggcgatgaaaataaagaataaggaaaggaatagcgacttcaggggactttgcctgggttggggctcaggccggggcctgggaagtatgagagacagagggtgataaaagggcatcaggtgttagagagcagctggaccagaagacccaccatccggcagcaacacccaaagacctttggtcacataatgtggggacggggagggaggagctctggcactggagatagccttgggcacctggcaatgccctcccgccccttccccgctgactagttcacagaggccttgccccatgccactgcactgccttgacactgacacacagcactgccggcccagggacttctcagggtccaaacctcctacattcccagggctcccagaaatcagagctgaacccacaaggcacacagagctgggcctctgagctggctccc

SEQ ID NO: 341922 - DNA, 737 bp, Homo sapiens
ggttgatttgggaagcagagcacagcagcccaaatttgcttgtaatgtcggcggctacagaggaaaggccaagaatggacagattaataaagggccatctacaagccacgaataaggccatcaccagaagccaaccccgccagtccttgatctaggacttccagacttcaaaacttttctagcctgctggcctgccttcactgtcctgggggaggcttggagagaccaggtggactggagtagactgttgagagacgctggtctggtgaagatgtccaggaaaccacgagcctccagcccattgtccaacaaccacccaccaacaccaaagaggcgaggaagtggaaggttcccaagacaacccggaagggaaaagggacccatcaaggaagttccaggaacaaaaggctctccctaaaagaccgccgcttcaaaaaaacctgaggaatggagtgggccaacactatccagccactctgaccagccgaacgaggaactcaatcaaaatgagccatagcgggaccacaagggcaaggagaccaccaccttctccagtctctcttcggacagccagtaattcccgggcaaggccagagacttcaagtctatctgaaaagtctccagaggtctaaccccagataaatagccaacagggtgtagagtacattttacaccccaaagagtgtgccccatggtgatgaaaataaagtgaacatgttgcaaaatgaaaaatgtgt

SEQ ID NO: 341923 - DNA, 343 bp, Homo sapiens
gttgctgtgaaggtattttgtagatgtgatcaacatttacaatcagttgattttaagtaaagcagtttaacttccataatgtggatgggcctcatccaattagttgaaggtgttaagagaaaagaccaaggtttcctggaaaaggaattctaccacaagactaacataaaaatgcgctgtgagtttctagcctgctggcctgccttcactgtcctgggggaggcttggagagaccaggtggactggagtagactgttgagagacgctggtctggtgaagatgtccaggaaaccacgagcctccagcccattgtccaacaaccacccaccaacaccaaagaggc

SEQ ID NO: 341924 - DNA, 381 bp, Homo sapiens
cccgaggtgacaaaaaaacactcacattcccaagcacgtatgcatgtacaccatgggcattgggttgtttttagttaaatagcatcctgttacgcacgccctgaaattgtttctaaacttgcctataggtctgtagattaatttcaaatgtatcattacatacataggtgtcattttacataaatgggattataacatttttggtttttagtgcagtatttttttccatctaatctgccttccccttcccttacttcccatttcaccgctatgacttcccaggtaactcctataatttaccaggacttttctctgtgcttatgttgttattctaaacaacacatacacatttatatgtttgtttctttttttttttttttt

SEQ ID NO: 341925 - DNA, 754 bp, Homo sapiens
cttgtgactacccacttcaactccagtctgcatttcccagtggctcctggcatgggaggagtcaatgggagtcaagatgaaaaaggacccaggcaggaaaagttaacatgagtgaacactaccggctagctaaggaacagcaaatgtggctgccccgtgcaccaagggccatgtgtgatccccaggctgctgtgggtcactagacgtggttatagagagtgagaactggacagtgtcttttttcagggagaagacaagattaaggcaggaatgtcaatttctctgtgcaagacttccagatagcagctggccagaaaatgttttcatgccatacttccaaagaggggcccaaatctcatgcttgtcctttatatccaaggttaaatgagttaatacttataaagcactcagaatggtgactggcctagggtaggaaccctgcaactgattcaaaagtttcttctctgagatttcaaaacaacaggtaagaatagcaagactccattttgtgttttacgtctccttttatctgacccagtcacaggcttctttgcttcagtcaacacaaattatgacctagccatgagaaatttcccctcttctcctccttaattcattttgaatccaggcagcctggctgccaaaagtatttttctttttctttgtcttttttggttctttcttttttagaaaaacatccaactgatttactataaagccattgtattcatatagcattaattaaatactacat

SEQ ID NO: 341926 - DNA, 312 bp, Homo sapiens
tgagcgaggtgatctgaggaccctcctcagctggaaagatatagttcttcacagataaatattttgtttccatgatctgtaataacatctgataatatatgagtaattattttcaataaactaaaataaaagtaatctttctttttctttctatcttgaagtagtgggaggaaaaatactatttggaagcgtcatgccctaaaatagtggaaagctttagagggatgggtttcacatcaggaaatctagggaggaaaaatctcttcctctgggatggtgttagtttctttttccagagagggcaaaagttcc

SEQ ID NO: 341927 - DNA, 551 bp, Homo sapiens
agagtttattagtctctacagtgtgtgttcatcagaagttcatccagtttgacctagtgttggcctgtgacagtctaaagctttaatccctgccaaattagagtggaaatcatgataaggaaccatctagagatttttaattgcagataaaacatacaaaatgttttttgaaatctcatgtaacaatctgtttggataatattattggagatgttgacatttaagtgagaaaattattgtgcataaagtgaagcagaatgaagatggtaagaatctctgagcagatagcaaaaataaaaagctacataaaccagttgatttttaaaattagcacagctttaatctgagatgcaagatatcagttttgtaagcattattcagggctggcacttggtgaggtcctacgtctctggaggagtaaacagttcacgggattattttgttaatcaactctgaggagagagatttggacaaaaacactttacttagtaaatgaaacatatttaatttgctgtctcattctttgtcagtttgtcattagaggaacccgt

SEQ ID NO: 341928 - DNA, 289 bp, Homo sapiens
ggatgactgactacaaacggcacaaggcaacttttggggatgatgggaatattccacatctcaattgcggtggttgttacatgacagtttatgtttgttaaaactcagaggcccacacaactaaaaagtgtgaattttattctgtgtaaattattcttcaataaacctgattttaaaaattatcaagtgacaagatgaaaaggtgtaatttgtttgcagggtcctagacttcctgagacctaaaaatgtgaccttaggctgaacgctgtggctcacgcctgtaatccca

SEQ ID NO: 341929 - DNA, 791 bp, Homo sapiens
ttccacttctgggcataaacccccaaactgaaagctggaactcaacaggtgcttgtacacccatgtacagagtaacattattctaacagccaaaaggtgaaaacagcaccatgtccatctacagatcaatggacaaacacagtgccatgtgctaacacgaactaaatgtggcctgagaagaatgccaggacgtctatgtttgagtccttgtggacgaactataacctaccttaatagcagacaggactgaaaacctaattcaggagtctgcgcctgtaatagtggccgagtcttgaccaatcccagcagccatacgtcaaccatgcatagactgccgagtgttcaaactgttccaataaggcaaatgccaacctggaaccaatccagctgttctgtacctcactgccgagttttatatatcacttccccttttttttgtctatatatttgttctgaccacgaggaatccctggagtctctctgaatctgctgtgattctggcgctgcccgattcatgaatcattcattgctcaattaaactcctttaaatttaattcagttgaagtgtttcttttaacaaatggaatatgatccagccttaaaaaagaagtgagtctggacacaggctataacacgaggaaccctgaggatgttatgctgggtgaaatgagccggtcacagaaggacgaatcccgcagggtggcactgaggagaggtctccggaggggttggagccacagagacagaaagtaggatggttggtggctgccacatgcgcgcaggggaatctg

SEQ ID NO: 341930 - DNA, 312 bp, Homo sapiens
tatagtcaacactgggctacaacagttaagtttttggggagtcagttatatgtggattttctactgcatagtgggagtgtgagggtcgttgcctcttacccacatgttctggggactcaactgtaggattattagaaatagtaactatcctgatggaaggtttgtaccctttgaccaacatttccccatttcgttcaacccccctggctctagtaaccaccattctactctctgcttctatgagtttgatttttttagattccatgtacaagttagattatgcagtatttgctatgtcttgcttatttcgcc

SEQ ID NO: 341931 - DNA, 459 bp, Homo sapiens
gaatcagctccctccttcccagcagttggctttctccctctctttcctggtctggtctgtctaccaccagttgccatcctgtcctgagtgattgcttcatttcccaccctgattgacatcctcagggattccccttcagcataagctgcccccaccccgggcgtggtcccttgcacctccctccacaggctggcccctgcctgcctcctcacctcacgtatccccagtcacctcctctgctccaaggcacggcaggtccctgcccttctctgagcaggccactttgtttgaacacgtctctgtgtctttgaatagccctcctctccccactgaagccttctgcctcccaccacgaataaagatgatctttgtcttctttaaaacttgccctaagtttgcaaaacacaggatgtagagcagcatctaatagactatcatttgtgtttgaaaaaaaaaaaa

SEQ ID NO: 341932 - DNA, 199 bp, Homo sapiens
tcctcctcattctacttgcctgatcttggacaagttgatgaacctcttggcttccacacctgtaaactcaggataataagacagtagcgatatttggttgtctattgtctattcagcaccgacttcattcttcctaacaagactttggtgttgttcagggatcttctctatcctcacacaactgtgggaaacaggggaa

SEQ ID NO: 341933 - DNA, 282 bp, Homo sapiens
catacatttacaaattctatatcccaggaatggaaagtactcatgttaagctctgattctgacagaatgcattcctgttacgttgcaaataccactagtcaagcattgcttaaagtacaggtcataattgttttccacctgtgaatacaggcaatcatatcagtgtgaataggcttttttttttcctttaccacatagtatttacatttatagtttaatagtgctgagcaattcactttacaccatttttaaaagcttatttgtttttgttttgtttttttt

SEQ ID NO: 341934 - DNA, 340 bp, Homo sapiens
gagctcgtgatccgcccgcctcggcctcccaaagtgctgggatgacaggcgggagccaccgcgcccggccggtactagtatcgtggataacagcaatcactacatcataaagctgacagagtggactgtgaaaccaattcatcgtgtggcctgtccaatgaattacatttactcccaattctgaaaggtgctttaaaacaaacacaagaggagccagcacttctctcattagattaccagtaggcggaaaccttgggctttatgtgaaaaagtcccactttaccaacctgaagagcatcttacctcgaaagcattcatcaggacagtggctcccaattgt

SEQ ID NO: 341935 - DNA, 169 bp, Homo sapiens
ccaccttcattctttccaggatacacacagcaactcctccctgctctcctcttccctgtcctcccacctgcctattcccaaaggcagcccactgtgaccctataaaaatgttaggtcccatcacatcgcttccctactcagaactccccagtgtcaccctctcattcag

SEQ ID NO: 341936 - DNA, 460 bp, Homo sapiens
gcaggagaatcacttcaacccaggagcagagggtgcattgagctgagatcgccccactgcactccctcctgggcgacagagagagacgctgtccacccccgcctccaccaaaacaaacaaacaaacaaacaaacaaaaaaacccctgagactgggtaatttatagagaaaagagtttgattggctcacgctttgtagcacaggtgtttctgcttctggagaggccccaggaagcttccaaccgtggtggaaggcgaagcgggagcaggtgtctcacatggcgtgagcgggaacgagaaagacagagcagggaaacgtgcagaggaaatggttggagagcgaagtccaggcacaggggccatgagagccggaccccacgcagctgcagaccccgacccgaactgcatgcggctgaggacccccaagccaggcagaccccgacccagaccccacgcggccgc

SEQ ID NO: 341937 - DNA, 554 bp, Homo sapiens
ggcgggcaggtggccccgggagcccagacggacggctgctgtcgatatggcgacagctgccctgtggccgcccctgcacccagatggcgcctggcctggccgcagcatcctggagtctgaggccagcacctgcgtctccctgaagcccctcagagcctgccctgcagtgctgctgccctcgtctaccagtggctcaagcctgtcatcccagcactgtgggaggccgaggcgggtggatcacctgaggacaggagttcaagaccagcctgggcaacatggctatatggaaagcacaggtgtttctgcttctggagaggccccaggaagcttccaaccgtggtggaaggcgaagcgggagcaggtgtctcacatggcgtgagcgggaacgagaaagacagagcagggaaacgtgcagaggaaatggttggagagcgaagtccaggcacaggggccatgagagccggaccccacgcagctgcagaccccgacccgaactgcatgcggctgaggacccccaagccaggcagaccccgacccagaccccacgcggccgc

SEQ ID NO: 341938 - DNA, 1213 bp, Homo sapiens
ccacccaccacccacccacccacccacccacccacccaccacccacccacccacccacccacccacccaccacccacccacccacccacccacccacccaccacccacccacccacccacccacccacccaccacccacccacccacccacccacccacccaccacccacccacccacccacccacccacccaccacccacccacccacccacccacccacccaccacccacccacccacccacccacccacccaccacccacccacccacccacccacccacccaccacccacccacccacccacccacccacccaccacccacccacccacccacccacccacccaccacccacccacccacccacccacccacccaccacccacccacccacccacccacccacccaccacccacccacccacccacccacccacccaccacccacccacccacccacccacccacccaccacccacccacccacccacccacccacccaccacccacccacccacccacccacccacccaccacccacccacccacccacccacccacccaccacccacccacccacccacccacccacccaccacccacccacccacccacccacccacccaccacccacccacccacccacccacccacccaccacccacccacccacccacccacccacccaccacccacccacccacccacccacccacccaccacccacccacccacccacccacccacccaccagccagccagccagccagccccaatttttataaagtgtttttgagtgtcctatgggccggggcagggtccaagatcttttcccttccccaggcccctcggctccctcccagatcccacccccagccccactggttgccaaacactaaatctgccgacacccatctgccccacctcctgccatggccatgaaccgcgacccccactaaatttctagattggggatagggagaaagggaggcccaggaaggtctcccctgattttttttcatagtaatttttttccccagagtttgaattttttggtcttctcctggttttttggcaaattaggggggcccggggctcaagtgcgggaagggggctggcccgaggatcccatggctctcacaccatgtttttgtacagaactgatggttgaatctttgttctcttgaaataaacagaagaaaatgaaacctt

SEQ ID NO: 341939 - DNA, 519 bp, Homo sapiens
gagacaaagtctcgctctgttgcccagactggagtgcagtggcatgatctcggctcactgcaacccccgcctcccaggttcaagcaattatcctacctcagcctcccgagtagttgggaagacaggtgcacatcaccatgctctgctaatttttgtatttttagtccagacagggtttcacatgttgaccaggctggtcttgaactcctgggctcaaataatctgccccacctcctgccatggccatgaaccgcgacccccactaaatttctagattggggatagggagaaagggaggcccaggaaggtctcccctgattttttttcatagtaatttttttccccagagtttgaattttttggtcttctcctggttttttggcaaattaggggggcccggggctcaagtgcgggaagggggctggcccgaggatcccatggctctcacaccatgtttttgtacagaactgatggttgaatctttgttctcttgaaataaacagaagaaaatgaaacctt

SEQ ID NO: 341940 - DNA, 333 bp, Homo sapiens
gacagcgaggatgctcagatgcgcacgcgtcacatctgggctcacagttgcgcgctgatatgacagtggcgtcgtctcaaggacatggtttttctggacgatggccccaatttttataaagtgtttttgagtgtcctatgggccggggcagggtccaagatcttttcccttccccaggcccctcggctccctcccagatcccacccccagccccactggttgccaaacactaaatctgccgacacccatctgcgggtttcagggggacagtggaggatccaggtcttggggagctcaggacttgggctgtttgtagttttttgccttttagac

SEQ ID NO: 341941 - DNA, 1568 bp, Homo sapiens
tcgctctcctccctcttcccggctccagctccgccgccagctccagcctttgctccccctcccaaagtcccctccccggagcggagcgcacctagggtccctcttccgtccccccagcccagctacccgttcagaccagcagcctcggggggcacccccccgccagcctgcctccctcccgctcagccctgccagggttccccagccatgaatctcttccgattcctgggagacctctcccacctcctcgccatcatcttgctactgctcaaaatctggaagtcccgctcgtgcgccggaatttcagggaagagccaggtcctgtttgctgtggtgttcactgcccgatatctggacctcttcaccaactacatctcactctacaacacgtgtatgaaggtggtctacatagcctgctccttcaccacggtctggttgatttatagcaagttcaaagctacttacgatgggaaccatgacacgttcagagtggagttcctggtcgttcccacagccattctggcgttcctggtcaatcatgacttcacccctctggagatcctctggaccttctccatctacctggagtcagtggccatcttgccgcagctgttcatggtgagcaagaccggcgaggcggagaccatcaccagccactacttgtttgcgctaggcgtttaccgcacgctctatctcttcaactggatctggcgctaccatttcgagggcttcttcgacctcatcgccattgtggcaggcctggtccagacagtcctctactgcgatttcttctacctctatatcaccaaagtcctaaaggggaagaagttgagtttgccggcatagccccggtcctctccatctctctcctcggcagcagcgggaggcagaggaaggcggcagaagatgaagagctttcccatccaggggtgacttttttaagaacccacctcttgtgctccccatcccgcctcctgccgggtttcagggggacagtggaggatccaggtcttggggagctcaggacttgggctgtttgtagttttttgccttttagacaagaaaaaaaaatctttccactctttagtttttgattctgatgactcgtttttcttctactctgtggccccaatttttataaagtgtttttgagtgtcctatgggccggggcagggtccaagatcttttcccttccccaggcccctcggctccctcccagatcccacccccagccccactggttgccaaacactaaatctgccgacacccatctgccccacctcctgccatggccatgaaccgcgacccccactaaatttctagattggggatagggagaaagggaggcccaggaaggtctcccctgattttttttcatagtaatttttttccccagagtttgaattttttggtcttctcctggttttttggcaaattaggggggcccggggctcaagtgcgggaagggggctggcccgaggatcccatggctctcacaccatgtttttgtacagaactgatggttgaatctttgttctcttgaaataaacagaagaaaatgaaacctt

SEQ ID NO: 341942 - DNA, 2035 bp, Homo sapiens
tcgctctcctccctcttcccggctccagctccgccgccagctccagcctttgctccccctcccaaagtcccctccccggagcggagcgcacctagggtccctcttccgtccccccagcccagctacccgttcagaccagcagcctcggggggcacccccccgccagcctgcctccctcccgctcagccctgccagggttccccagccatgaatctcttccgattcctgggagacctctcccacctcctcgccatcatcttgctactgctcaaaatctggaagtcccgctcgtgcgccggaatttcagggaagagccaggtcctgtttgctgtggtgttcactgcccgatatctggacctcttcaccaactacatctcactctacaacacgtgtatgaaggtggtctacatagcctgctccttcaccacggtctggttgatttatagcaagttcaaagctacttacgatgggaaccatgacacgttcagagtggagttcctggtcgttcccacagccattctggcgttcctggtcaatcatgacttcacccctctggagatcctctggaccttctccatctacctggagtcagtggccatcttgccgcagctgttcatggtgagcaagaccggcgaggcggagaccatcaccagccactacttgtttgcgctaggcgtttaccgcacgctctatctcttcaactggatctggcgctaccatttcgagggcttcttcgacctcatcgccattgtggcaggcctggtccagacagtcctctactgcgatttcttctacctctatatcaccaaagtcctaaaggggaagaagttgagtttgccggcatagccccggtcctctccatctctctcctcggcagcagcgggaggcagaggaaggcggcagaagatgaagagctttcccatccaggggtgacttttttaagaacccacctcttgtgctccccatcccgcctcctgccgggtttcagggggacagtggaggatccaggtcttggggagctcaggacttgggctgtttgtagttttttgccttttagacaagaaaaaaaaatctttccactctttagtttttgattctgatgactcgtttttcttctactctgtggccccaatttttataaagtgtttttgagtgtcctatgggccggggcagggtccaagatcttttcccttccccaggcccctcggctccctcccagatcccacccccagccccactggttgccaaacactaaatctgccgacacccatctgccccacctcctgccatggccatgaaccgcgacccccactaaatttctagattggggatagggagaaagggaggcccaggaaggtctcccctgattttttttcatagtaatttttttccccagagtttgaattttttggtcttctcctggttttttggcaaattaggggggcccggggctcaagtgcgggaagggggctggcccgaggatcccatggctctcacaccatgtttttgtacagaactgatggttgaatctttgttctcttgaaataaacagaagaaaatgaaaccttaaaaaacaaaaaaacaaaaaaaaaaacacatttttggggcgcggccttgggccccgaaaaactttcttaaacccatccgcaggtgggacgcgcgcggcgaccacaaagagagcgtaggtgacaccgtgtggcaacaaacgggtggtaccccaggagaaaaccacggtggacaagagaaaaaaagcgccgactgggagaaattcctcccccgcacggatagaaaaaaagaagcgcccgcgcgggggggcgcaacaacaccgcagaagatgctgtctcgtgagacgacacaacagaactcgcccacagaatggggagcgcgaccgcccgagagagggcgccaactagaaggggggggagactcagaagatgacacagaggggaggagagtaccacaccagaagggagaagatgcgccgaacaagactagaatagaagacgaccccgcccgtcgtcgggtggatagcgca

SEQ ID NO: 341943 - DNA, 1624 bp, Homo sapiens
tcgctctcctccctcttcccggctccagctccgccgccagctccagcctttgctccccctcccaaagtcccctccccggagcggagcgcacctagggtccctctactcagcctcaggcgtacctctgttcagtagcatgctagtcgtctgggcgggcagctcccacctaacaggccgtggtgctccactcgctcgcgtgcagaccgcctgtccgagtggatttacccacagacctactgcataatttgcgtgtaccgaacttccgtggcgaggaccatgctcgcgcgatactccgtcgaccatcgagtcttgctacatgcgtacaaaatctgagaagtccgcgctcgtgcgccggaatttcagggaagagccaggtcctgtttgctgtggtgttcactgcccgatatctggacctcttcaccaactacatctcactctacaacacgtgtatgaaggtggtctacatagcctgctccttcaccacggtctggttgatttatagcaagttcaaagctacttacgatgggaaccatgacacgttcagagtggagttcctggtcgttcccacagccattctggcgttcctggtcaatcatgacttcacccctctggagatcctctggaccttctccatctacctggagtcagtggccatcttgccgcagctgttcatggtgagcaagaccggcgaggcggagaccatcaccagccactacttgtttgcgctaggcgtttaccgcacgctctatctcttcaactggatctggcgctaccatttcgagggcttcttcgacctcatcgccattgtggcaggcctggtccagacagtcctctactgcgatttcttctacctctatatcaccaaagtcctaaaggggaagaagttgagtttgccggcatagccccggtcctctccatctctctcctcggcagcagcgggaggcagaggaaggcggcagaagatgaagagctttcccatccaggggtgacttttttaagaacccacctcttgtgctccccatcccgcctcctgccgggtttcagggggacagtggaggatccaggtcttggggagctcaggacttgggctgtttgtagttttttgccttttagacaagaaaaaaaaatctttccactctttagtttttgattctgatgactcgtttttcttctactctgtggccccaatttttataaagtgtttttgagtgtcctatgggccggggcagggtccaagatcttttcccttccccaggcccctcggctccctcccagatcccacccccagccccactggttgccaaacactaaatctgccgacacccatctgccccacctcctgccatggccatgaaccgcgacccccactaaatttctagattggggatagggagaaagggaggcccaggaaggtctcccctgattttttttcatagtaatttttttccccagagtttgaattttttggtcttctcctggttttttggcaaattaggggggcccggggctcaagtgcgggaagggggctggcccgaggatcccatggctctcacaccatgtttttgtacagaactgatggttgaatctttgttctcttgaaataaacagaagaaaatgaaacctt

SEQ ID NO: 341944 - DNA, 1189 bp, Homo sapiens
ccaaatccggggtcagtgatcctcgagctggcagaaccaatggccattcgctactagtgaaacagtaaggtatcctgcatatgcaagatgggaaccatgacacgttcagagtggagttcctggtcgttcccacagccattctggcgttcctggtcaatcatgacttcacccctctggagatcctctggaccttctccatctacctggagtcagtggccatcttgccgcagctgttcatggtgagcaagaccggcgaggcggagaccatcaccagccactacttgtttgcgctaggcgtttaccgcacgctctatctcttcaactggatctggcgctaccatttcgagggcttcttcgacctcatcgccattgtggcaggcctggtccagacagtcctctactgcgatttcttctacctctatatcaccaaagtcctaaaggggaagaagttgagtttgccggcatagccccggtcctctccatctctctcctcggcagcagcgggaggcagaggaaggcggcagaagatgaagagctttcccatccaggggtgacttttttaagaacccacctcttgtgctccccatcccgcctcctgccgggtttcagggggacagtggaggatccaggtcttggggagctcaggacttgggctgtttgtagttttttgccttttagacaagaaaaaaaaatctttccactctttagtttttgattctgatgactcgtttttcttctactctgtggccccaatttttataaagtgtttttgagtgtcctatgggccggggcagggtccaagatcttttcccttccccaggcccctcggctccctcccagatcccacccccagccccactggttgccaaacactaaatctgccgacacccatctgccccacctcctgccatggccatgaaccgcgacccccactaaatttctagattggggatagggagaaagggaggcccaggaaggtctcccctgattttttttcatagtaatttttttccccagagtttgaattttttggtcttctcctggttttttggcaaattaggggggcccggggctcaagtgcgggaagggggctggcccgaggatcccatggctctcacaccatgtttttgtacagaactgatggttgaatctttgttctcttgaaataaacagaagaaaatgaaacctt

SEQ ID NO: 341945 - DNA, 1188 bp, Homo sapiens
cctgtgtatctgctgtgatgtagtgtccccgttacacattggtagttgaaatctgtgggagtgtgtcagtgaccaaacgtgattccgaaggaacactagtggtgcctaccaagaagtctcagatcttttctcccgccctgtcccctcccacctcatcatgtccccggcctctctgcagatcctctggaccttctccatctacctggagtcagtggccatcttgccgcagctgttcatggtgagcaagaccggcgaggcggagaccatcaccagccactacttgtttgcgctaggcgtttaccgcacgctctatctcttcaactggatctggcgctaccatttcgagggcttcttcgacctcatcgccattgtggcaggcctggtccagacagtcctctactgcgatttcttctacctctatatcaccaaagtcctaaaggggaagaagttgagtttgccggcatagccccggtcctctccatctctctcctcggcagcagcgggaggcagaggaaggcggcagaagatgaagagctttcccatccaggggtgacttttttaagaacccacctcttgtgctccccatcccgcctcctgccgggtttcagggggacagtggaggatccaggtcttggggagctcaggacttgggctgtttgtagttttttgccttttagacaagaaaaaaaaatctttccactctttagtttttgattctgatgactcgtttttcttctactctgtggccccaatttttataaagtgtttttgagtgtcctatgggccggggcagggtccaagatcttttcccttccccaggcccctcggctccctcccagatcccacccccagccccactggttgccaaacactaaatctgccgacacccatctgccccacctcctgccatggccatgaaccgcgacccccactaaatttctagattggggatagggagaaagggaggcccaggaaggtctcccctgattttttttcatagtaatttttttccccagagtttgaattttttggtcttctcctggttttttggcaaattaggggggcccggggctcaagtgcgggaagggggctggcccgaggatcccatggctctcacaccatgtttttgtacagaactgatggttgaatctttgttctcttgaaataaacagaagaaaatgaaacctt

SEQ ID NO: 341946 - DNA, 1176 bp, Homo sapiens
cgctatcgctctccaaccacccaacatgcggcgtatttgcctcaagtacctgctgcttactacacattgctgcttctggctggctgttctggctgtcatggcagtgggcatctggacgctggccctcaagagtgactacatcagcctgttgcctcaggcacctacctggccacagcctacaatcctgggggtgggtggagaacggccgctctccactcaaccaatggtgagcaagaccggcgaggcggagaccatcaccagccactacttgtttgcgctaggcgtttaccgcacgctctatctcttcaactggatctggcgctaccatttcgagggcttcttcgacctcatcgccattgtggcaggcctggtccagacagtcctctactgcgatttcttctacctctatatcaccaaagtcctaaaggggaagaagttgagtttgccggcatagccccggtcctctccatctctctcctcggcagcagcgggaggcagaggaaggcggcagaagatgaagagctttcccatccaggggtgacttttttaagaacccacctcttgtgctccccatcccgcctcctgccgggtttcagggggacagtggaggatccaggtcttggggagctcaggacttgggctgtttgtagttttttgccttttagacaagaaaaaaaaatctttccactctttagtttttgattctgatgactcgtttttcttctactctgtggccccaatttttataaagtgtttttgagtgtcctatgggccggggcagggtccaagatcttttcccttccccaggcccctcggctccctcccagatcccacccccagccccactggttgccaaacactaaatctgccgacacccatctgccccacctcctgccatggccatgaaccgcgacccccactaaatttctagattggggatagggagaaagggaggcccaggaaggtctcccctgattttttttcatagtaatttttttccccagagtttgaattttttggtcttctcctggttttttggcaaattaggggggcccggggctcaagtgcgggaagggggctggcccgaggatcccatggctctcacaccatgtttttgtacagaactgatggttgaatctttgttctcttgaaataaacagaagaaaatgaaacctt

SEQ ID NO: 341947 - DNA, 1259 bp, Homo sapiens
tcgctctcctccctcttcccggctccagctccgccgccagctccagcctttgctccccctcccaaagtcccctccccggagcggagcgcacctagggtccctcttccgtccccccagcccagctacccgttcagaccagcagcctcggggggcacccccccgccagcctgcctccctcccgctcagccctgccagggttccccagccatgaatctcttccgattcctgggagacctctcccacctcctcgccatcatcttgctactgctcaaaatctggaagtcccgctcgtgcgccggaatttcagggaagagccaggtcctgtttgctgtggtgttcactgcccgatatctggacctcttcaccaactacatctcactctacaacacgtgtatgaaggtggtctacatagcctgctccttcaccacggtctggttgatttatagcaagttcaaagctacttacgatgggaaccatgacacgttcagagtggagttcctggtcgttcccacagccattctggcgttcctggtcaatcatgacttcacccctctggagatcctctggaccttctccatctacctggagtcagtggccatcttgccgcagctgttcatggtgagcaagaccggcgaggcggagaccatcaccagccactacttgtttgcgctaggcgtttaccgcacgctctatctcttcaactggatctggcgctaccatttcgagggcttcttcgacctcatcgccattgtggcaggcctggtccagacagtcctctactgcgatttcttctacctctatatcaccaaagtcctaaaggggaagaagttgagtttgccggcatagccccggtcctctccatctctctcctcggcagcagcgggaggcagaggaaggcggcagaagatgaagagctttcccatccccactggttgccaaacactaaatctgccgacacccatctgccccacctcctgccatggccatgaaccgcgacccccactaaatttctagattggggatagggagaaagggaggcccaggaaggtctcccctgattttttttcatagtaatttttttccccagagtttgaattttttggtcttctcctggttttttggcaaattaggggggcccggggctcaagtgcgggaagggggctggcccgaggatcccatggctctcacaccatgtttttgtacagaactgatggttgaatctttgttctcttgaaataaacagaagaaaatgaaacctt

SEQ ID NO: 341948 - DNA, 546 bp, Homo sapiens
gacagcgaggatgctcagatgcgcacgcgtcacatctgggctcacagttgcgcgctgatatgacagtggcgtcgtctcaaggacatggtttttctggacgatggccccaatttttataaagtgtttttgagtgtcctatgggccggggcagggtccaagatcttttcccttccccaggcccctcggctccctcccagatcccacccccagccccactggttgccaaacactaaatctgccgacacccatctgccccacctcctgccatggccatgaaccgcgacccccactaaatttctagattggggatagggagaaagggaggcccaggaaggtctcccctgattttttttcatagtaatttttttccccagagtttgaattttttggtcttctcctggttttttggcaaattaggggggcccggggctcaagtgcgggaagggggctggcccgaggatcccatggctctcacaccatgtttttgtacagaactgatggttgaatctttgttctcttgaaataaacagaagaaaatgaaacctt

SEQ ID NO: 341949 - DNA, 337 bp, Homo sapiens
tcgctctcctccctcttcccggctccagctccgccgccagctccagcctttgctccccctcccaaagtcccctccccggagcggagcgcacctagggtccctcggagaaagggaggcccaggaaggtctcccctgattttttttcatagtaatttttttccccagagtttgaattttttggtcttctcctggttttttggcaaattaggggggcccggggctcaagtgcgggaagggggctggcccgaggatcccatggctctcacaccatgtttttgtacagaactgatggttgaatctttgttctcttgaaataaacagaagaaaatgaaacctt

SEQ ID NO: 341950 - DNA, 191 bp, Homo sapiens
atcataggatctcctcgccgggccatggtgatgattaaatcagaggtaccagtaactcgggcagaactgtgtctggcacttggcagcacctggatcaccttccttctctccaccttcgcggcacctgtaactgcaatgttgtcctctgccttttctcccgccctgtcccctcccacctcatcatgtccccg

SEQ ID NO: 341951 - DNA, 1594 bp, Homo sapiens
tcgctctcctccctcttcccggctccagctccgccgccagctccagcctttgctccccctcccaaagtcccctccccggagcggagcgcacctagggtccctcttccgtccccccagcccagctacccgttcagaccagcagcctcggggggcacccccccgccagcctgcctccctcccgctcagccctgccagggttccccagccatgaatctcttccgattcctgggagacctctcccacctcctcgccatcatcttgctactgctcaaaatctggaagtcccgctcgtgcgccggaatttcagggaagagccaggtcctgtttgctgtggtgttcactgcccgatatctggacctcttcaccaactacatctcactctacaacacgtgtatgaaggtggtctacatagcctgctccttcaccacggtctggttgatttatagcaagttcaaagctacttacgatgggaaccatgacacgttcagagtggagttcctggtcgttcccacagccattctggcgttcctggtcaatcatgacttcacccctctggagatcctctggaccttctccatctacctggagtcagtggccatcttgccgcagctgttcatggtgagcaagaccggcgaggcggagaccatcaccagccactacttgtttgcgctaggcgtttaccgcacgctctatctcttcaactggatctggcgctaccatttcgagggcttcttcgacctcatcgccattgtggcaggcctggtccagacagtcctctactgcgatttcttctacctctatatcaccaaagtcctaaaggggaagaagttgagtttgccggcatagccccggtcctctccatctctctcctcggcagcagcgggaggcagaggaaggcggcagaagatgaagagctttcccatccaggggtgacttttttaagaacccacctcttgtgctccccatcccgcctcctgccgggtttcagggggacagtggaggatccaggtcttggggagctcaggacttgggctgtttgtagttttttgccttttagacaagaaaaaaaaatctttccactctttagtttttgattctgatgactcgtttttcttctactctgtggccccaatttttataaagtgtttttgagtgtcctatgggccggggcagggtccaagatcttttcccttccccaggcccctcggctccctcccagatcccacccccagccccactggttgccaaacactaaatctgccgacacccatctgccccacctcctgccatggccatgaaccgcgacccccactaaatttctagattggggatagggagaaagggaggcccaggaaggtctcccctgattttttttcatagtaatttttttccccagagtttgaattttttggtcttctcctggttttttggcaaattaggggggcccggggctcaagtgcgggaagggggctggcccgaggatcccatggctctcacaccatgtttttgtacagaactgatggttgaatctttgttctcttgaaataaacagaagaaaatgaaaccttaaaaaaaaaaaacaagggcggccgct

SEQ ID NO: 341952 - DNA, 1937 bp, Homo sapiens
ctaggggcacaggttccacccccactgcttgctggggatctctcttctaggttctgggtctccaggggatcagctcccttccccagactggcgggggtgcatacagtttcatgtgaatggctttaggcccccaattcagccacccccagccccaatctgggcagcccgagggttcatggaccgggaacagggaaccatggcaggcggggaggtggctgtgagttggtgacgtggaccgtggcggccaggaagggaacgggagggaggtgaccggatccggggcctgaggtcagggaaggtcctccctaggcctcacctcaggtccagactgcgggaggaccctgaggggccagggtagccatgaggcctagtctgggacggagcctcgggctggagtagcttcgggggcctgggctgccccctggctgtggtccgtgggaaagggccctgctcaggcggggcgggctggggaggcctccggggacagctgcactccagagctgcctccaggctggtcccgggcgccctgccttagtttattgcccatgcagcccacccccagcttcctctctccttctgtctgtctgtctgtctgtctgtctctctctctctctctctctctctctctgtctctctctctctctctttctctgtctctggaccacaggaatttcagggaagagccaggtcctgtttgctgtggtgttcactgcccgatatctggacctcttcaccaactacatctcactctacaacacgtgtatgaaggtggtctacatagcctgctccttcaccacggtctggttgatttatagcaagttcaaagctacttacgatgggaaccatgacacgttcagagtggagttcctggtcgttcccacagccattctggcgttcctggtcaatcatgacttcacccctctggagatcctctggaccttctccatctacctggagtcagtggccatcttgccgcagctgttcatggtgagcaagaccggcgaggcggagaccatcaccagccactacttgtttgcgctaggcgtttaccgcacgctctatctcttcaactggatctggcgctaccatttcgagggcttcttcgacctcatcgccattgtggcaggcctggtccagacagtcctctactgcgatttcttctacctctatatcaccaaagtcctaaaggggaagaagttgagtttgccggcatagccccggtcctctccatctctctcctcggcagcagcgggaggcagaggaaggcggcagaagatgaagagctttcccatccaggggtgacttttttaagaacccacctcttgtgctccccatcccgcctcctgccgggtttcagggggacagtggaggatccaggtcttggggagctcaggacttgggctgtttgtagttttttgccttttagacaagaaaaaaaaatctttccactctttagtttttgattctgatgactcgtttttcttctactctgtggccccaatttttataaagtgtttttgagtgtcctatgggccggggcagggtccaagatcttttcccttccccaggcccctcggctccctcccagatcccacccccagccccactggttgccaaacactaaatctgccgacacccatctgccccacctcctgccatggccatgaaccgcgacccccactaaatttctagattggggatagggagaaagggaggcccaggaaggtctcccctgattttttttcatagtaatttttttccccagagtttgaattttttggtcttctcctggttttttggcaaattaggggggcccggggctcaagtgcgggaagggggctggcccgaggatcccatggctctcacaccatgtttttgtacagaactgatggttgaatctttgttctcttgaaataaacagaagaaaatgaaacctt

SEQ ID NO: 341953 - DNA, 1635 bp, Homo sapiens
tcgctctcctccctcttcccggctccagctccgccgccagctccagcctttgctccccctcccaaagtcccctccccggagcggagcgcacctagggtccctcttccgtccccccagcccagctacccgttcagaccagcagcctcggggggcacccccccgccagcctgcctccctcccgctcagccctgccagggttccccagccatgaatctcttccgattcctgggagacctctcccacctcctcgccatcatcttgctactgctcaaaatctggaagtcccgctcgtgcgccggaatttcagggaagagccaggtcctgtttgctgtggtgttcactgcccgatatctggacctcttcaccaactacatctcactctacaacacgtgtatgaaggtggtctacatagcctgctccttcaccacggtctggttgatttatagcaagttcaaagctacttacgatgggaaccatgacacgttcagagtggagttcctggtcgttcccacagccattctggcgttcctggtcaatcatgacttcacccctctggaggaagataggcctgggtggccagatgtgctgatcttttcaacagaagccataattcaggagttttcagatcctctggaccttctccatctacctggagtcagtggccatcttgccgcagctgttcatggtgagcaagaccggcgaggcggagaccatcaccagccactacttgtttgcgctaggcgtttaccgcacgctctatctcttcaactggatctggcgctaccatttcgagggcttcttcgacctcatcgccattgtggcaggcctggtccagacagtcctctactgcgatttcttctacctctatatcaccaaagtcctaaaggggaagaagttgagtttgccggcatagccccggtcctctccatctctctcctcggcagcagcgggaggcagaggaaggcggcagaagatgaagagctttcccatccaggggtgacttttttaagaacccacctcttgtgctccccatcccgcctcctgccgggtttcagggggacagtggaggatccaggtcttggggagctcaggacttgggctgtttgtagttttttgccttttagacaagaaaaaaaaatctttccactctttagtttttgattctgatgactcgtttttcttctactctgtggccccaatttttataaagtgtttttgagtgtcctatgggccggggcagggtccaagatcttttcccttccccaggcccctcggctccctcccagatcccacccccagccccactggttgccaaacactaaatctgccgacacccatctgccccacctcctgccatggccatgaaccgcgacccccactaaatttctagattggggatagggagaaagggaggcccaggaaggtctcccctgattttttttcatagtaatttttttccccagagtttgaattttttggtcttctcctggttttttggcaaattaggggggcccggggctcaagtgcgggaagggggctggcccgaggatcccatggctctcacaccatgtttttgtacagaactgatggttgaatctttgttctcttgaaataaacagaagaaaatgaaacctt

SEQ ID NO: 341954 - DNA, 1224 bp, Homo sapiens
tcgctctcctccctcttcccggctccagctccgccgccagctccagcctttgctccccctcccaaagtcccctccccggagcggagcgcacctagggtccctcttccgtccccccagcccagctacccgttcagaccagcagcctcggggggcacccccccgccagcctgcctccctcccgctcagccctgccagggttccccagccatgaatctcttccgattcctgggagacctctcccacctcctcgccatcatcttgctactgctcaaaatctggaagtcccgctcgtgcgccggaatttcagggaagagccaggtcctgtttgctgtggtgttcactgcccgatatctggacctcttcaccaactacatctcactctacaacacgtgtatgaaggtggtctacatagcctgctccttcaccacggtctggttgatttatagcaagttcaaagctacttacgatgggaaccatgacacgttcagagtggagttcctggtcgttcccacagccattctggcgttcctggtcaatcatgacttcacccctctggagatcctctggaccttctccatctacctggagtcagtggccatcttgccgcagctgttcatggtgagcaagaccggcgaggcggagaccatcaccagccactacttgtttgcgctaggcgtttaccgcacgctctatctcttcaactggatctggcgctaccatttcgagggcttcttcgacctcatcgccattgtggcaggcctggtccagacagtcctctactgcgatttcttctacctctatatcaccaaagtcctaaaggggaagaagttgagtttgccggcatagccccggtcctctccatctctctcctcggcagcagcgggaggcagaggaaggcggcagaagatgaagagctttcccatccaggggtgacttttttaagaacccacctcttgtgctccccatcccgcctcctgccgggtttcagggggacagtggaggatccaggtcttggggagctcaggacttgggctgtttgtagttttttgccttttagacaagaaaaaaaaatctttccactctttagtttttgattctgatgactcgtttttcttctactctgtggctggcccgaggatcccatggctctcacaccatgtttttgtacagaactgatggttgaatctttgttctcttgaaataaacagaagaaaatgaaacctt

SEQ ID NO: 341955 - DNA, 1085 bp, Homo sapiens
  misc_feature (989)..(989): n is a, c, g, or t
  misc_feature (999)..(999): n is a, c, g, or t
  misc_feature (1044)..(1044): n is a, c, g, or t
  misc_feature (1061)..(1061): n is a, c, g, or t
  misc_feature (1077)..(1077): n is a, c, g, or t
tcgctctcctccctcttcccggctccagctccgccgccagctccagcctttgctccccctcccaaagtcccctccccggagcggagcgcacctagggtccctcttccgtccccccagcccagctacccgttcagaccagcagcctcggggggcacccccccgccagcctgcctccctcccgctcagccctgccagggttccccagccatgaatctcttccgattcctgggagacctctcccacctcctcgccatcatcttgctactgctcaaaatctggaagtcccgctcgtgcgccggaatttcagggaagagccaggtcctgtttgctgtggtgttcactgcccgatatctggacctcttcaccaactacatctcactctacaacacgtgtatgaaggtggtctacatagcctgctccttcaccacggtctggttgatttatagcaagttcaaagctacttacgatgggaaccatgacacgttcagagtggagttcctggtcgttcccacagccattctggcgttcctggtcaatcatgacttcacccctctggagatcctctggaccttctccatctacctggagtcagtggccatcttgccgcagctgttcatggtgagcaagaccggcgaggcggagaccatcaccagccactacttgtttgcgctaggcgtttaccgcacgctctatctcttcaactggatctggcgctaccatttcgagggcttcttcgacctcatcgccattgtggcaggcctggtccagacagtcctctactgcgatttcttctacctctatatcaccaaagtcctaaaggggaagaagttgagtttgccggcatagccccggtcctctccatctctctcctcggcagcagcgggaggcagaggaaggcggcagaagatgaagagctttcccattccaggggggtggatttttttttaaaggaaaccccaccttttttgttggtttcccccattccccgnctttccttgnccgggttttcagggggggaacagtgggaaggattccagggttttngggggagttcagggatnttggggttgttttgtnagtttttt

SEQ ID NO: 341956 - DNA, 587 bp, Homo sapiens
agagtggttagctttcttttcaagaatgtatttccatacttcttttgggtttctagaaaagaaggtacatttcctggatttgagctttagccacagagagtatctgggaccagaaacacaggatctctattaaaagaacacgaaacgtcacttccacacgacctgcaatttctagaatggagagaaagcttcagtaaacattcagtaatagcatgcaacaaaggtgggagatatgaagttatgaagagatagttactggatcaaaatagaagaaatgatgcctggcagctagaaaaaaatattcatgtgcattgattacacaataaacaagtaaatacgtgggaaaactgaggctgagataaagtaatgacttaatggcacagtaagagaccaagttacgatttcaacccagaaatacttgattccaaagccccaactctactgcatgatatactaagcactattatatctctacttctgagtagaatgctccaagattttgctgggacaggaagggtataaatagtacatacatacatacacttccatattattttggtgacaataaaattacgtcataaaaatgt

SEQ ID NO: 341957 - DNA, 472 bp, Homo sapiens
agagtggttagctttcttttcaagaatgtatttccatacttcttttgggtttctagaaaagaaggtacatttcctggatttgagctttagccacagagagtatctgggaccagaaacacaggatctctattaaaagaacacgaaacgtcacttccacacgacctgcaatttctagaatggagagaaagcttcagtaaacattcagtaatagcatgcaacaaaggtgggaaaactgaggctgagataaagtaatgacttaatggcacagtaagagaccaagttacgatttcaacccagaaatacttgattccaaagccccaactctactgcatgatatactaagcactattatatctctacttctgagtagaatgctccaagattttgctgggacaggaagggtataaatagtacatacatacatacacttccatattattttggtgacaataaaattacgtcataaaaatgt

SEQ ID NO: 341958 - DNA, 412 bp, Homo sapiens
agagtggttagctttcttttcaagaatgtatttccatacttcttttgggtttctagaaaagaaggtacatttcctggatttgagttgctagacagagcctgggacttgactagcgcctttcccgtgaattgactcatctggtgaattgtggcatcttcatcctcaggaaggtgccaggacatggagtgaactttagccacagagagtatctgggaccagaaacacaggatctctattaaaagaacacgaaacgtcacttccacacgacctgcaatttctagaatggagagaaagcttcagtaaacattcagtaatagcatgcaacaaaggcaagtaaaggctgtgatagaacactggcatggtgttcttaaaagaataatattatttgtcctgtatttagccaacataagga

SEQ ID NO: 341959 - DNA, 1007 bp, Homo sapiens
cagagggccttcgctgctgcggcccctggggactccttcgcgacggcttcccggggagggggctgaggcctggcagcgaggaccctgacaccccttcgggagaggagtggctgctaggccgctcgcttgctcctggaaagatttggggtttgagagctcttggccaggaggctcgcgctggccgaggcccgagagctgtccccgcgggacgggactagcgagggccggggagatggagcgcaggcggcgtctgggttcgaagcactttccggctgaaccacctgctgctgaggctgagccctgagaggcggttcgtggcccccaaaccggggaaggggcgaagctttgggcatctgtcccatgcaagggtcccaacatctgaatctcacctcactcgtctcccacctgtcacgaatggccagcgccaaagtgataaatatgtaataggaatgtcttcccgaggctgtgctggagacttccctggccgcacagtgaccgttcagagcccacgataagcaagccgaaacccggtttggcgcagaggcgcgcaaggagagaggtctgtcctttgactctgtgagttgggcagcctaacatggttattgttaattgacggtaaagtatctcgaggtccgttagtctatgtttttgttcttatttatcactgtgtatgtctttgggcttctcttcactttgtatggcagattattttgaaaaagtttacccttgtgtttgtctcagctgttttaaaggggatctgccgtctagggagttccccttgaaaatcggacctttgagcagtgacttctgttttgccacctgggagcaacgtgtaaggaagtggacttaagcttctctctccccaggggaagaagcacagtggaaaaatcacaagtgacttctggcctgaaaagcccttaatttacctgcttctacaattactgccctttctgacccagttctttccctgcagatataggtgaggttcaaagaagcagatggtggag

SEQ ID NO: 341960 - DNA, 967 bp, Homo sapiens
atttattaagcagacattatttgctgtaatacaatgctaggagctgcaaataccagtgcaaaaaagatcagctctccataccagtgtatataagacaattacagatgtttgtaaaagctatgacagaattaaagcaagattataagaaagttagacttttggggatagcagtctcaatgaaggctctctaaagggggaatatttgaattgagaggtattggacttgagatttaaggaacaaaatgagttggccgtggaggagctgggggaaaattccaagcatagggaggagcaggtgttgagggcaaaagaagaaaagggcattttgtcacagaaaagaggccagtgtggctggaatatggtatgtatcaatggtatttttaatagtgaattttgtaacttttatttctaaatgccagaatggataaaaataataattgacatttatttagtgctctctaggcttggtacagccagtgcagtctctcgacaactctcttaggagcttggtcatctgcattctgtagatgacggaagtgagggctggggaagttgggaaactcacccaaggcaacctggctaacaatggtatagtcaggaattgggaagtgcatttttgaggattataacttttgaatgcagattaactagtgtgtatttgggaaaggttgtaataaatggagagggtgaagtggggatggttgatgagtacaaaaaataggtagaatgaataagatctagtatttgatagtacagcagtgattatagtcaataataatttaattgtacatttaaaaataacgaaaacagtataattggattgttcgtaacacaaagaataaatggttgaggtgacagataccccatttaccctgatgtaatgattataaattatatacctctatcaagatatcccatgtgccccatatgtatgtatatttactatgtacccacaaaaattaaaagt

SEQ ID NO: 341961 - DNA, 339 bp, Homo sapiens
atttattaagcagacattatttgctgtaatacaatgctaggagctgcaaataccagtgcaaaaaagatcagctctccataccagtgtatataagacaattacagatgtttgtaaaagctatgacagaattaaagcaagattataagaaagttagacttttggggatagcagtctcaatgaaggctctctaaagggggaatatttgaattgagaggtattggacttgagatttaaggaacaaaatgagttggccgtggaggagctgggggaaaattccaagcatagggaggagcaggtgctttctgggctggagcgtcgacgcggccgcgaatttagtag

SEQ ID NO: 341962 - DNA, 340 bp, Homo sapiens
gggtttttcctttgaggccctaacacattgggtagtcagagggtatgaagcccttctgtgtcctctgtatgtcctcaagctgggatgagactccggttctccaattctgatctgtagatgagatggaggaatgagatgaccaggcacgtcacggaggcagtgcagggtcagagctgaaactcaggcctctgacctgaaatctcgaccagtttctaacagacctattacatctctgcagcagcctcattctttttaaggtctctccctctcagcacatcactgtggtcaagcctgttcccccacccagcctggtgcctcttccctccacaatctgaccaca

SEQ ID NO: 341963 - DNA, 371 bp, Homo sapiens
ctcggtaagatattgcttcatgcttactccactgaggaggaagctaaggcacggggaggccacacagctaggaagagacggcagagaggattcccaggctttgaactgctgaggtatactatgtgacggtgatgaatgaacacgtggaaagtcgacggcagtgtagcttagtggttgggagcacagacccatttcagaccacctggattcaaattccagctttgccatttgggcaacctactaacctctgcgtctcagttcccttctctgtagaatggagagaacagcagcacttaccttatgggactgccgtgcagatgaaacaagggagaatgtttaaagcccttagcacacaatgggcactgcgtaaa

SEQ ID NO: 341964 - DNA, 778 bp, Homo sapiens
gagtcttgttaagggagatttcatttcttttcctgttcttttaattagtcttacattaagattcttagaagttgtacatcttcttattgctagcagcaagctcggtaagtccaggttacttctaggcggacaggtctgacccaaagggtgctcatcagtgcctccgttgccgccagtagggaggtgataggagcagttctggggtgtggcttaatatctgtactagaaattgggacttacggataacctcgatgagttcacagatgaggcgggcttaacataggattgccagtaaatttggcaatcgaaatgatcctgttataccaagcactgtttagattcatgtgccaaagtgaccagctctgggtttgaaagagggttattgtgggccttctggatggacagaagtcaaatggaacacatgtgagcatgtgttcaatgtctttaaatattgaatagcataatggtggagttaacatgggatcggcccatgctgttggagtctgcatcttgagcaagatggagcaattgagaatggtccaaagaaaagtagtattgtgggcatgagaaaaataagacctatgggaaaattttttaaaaactgaaattgttggccaggtgcggtggctcatgcctgtattcccagcactttgggaggctgaggcgggcagatcacttgagcccagcaatttgagacaagcctgggcaacatggtgaaatcccatctctacaaaaaaaaatactaaaaaatgatgcaagtgtgatggtgcacacctgt

SEQ ID NO: 341965 - DNA, 371 bp, Homo sapiens
tgctccctcctctgcactctgccagcttggaacaggtgccaaggtcaaggaaagcagcatatgccaccgggacctattcctctcattctgctccctcagggagaaccaggtttctggcctttattgtactccacccttttatctcctgggaagtcaccagatgttctgccattggaagaaggggagatattgtctccaaacagaagacaccaatctatctgtttacaatgattcacatccagagaatcaatgaactctaaaatccttggcagactccaactcatggctggaggagctgatggtggaaacaggccgcagacttcagttaaatattaataataatattaaacatttactgtgtgtttattcaa

SEQ ID NO: 341966 - DNA, 271 bp, Homo sapiens
gtaatgatgtataatgtacattattcaggtgatggttacagtaaaagcccagactttatcactatgcagtatatgcatgtaacaaaaccgtacttgtactccttaaaattacgcagtttttttttttaaagaaagcctggaattggttcatggtactctgactattagatcaagtttttttcctatgatgtctcaaatatttatattttcatagtatgatattattctatgatgtgataatataaatatttgatacatcattacgaaaatg

SEQ ID NO: 341967 - DNA, 581 bp, Homo sapiens
gtattttggcaacaatatgttttattgtaaaatagaggggggattgaggaggaaccacaacaggaggatagctacttaaaacagtgaaggacaattatttcaaatatttatgaaattcacttagtggttattcagggccagattctcaccctttatcactctatggggacattatgacatttatccaggatcctgagactaatttaggaaaaggaattcatgttttgtatgagcttttaaaaaattcaaaaactgacattttcttctaaagtgtttctcttttgaaactttcaataatgactttaggtaaaagggttattttttaaattagctattttctttttatgttggtcagaatatgctgtcctctggtccaaacaatatttataggctttgcttttatacctatatatagatatataattgttttttatatatgtataaaacaataaatatatacatataattgttttatatatgcataaaacaatatatatatacacacacatatgtgtaacaatatatgtatgttatacatattattgcatatattatgtatatacacacacacacacatatat

SEQ ID NO: 341968 - DNA, 524 bp, Homo sapiens
gtattttggcaacaatatgttttattgtaaaatagaggggggattgaggaggaaccacaacaggaggatagctacttaaaacagtgaaggacaattatttcaaatatttatgaaattcacttagtggttattcagggccagattctcaccctttatcactctatggggacattatgacatttatccaggatcctgagactaatttaggaaaaggaattcatgttttgtatgagcttttaaaaaattcaaaaactgacattttcttctaaagtgtttctcttttgaaactttcaataatgactttaggtaaaagggttattttttaaattagctattttctttttatgttggtcagaatatgctgtcctctggtccaaacaatatttataggctttgcttttatacctatttgattatatgttttattatgataacataatttcattatgttatttctaacatttttcccacattggtacattagagtactatgctatatgttcccccctttttttaggcgttgg

SEQ ID NO: 341969 - DNA, 334 bp, Homo sapiens
ttaaagcaacaaactcaaaatcaatattgtatttgtcagaattagagggcccacactaaattcatgaatttcctagaaagttttataagaaacagggatttttttccccctgtggtggcaaaagtacaatcaataaataaaagagactgtctttctaagggaaggaaaggaaggtacacaacatttttagcacctactataaattctgtgatagggtactttcaccattattccagtgaatcttctcaagatcacattgaagaaggtattactggtcccatttttatagtgagagtaactgagattcaatcaagttaagtgatttgcctaagaa

SEQ ID NO: 341970 - DNA, 374 bp, Homo sapiens
tggaattgacctacatatggttgcttaggacaaataaaattaaaaattgtaattaaggggtaaagaaaagcaatgagaagtagtcagaatatagtttgttaaaaaatgtattaaataaaatacatatggaacttaaggagcctttaaagcttcacattttgataacttcgtctttggtacgttttctcccatatacatcatgccttacttttcataccatgaatttctacaatatagaacttaactaattctgtccaatattataaaaacatcccacagtttccacctaagaaagagacaaagagtgagcaaaaagtaaaagaaataagaaaaccaatacctctcagggtagattttgtatttcattgtatggg

SEQ ID NO: 341971 - DNA, 232 bp, Homo sapiens
gaagacacgtttttcagtggttgagctgattgttgaacactagtcaagtccacacgcaagtacacagaagcctagtcaggaaaaggtgtgtaatgcaaattttggtgtggaacttggagtctgccttccctccccagaaaaaccccgtagcgggttgtagccccgtaagcgggttgttgccaccgtacgcggggtgttgccaccgtagcgggatgtagccaccgtagcggga

SEQ ID NO: 341972 - DNA, 184 bp, Homo sapiens
ctcggagctagctcttcggtgtgcttcaagcctttagcatcagaatcgctgggcacttggtaaaaatgcagatttctgggatctctctcgaaccttgtgaaggagaatctccgaggctgaacccaggaatctgcattttaacacttcactacaggcaatctttggcccccttggaggtgtgaaa

SEQ ID NO: 341973 - DNA, 227 bp, Homo sapiens
tggtgtgactacagctcactgtagccttgaccttcctggctcaggtggtttctcccctcagcctccccagtagttgggactacaggcacatgccaccacttttttttttttttttttttttttttaattttttgtagagatgggattttgtcatgttgcccaagctggtcttgatttgctgggctcaagtgatcctcctgccttggcctcccaaagtgttgggatta

SEQ ID NO: 341974 - DNA, 126 bp, Homo sapiens
ccccaaatacaggaatggttaaatgctgatgacctactttatgtactatgatgcaaatgcaaatgataatggttactgtgcagcaacatggaagaacttggtgaaagcaggatgtaccacatgact

SEQ ID NO: 341975 - DNA, 138 bp, Homo sapiens
ttttcactaaactagggacttcagggtgttcaccatgcctcagttttctcactagaaaatgggtaatttaatagttcctaccccacagggttatgaagataagtgggttaatacgcataatacatttagaacaatgac

SEQ ID NO: 341976 - DNA, 1243 bp, Homo sapiens
gccggacctgggactgggctggggccctggcggatggagacatgctgcccctgctgctgctgcccctgctgtggggggggtccctgcaggagaagccagtgtacgagctgcaagtgcagaagtcggtgacggtgcaggagggcctgtgcgtccttgtgccctgctccttctcttacccctggagatcctggtattcctctcccccactctacgtctactggttccgggacggggagatcccatactacgctgaggttgtggccacaaacaacccagacagaagagtgaagccagagacccagggccgattccgcctccttggggatgtccagaagaagaactgctccctgagcatcggagatgccagaatggaggacacgggaagctatttcttccgcgtggagagaggaagggatgtaaaatatagctaccaacagaataagctgaacttggaggtgacagccctgatagagaaacccgacatccactttctggagcctctggagtccggccgccccacaaggctgagctgcagccttccaggatcctgtgaagcgggaccacctctcacattctcctggacggggaatgccctcagccccctggaccccgagaccacccgctcctcggagctcaccctcacccccaggcccgaggaccatggcaccaacctcacctgtcagatgaaacgccaaggagctcaggtgaccacggagagaactgtccagctcaatgtctcctatgctccacagaccatcaccatcttcaggaacggcatagccctagagatcctgcaaaacacctcataccttccggtcctggagggccaggctctgcggctgctctgtgatgctcccagcaacccccctgcacacctgagctggttccagggctcccctgccctgaacgccacccccatctccaataccgggatcttggagcttcgtcgagtaaggtctgcagaagaaggaggcttcacctgccgcgctcagcacccgctgggcttcctgcaaatttttctgaatctctcagtttactccctcccacagttgctgggcccctcctgctcctgggaggctgagggtctgcactgcagatgctcctttcgagcccggccggccccctccctgtgctggcggcttgaggagaagccgctggaggggaacagcagccagggctcattcaaggtcaactccagctcagctgggccctgggccaacagctccctgatcctccacggggg

SEQ ID NO: 341977 - DNA, 891 bp, Homo sapiens
gggatgtccagaagaagaactgctccctgagcatcggagatgccagaatggaggacacgggaagctatttcttccgcgtggagagaggaagggatgtaaaatatagctaccaacagaataagctgaacttggaggtgacaggtatggcagggaccccaggagaggaccctgggacgtggagacccccgtatgagaacagggacaggagttgggcaggggcggctggaggaggtgtaggacttggggcaggtcggggcctgaggcctggccactctcggggtcacaccttacgtcctcaagcccctggggcccaggtatctccctgtctcctcctcagccctgatagagaaacccgacatccactttctggagcctctggagtccggccgccccacaaggctgagctgcagccttccaggatcctgtgaagcgggaccacctctcacattctcctggacggggaatgccctcagccccctggaccccgagaccacccgctcctcggagctcaccctcacccccaggcccgaggaccatggcaccaacctcacctgtcagatgaaacgccaaggagctcaggtgaccacggagagaactgtccagctcaatgtctcctgtgagtggtgctggggacacagctgagtcctcaagggcagtgggagtgaggggtgtgtgtgtgtgtgtgtgtgtgtgtgtgtgtgtaaggaagacagagagaaacaaaacaataacttgagaaaccttgtgtgtggatctaagccttgggatctgcggggagtgagacaggacagccttccccgcttggtgggtttctgtggctcctctttgggtacctcctgggcccatgcccatctcactcctcactgctgaagccaagtttatatcttttta

SEQ ID NO: 341978 - DNA, 794 bp, Homo sapiens
gggagggggatggggtgcgcgtagaggctccgcggcccgggttggacggaggagcccaggagccaccgcagccgccgcacgcccagagctccgagcttcgctgccagcccaggacaccggggccctgccgtgggccgaggggagccgggcggcgggagaggagccccggagccccggagccccggagccccgccgggcgccagccgagagggcgttttccccgcccccggagactcgcccgcccggcccgccccgccccgagcgcggggagttcacctccgcccgtcacctcctccccttgtcgcctaggtccacccgagccccctcccccgggccgcccccgagcacgaagttggcgggagcctataaaagctggtgccggcgcgacccgcggacacacagtgcaggcgcccaagccgccgccgccagatcggtgccgattcctgccctgccccgaccgccagcgcgaccatgtcccatcactgggggtacggcaaacacaacggacctgagcactggcataaggacttccccattgccaagggagagcgccagtcccctctgagacatccgacgacgtcgagggcaagacgcacgctactgagcctggcgcccgagcgcggctccggggctccaggggctacacggggctcctctgaccgccgcccaggctacccctcaggcccatcggacagggcacccggtagtgcctgggcatggacagacagaagctgcggagcatctgggcgtgcggcggctgacggtggatcctgggctcacgtccctccccgctc

SEQ ID NO: 341979 - DNA, 1904 bp, Homo sapiens
gggagggggatggggtgcgcgtagaggctccgcggcccgggttggacggaggagcccaggagccaccgcagccgccgcacgcccagagctccgagcttcgctgccagcccaggacaccggggccctgccgtgggccgaggggagccgggcggcgggagaggagccccggagccccggagccccggagccccgccgggcgccagccgagagggcgttttccccgcccccggagactcgcccgcccggcccgccccgccccgagcgcggggagttcacctccgcccgtcacctcctccccttgtcgcctaggtccacccgagccccctcccccgggccgcccccgagcacgaagttggcgggagcctataaaagctggtgccggcgcgacccgcggacacacagtgcaggcgcccaagccgccgccgccagatcggtgccgattcctgccctgccccgaccgccagcgcgaccatgtcccatcactgggggtacggcaaacacaacggacctgagcactggcataaggacttccccattgccaagggagagcgccagtcccctgttgacatcgacactcatacagccaagtatgacccttccctgaagcccctgtctgtttcctatgatcaagcaacttccctgaggatcctcaacaatggtcatgctttcaacgtggagtttgatgactctcaggacaaagcagtgctcaagggaggacccctggatggcacttacagattgattcagtttcactttcactggggttcacttgatggacaaggttcagagcatactgtggataattttgggaaagctgtgcagcaacctgatggactggccgttctaggtatttttttgaaggttggcagcgctaaaccgggccttcagaaagttgttgatgtgctggattccattaaaacaaagggcaagagtgctgacttcactaacttcgatcctcgtggcctccttcctgaatccctggattactggacctacccaggctcactgaccacccctcctcttctggaatgtgtgacctggattgtgctcaaggaacccatcagcgtcagcagcgagcaggtgttgaaattccgtaaacttaacttcaatggggagggtgaacccgaagaactgatggtggacaactggcgcccagctcagccactgaagaacaggcaaatcaaagcttccttcaaataagatggtcccatagtctgtatccaaataatgaatcttcgggtgtttccctttagctaagcacagatctaccttggtgatttggaccctggttgctttgtgtctagttttctagacccttcatctcttacttgatagacttactaataaaatgtgaagactagaccaattgtcatgcttgacacaactgctgtggctggttggtgctttgtttatggtagtagtttttctgtaacacagaatataggataagaaataagaataaagtaccttgactttgttcacagcatgtagggtgatgagcactcacaattgttgactaaaatgctgcttttaaaacataggaaagtagaatggttgagtgcaaatccatagcacaagataaattgagctagttaaggcaaatcaggtaaaatagtcatgattctatgtaatgtaaaccagaaaaaataaatgttcatgatttcaagatgttatattaaagaaaaactttaaaaattattatatatttatagcaaagttatcttaaatatgaattctgttgtaatttaatgacttttgaattacagagatataaatgaagtattatctgtaaaaattgttataattagagttgtgatacagagtatatttccattcagacaatatatcataacttaataaatattgtattttagatatattctctaataaaattcagaattcta

SEQ ID NO: 341980 - DNA, 1916 bp, Homo sapiens
gggagggggatggggtgcgcgtagaggctccgcggcccgggttggacggaggagcccaggagccaccgcagccgccgcacgcccagagctccgagcttcgctgccagcccaggacaccggggccctgccgtgggccgaggggagccgggcggcgggagaggagccccggagccccggagccccggagccccgccgggcgccagccgagagggcgttttccccgcccccggagactcgcccgcccggcccgccccgccccgagcgcggggagttcacctccgcccgtcacctcctccccttgtcgcctaggtccacccgagccccctcccccgggccgcccccgagcacgaagttggcgggagcctataaaagctggtgccggcgcgacccgcggacacacagtgcaggcgcccaagccgccgccgccagatcggtgccgattcctgccctgccccgaccgccagcgcgaccatgtcccatcactgggggtacggcaaacacaacggacctgagcactggcataaggacttccccattgccaagggagagcgccagtcccctgttgacatcgacactcatacagccaagtatgacccttccctgaagcccctgtctgtttcctatgatcaagcaacttccctgaggatcctcaacaatggtcatgctttcaacgtggagtttgatgactctcaggacaaagcagtgctcaagggaggacccctggatggcacttacagattgattcagtttcactttcactggggttcacttgatggacaaggttcagagcatactgtggataaaaagaaatatgctgcagaacttcacttggttcactggaacaccaaatatggggattttgggaaagctgtgcagcaacctgatggactggccgttctaggtatttttttgaaggttggcagcgctaaaccgggccttcagaaagttgttgatgtgctggattccattaaaacaaagcttcctgaatccctggattactggacctacccaggctcactgaccacccctcctcttctggaatgtgtgacctggattgtgctcaaggaacccatcagcgtcagcagcgagcaggtgttgaaattccgtaaacttaacttcaatggggagggtgaacccgaagaactgatggtggacaactggcgcccagctcagccactgaagaacaggcaaatcaaagcttccttcaaataagatggtcccatagtctgtatccaaataatgaatcttcgggtgtttccctttagctaagcacagatctaccttggtgatttggaccctggttgctttgtgtctagttttctagacccttcatctcttacttgatagacttactaataaaatgtgaagactagaccaattgtcatgcttgacacaactgctgtggctggttggtgctttgtttatggtagtagtttttctgtaacacagaatataggataagaaataagaataaagtaccttgactttgttcacagcatgtagggtgatgagcactcacaattgttgactaaaatgctgcttttaaaacataggaaagtagaatggttgagtgcaaatccatagcacaagataaattgagctagttaaggcaaatcaggtaaaatagtcatgattctatgtaatgtaaaccagaaaaaataaatgttcatgatttcaagatgttatattaaagaaaaactttaaaaattattatatatttatagcaaagttatcttaaatatgaattctgttgtaatttaatgacttttgaattacagagatataaatgaagtattatctgtaaaaattgttataattagagttgtgatacagagtatatttccattcagacaatatatcataacttaataaatattgtattttagatatattctctaataaaattcagaattcta

SEQ ID NO: 341981 - DNA, 1118 bp, Homo sapiens
  misc_feature (42)..(43): n is a, c, g, or t
  misc_feature (54)..(54): n is a, c, g, or t
gggattgtcggcgaaagctgtgcaacagcctgtagtgttacnntggccgtcgcntatgatcattgtcctgtgaaggttggcagcgctaaaccgggccttcagaaagttgttgatgtgctggattccattaaaacaaagggcaagagtgctgacttcactaacttcgatcctcgtggcctccttcctgaatccctggattactggacctacccaggctcactgaccacccctcctcttctggaatgtgtgacctggattgtgctcaaggaacccatcagcgtcagcagcgagcaggtgttgaaattccgtaaacttaacttcaatggggagggtgaacccgaagaactgatggtggacaactggcgcccagctcagccactgaagaacaggcaaatcaaagcttccttcaaataagatggtcccatagtctgtatccaaataatgaatcttcgggtgtttccctttagctaagcacagatctaccttggtgatttggaccctggttgctttgtgtctagttttctagacccttcatctcttacttgatagacttactaataaaatgtgaagactagaccaattgtcatgcttgacacaactgctgtggctggttggtgctttgtttatggtagtagtttttctgtaacacagaatataggataagaaataagaataaagtaccttgactttgttcacagcatgtagggtgatgagcactcacaattgttgactaaaatgctgcttttaaaacataggaaagtagaatggttgagtgcaaatccatagcacaagataaattgagctagttaaggcaaatcaggtaaaatagtcatgattctatgtaatgtaaaccagaaaaaataaatgttcatgatttcaagatgttatattaaagaaaaactttaaaaattattatatatttatagcaaagttatcttaaatatgaattctgttgtaatttaatgacttttgaattacagagatataaatgaagtattatctgtaaaaattgttataattagagttgtgatacagagtatatttccattcagacaatatatcataacttaataaatattgtattttagatatattctctaataaaattcagaattcta

SEQ ID NO: 341982 - DNA, 1057 bp, Homo sapiens
  misc_feature (4)..(4): n is a, c, g, or t
  misc_feature (6)..(6): n is a, c, g, or t
gctngnatcatgattgactggccgtctcttttaaaagtgaggtgtcgtaccggcttcagaattatgtcgatctaacaggcaagagtgctgacttcactaacttcgatcctcgtggcctccttcctgaatccctggattactggacctacccaggctcactgaccacccctcctcttctggaatgtgtgacctggattgtgctcaaggaacccatcagcgtcagcagcgagcaggtgttgaaattccgtaaacttaacttcaatggggagggtgaacccgaagaactgatggtggacaactggcgcccagctcagccactgaagaacaggcaaatcaaagcttccttcaaataagatggtcccatagtctgtatccaaataatgaatcttcgggtgtttccctttagctaagcacagatctaccttggtgatttggaccctggttgctttgtgtctagttttctagacccttcatctcttacttgatagacttactaataaaatgtgaagactagaccaattgtcatgcttgacacaactgctgtggctggttggtgctttgtttatggtagtagtttttctgtaacacagaatataggataagaaataagaataaagtaccttgactttgttcacagcatgtagggtgatgagcactcacaattgttgactaaaatgctgcttttaaaacataggaaagtagaatggttgagtgcaaatccatagcacaagataaattgagctagttaaggcaaatcaggtaaaatagtcatgattctatgtaatgtaaaccagaaaaaataaatgttcatgatttcaagatgttatattaaagaaaaactttaaaaattattatatatttatagcaaagttatcttaaatatgaattctgttgtaatttaatgacttttgaattacagagatataaatgaagtattatctgtaaaaattgttataattagagttgtgatacagagtatatttccattcagacaatatatcataacttaataaatattgtattttagatatattctctaataaaattcagaattcta

SEQ ID NO: 341983 - DNA, 1129 bp, Homo sapiens
actacgacttgccacatattttcaagttgaatgtcttctgttaatttctctttattttgtttgccagtgaatatagaacctcttttttaaaaacttcctcctactctgtcaatgtgatagtttgaagctgcgtatttgccttgttctagggcaagagtgctgacttcactaacttcgatcctcgtggcctccttcctgaatccctggattactggacctacccaggctcactgaccacccctcctcttctggaatgtgtgacctggattgtgctcaaggaacccatcagcgtcagcagcgagcaggtgttgaaattccgtaaacttaacttcaatggggagggtgaacccgaagaactgatggtggacaactggcgcccagctcagccactgaagaacaggcaaatcaaagcttccttcaaataagatggtcccatagtctgtatccaaataatgaatcttcgggtgtttccctttagctaagcacagatctaccttggtgatttggaccctggttgctttgtgtctagttttctagacccttcatctcttacttgatagacttactaataaaatgtgaagactagaccaattgtcatgcttgacacaactgctgtggctggttggtgctttgtttatggtagtagtttttctgtaacacagaatataggataagaaataagaataaagtaccttgactttgttcacagcatgtagggtgatgagcactcacaattgttgactaaaatgctgcttttaaaacataggaaagtagaatggttgagtgcaaatccatagcacaagataaattgagctagttaaggcaaatcaggtaaaatagtcatgattctatgtaatgtaaaccagaaaaaataaatgttcatgatttcaagatgttatattaaagaaaaactttaaaaattattatatatttatagcaaagttatcttaaatatgaattctgttgtaatttaatgacttttgaattacagagatataaatgaagtattatctgtaaaaattgttataattagagttgtgatacagagtatatttccattcagacaatatatcataacttaataaatattgtattttagatatattctctaataaaattcagaattcta

SEQ ID NO: 341984 - DNA, 1413 bp, Homo sapiens
gttcagttatatgtttgggattttttaggtagtgggtgttgagcttgaacgctttcttaattggtggctgcttttaggcctactatgggtgttaaattttttactctctctacaaggttttttcctagtgtccaaagagctgttcctctttggactaacagttaaatttacaaggggatttagagggttctgtgggcaaatttaaagttgaactaagattctatcttggacaaccagctatcaccaggctcggtaggtttgtcgcctctacctataaatcttcccactattttgctacatagacgggtgtgctcttttagctgttcttaggtagctcgtctggtttcgggggtcttagctttggctctccttgcaaagttatttctagttaattcattatgcagaaggtataggggttagtccttgctatattatgcttggttataatttttcacggcacgagattcggcacgagcttcctgaatccctggattactggacctacccaggctcactgaccacccctcctcttctggaatgtgtgacctggattgtgctcaaggaacccatcagcgtcagcagcgagcaggtgttgaaattccgtaaacttaacttcaatggggagggtgaacccgaagaactgatggtggacaactggcgcccagctcagccactgaagaacaggcaaatcaaagcttccttcaaataagatggtcccatagtctgtatccaaataatgaatcttcgggtgtttccctttagctaagcacagatctaccttggtgatttggaccctggttgctttgtgtctagttttctagacccttcatctcttacttgatagacttactaataaaatgtgaagactagaccaattgtcatgcttgacacaactgctgtggctggttggtgctttgtttatggtagtagtttttctgtaacacagaatataggataagaaataagaataaagtaccttgactttgttcacagcatgtagggtgatgagcactcacaattgttgactaaaatgctgcttttaaaacataggaaagtagaatggttgagtgcaaatccatagcacaagataaattgagctagttaaggcaaatcaggtaaaatagtcatgattctatgtaatgtaaaccagaaaaaataaatgttcatgatttcaagatgttatattaaagaaaaactttaaaaattattatatatttatagcaaagttatcttaaatatgaattctgttgtaatttaatgacttttgaattacagagatataaatgaagtattatctgtaaaaattgttataattagagttgtgatacagagtatatttccattcagacaatatatcataacttaataaatattgtattttagatatattctctaataaaattcagaattcta

SEQ ID NO: 341985 - DNA, 1362 bp, Homo sapiens
gggagggggatggggtgcgcgtagaggctccgcggcccgggttggacggaggagcccaggagccaccgcagccgccgcacgcccagagctccgagcttcgctgccagcccaggacaccggggccctgccgtgggccgaggggagccgggcggcgggagaggagccccggagccccggagccccggagccccgccgggcgccagccgagagggcgttttccccgcccccggagactcgcccgcccggcccgccccgccccgagcgcggggagttcacctccgcccgtcacctcctccccttgtcgcctaggtccacccgagccccctcccccgggccgcccccgagcacgaagttggcgggagcctataaaagctggtgccggcgcgacccgcggacacacagtgcaggcgcccaagccgccgccgccagatcggtgccgattcctgccctgccccgaccgccagcgcgaccatgtcccatcactgggggtacggcaaacacaacggacctgagcactggcataaggacttccccattgccaagggagagcgccagtcccctgttgacatcgacactcatacagccaagtatgacccttccctgaagcccctgtctgtttcctatgatcaagcaacttccctgaggatcctcaacaatggtcatgctttcaacgtggagtttgatgactctcaggacaaagcaggtcagtgtttagaaaataacttgtgtcttttagccagtagctgttttccgagcttaatggaaggagccaggaacagtggcaggaaccctcttaataatacagtttgtctcaggactcaaggatgccaccctgatcattttcattaggtctcagattctgagaagtaggctaattagtttgaagtgtcccggggccgtttcttccctgtaaaacccttggcttctatgaaggccattgaataactgcgatatgcctgtgaaaaatcacaaaaggtgcaaagtcccctcgcaataaagatcagtcacgatgagatttgcaccaattgaacttttaagattgtaaaatattttgtcttgcagagctgatgcatatccattaaaaagtatatcttagtgagccttatcttcaagttagcagcgagaagagtaacaaaaacgtgccaatttaaaatactgaaattctgggaaaatgttttacttatgagtatttcttagtattgggctagtgtgataaagatggcagcatgttttgatatctactcagaaattcatttcacaaacgaagatgttttagagttggtgaacatacctggcccattactgacaaaaccaattaccgtatttattggtaatagagctgtttacaggatgctcactgta

SEQ ID NO: 341986 - DNA, 1545 bp, Homo sapiens
gggagggggatggggtgcgcgtagaggctccgcggcccgggttggacggaggagcccaggagccaccgcagccgccgcacgcccagagctccgagcttcgctgccagcccaggacaccggggccctgccgtgggccgaggggagccgggcggcgggagaggagccccggagccccggagccccggagccccgccgggcgccagccgagagggcgttttccccgcccccggagactcgcccgcccggcccgccccgccccgagcgcggggagttcacctccgcccgtcacctcctccccttgtcgcctaggtccacccgagccccctcccccgggccgcccccgagcacgaagttggcgggagcctataaaagctggtgccggcgcgacccgcggacacacagtgcaggcgcccaagccgccgccgccagatcggtgccgattcctgccctgccccgaccgccagcgcgaccatgtcccatcactgggggtacggcaaacacaacggacctgagcactggcataaggacttccccattgccaagggagagcgccagtcccctgttgacatcgacactcatacagccaagtatgacccttccctgaagcccctgtctgtttcctatgatcaagcaacttccctgaggatcctcaacaatggtcatgctttcaacgtggagtttgatgactctcaggacaaagcaggtcagtgtttagaaaataacttgtgtcttttagccagtagctgttttccgagcttaatggaaggagccaggaacagtggcaggaaccctcttaataatacagtttgtctcaggactcaaggatgccaccctgatcattttcattaggtctcagattctgagaagtaggctaattagtttgaagtgtcccggggccgtttcttccctgtaaaacccttggcttctatgaaggccattgaataactgcgatatgcctgtgaaaaatcacaaaaggtgcaaagtcccctcgcaataaagatcagtcacgatgagatttgcaccaattgaacttttaagattgtaaaatattttgtcttgcagagctgatgcatatccattaaaaagtatatcttagtgagccttatcttcaagttagcagcgagaagagtaacaaaaacgtgccaatttaaaatactgaaattctgggaaaatgttttacttatgagtatttcttagtattgggctagtgtgataaagatggcagcatgttttgatatctactcagaaattcatttcacaaacgaagatgttttagagttggtgaacatacctggcccattactgacaaaaccaattaccgtatttattggtaatagagctgtttacaggatgctcactgtaaaaaaaaaaaaaaaagaaagagaaagaagaaaaaaaatcctgcttttttttttttatctctctctcttttgaaacaagagaacaatcccattcacacatagtagctgccttctttgctaagcagttaatttaattgccagtgccctattttcctgagtgctttcctctgaaggtcatagaatg

SEQ ID NO: 341987 - DNA, 1958 bp, Homo sapiens
gggagggggatggggtgcgcgtagaggctccgcggcccgggttggacggaggagcccaggagccaccgcagccgccgcacgcccagagctccgagcttcgctgccagcccaggacaccggggccctgccgtgggccgaggggagccgggcggcgggagaggagccccggagccccggagccccggagccccgccgggcgccagccgagagggcgttttccccgcccccggagactcgcccgcccggcccgccccgccccgagcgcggggagttcacctccgcccgtcacctcctccccttgtcgcctaggtccacccgagccccctcccccgggccgcccccgagcacgaagttggcgggagcctataaaagctggtgccggcgcgacccgcggacacacagtgcaggcgcccaagccgccgccgccagatcggtgccgattcctgccctgccccgaccgccagcgcgaccatgtcccatcactgggggtacggcaaacacaacggacctgagcactggcataaggacttccccattgccaagggagagcgccagtcccctgttgacatcgacactcatacagccaagtatgacccttccctgaagcccctgtctgtttcctatgatcaagcaacttccctgaggatcctcaacaatggtcatgctttcaacgtggagtttgatgactctcaggacaaagcagtgctcaagggaggacccctggatggcacttacagattgattcagtttcactttcactggggttcacttgatggacaaggttcagagcatactgtggataaaaagaaatatgctgcagaacttcacttggttcactggaacaccaaatatggggattttgggaaagctgtgcagcaacctgatggactggccgttctaggtatttttttgaaggttggcagcgctaaaccgggccttcagaaagttgttgatgtgctggattccattaaaacaaagggcaagagtgctgacttcactaacttcgatcctcgtggcctccttcctgaatccctggattactggacctacccaggctcactgaccacccctcctcttctggaatgtgtgacctggattgtgctcaaggaacccatcagcgtcagcagcgagcaggtgttgaaattccgtaaacttaacttcaatggggagggtgaacccgaagaactgatggtggacaactggcgcccagctcagccactgaagaacaggcaaatcaaagcttccttcaaataagatggtcccatagtctgtatccaaataatgaatcttcgggtgtttccctttagctaagcacagatctaccttggtgatttggaccctggttgctttgtgtctagttttctagacccttcatctcttacttgatagacttactaataaaatgtgaagactagaccaattgtcatgcttgacacaactgctgtggctggttggtgctttgtttatggtagtagtttttctgtaacacagaatataggataagaaataagaataaagtaccttgactttgttcacagcatgtagggtgatgagcactcacaattgttgactaaaatgctgcttttaaaacataggaaagtagaatggttgagtgcaaatccatagcacaagataaattgagctagttaaggcaaatcaggtaaaatagtcatgattctatgtaatgtaaaccagaaaaaataaatgttcatgatttcaagatgttatattaaagaaaaactttaaaaattattatatatttatagcaaagttatcttaaatatgaattctgttgtaatttaatgacttttgaattacagagatataaatgaagtattatctgtaaaaattgttataattagagttgtgatacagagtatatttccattcagacaatatatcataacttaataaatattgtattttagatatattctctaataaaattcagaattcta

SEQ ID NO: 341988 - DNA, 786 bp, Homo sapiens
gggagggggatggggtgcgcgtagaggctccgcggcccgggttggacggaggagcccaggagccaccgcagccgccgcacgcccagagctccgagcttcgctgccagcccaggacaccggggccctgccgtgggccgaggggagccgggcggcgggagaggagccccggagccccggagccccggagccccgccgggcgccagccgagagggcgttttccccgcccccggagactcgcccgcccggcccgccccgccccgagcgcggggagttcacctccgcccgtcacctcctccccttgtcgcctaggtccacccgagccccctcccccgggccgcccccgagcacgaagttggcgggagcctataaaagctggtgccggcgcgacccgcggacacacagtgcaggcgcccaagccgccgccgccagatcggtgccgattcctgccctgccccgaccgccagcgcgaccatgtcccatcactgggggtacggcaaacacaacggacctgagcactggcataaggacttccccattgccaagggagagcgccagtcccctgttgacatcgacactcatacagccaagtatgacccttccctgaagcccctgtctgtttcctatgcattccaaggcaatctctggcggctcctctccccccgcacggttacccctctggcaccacggacatgggcacccagttgtcactgagcacataggcagtcgaagcaatcggagctctgggcgtgtcgcacgtctccggtggatcctgggctcctccgactc

SEQ ID NO: 341989 - DNA, 2189 bp, Homo sapiens
gggagggggatggggtgcgcgtagaggctccgcggcccgggttggacggaggagcccaggagccaccgcagccgccgcacgcccagagctccgagcttcgctgccagcccaggacaccggggccctgccgtgggccgaggggagccgggcggcgggagaggagccccggagccccggagccccggagccccgccgggcgccagccgagagggcgttttccccgcccccggagactcgcccgcccggcccgccccgccccgagcgcggggagttcacctccgcccgtcacctcctccccttgtcgcctaggtccacccgagccccctcccccgggccgcccccgagcacgaagttggcgggagcctataaaagctggtgccggcgcgacccgcggacacacagtgcaggcgcccaagccgccgccgccagatcggtgccgattcctgccctgccccgaccgccagcgcgaccatgtcccatcactgggggtacggcaaacacaacggacctgagcactggcataaggacttccccattgccaagggagagcgccagtcccctgttgacatcgacactcatacagccaagtatgacccttccctgaagcccctgtctgtttcctatgatcaagcaacttccctgaggatcctcaacaatggtcatgctttcaacgtggagtttgatgactctcaggacaaagcagtgctcaagggaggacccctggatggcacttacagattgattcagtttcactttcactggggttcacttgatggacaaggttcagagcatactgtggataaaaagaaatatgctgcagaacttcacttggttcactggaacaccaaatatggggattttgggaaagctgtgcagcaacctgatggactggccgttctaggtatttttttgaaggttggcagcgctaaaccgggccttcagaaagttgttgatgtgctggattccattaaaacaaagggcaagagtgctgacttcactaacttcgatcctcgtggcctccttcctgaatccctggattactggacctacccaggctcactgaccacccctcctcttctggaatgtgtgacctggattgtgctcaaggaacccatcagcgtcagcagcgagcaggtgttgaaattccgtaaacttaacttcaatggggagggtgaacccgaagaactgatggtggacaactggcgcccagctcagccactgaagaacaggcaaatcaaagcttccttcaaataagatggtcccatagtctgtatccaaataatgaatcttcgggtgtttccctttagctaagcacagatctaccttggtgatttggaccctggttgctttgtgtctagttttctagacccttcatctcttacttgatagacttactaataaaatgtgaagactagaccaattgtcatgcttgacacaactgctgtggctggttggtgctttgtttatggtagtagtttttctgtaacacagaatataggataagaaataagaataaagtaccttgactttgttcacagcatgtagggtgatgagcactcacaattgttgactaaaatgctgcttttaaaacataggaaagtagaatggttgagtgcaaatccatagcacaagataaattgagctagttaaggcaaatcaggtaaaatagtcatgattctatgtaatgtaaaccagaaaaaataaatgttcatgatttcaagatgttatattaaagaaaaactttaaaaattattatatatttatagcaaagttatcttaaatatgaattctgttgtaatttaatgacttttgaattacagagatataaatgaagtattatctgtaaaaattgttataattagagttgtgatacagagtatatttccattcagacaatatatcataacttaataaatattgtattttagatatattctctaataaaattcagaattctaaaaaaaaaaagcaaactataacaagcaaaaaggcagacactgaagctcacaaactccaactaacatatgccttcttagttggcagacatgcttgcaaaactcctgatggctttgatatttaaaaaaaaccctagagaggggtttgtttacctccggtcaaattttgcacgtcacagacaccggattttggcacatggctaccccccgggggaccggcaacatgttgtagat

SEQ ID NO: 341990 - DNA, 1439 bp, Homo sapiens
acttcggccgagcgacgggacagggttttaagtgacaaagaagggcgagtggcttctctgggccgggttcgtactccagcacagcgcccttctaacgggcgggaggaaggccgctgctcgcagggctaggtggagacacacttcccagatcaccgcaggcgggttttacccggagagctctgggccgttcggcctccctgccgggtggcttcttacagattgattcagtttcactttcactggggttcacttgatggacaaggttcagagcatactgtggataaaaagaaatatgctgcagaacttcacttggttcactggaacaccaaatatggggattttgggaaagctgtgcagcaacctgatggactggccgttctaggtatttttttgaaggttggcagcgctaaaccgggccttcagaaagttgttgatgtgctggattccattaaaacaaagggcaagagtgctgacttcactaacttcgatcctcgtggcctccttcctgaatccctggattactggacctacccaggctcactgaccacccctcctcttctggaatgtgtgacctggattgtgctcaaggaacccatcagcgtcagcagcgagcaggtgttgaaattccgtaaacttaacttcaatggggagggtgaacccgaagaactgatggtggacaactggcgcccagctcagccactgaagaacaggcaaatcaaagcttccttcaaataagatggtcccatagtctgtatccaaataatgaatcttcgggtgtttccctttagctaagcacagatctaccttggtgatttggaccctggttgctttgtgtctagttttctagacccttcatctcttacttgatagacttactaataaaatgtgaagactagaccaattgtcatgcttgacacaactgctgtggctggttggtgctttgtttatggtagtagtttttctgtaacacagaatataggataagaaataagaataaagtaccttgactttgttcacagcatgtagggtgatgagcactcacaattgttgactaaaatgctgcttttaaaacataggaaagtagaatggttgagtgcaaatccatagcacaagataaattgagctagttaaggcaaatcaggtaaaatagtcatgattctatgtaatgtaaaccagaaaaaataaatgttcatgatttcaagatgttatattaaagaaaaactttaaaaattattatatatttatagcaaagttatcttaaatatgaattctgttgtaatttaatgacttttgaattacagagatataaatgaagtattatctgtaaaaattgttataattagagttgtgatacagagtatatttccattcagacaatatatcataacttaataaatattgtattttagatatattctctaataaaattcagaattcta

SEQ ID NO: 341991 - DNA, 1100 bp, Homo sapiens
  misc_feature (4)..(4): n is a, c, g, or t
  misc_feature (6)..(6): n is a, c, g, or t
gctngnatcatgattgactggccgtttaataaacactgcgtgaagggttgggcatacgcgtaaatccaggggacttcagagaaagttgtggatgtgctggcttccaattcaaaacggacaggcaagagtgctgacttcactaacttcgatcctcgtggcctccttcctgaatccctggattactggacctacccaggctcactgaccacccctcctcttctggaatgtgtgacctggattgtgctcaaggaacccatcagcgtcagcagcgagcaggtgttgaaattccgtaaacttaacttcaatggggagggtgaacccgaagaactgatggtggacaactggcgcccagctcagccactgaagaacaggcaaatcaaagcttccttcaaataagatggtcccatagtctgtatccaaataatgaatcttcgggtgtttccctttagctaagcacagatctaccttggtgatttggaccctggttgctttgtgtctagttttctagacccttcatctcttacttgatagacttactaataaaatgtgaagactagaccaattgtcatgcttgacacaactgctgtggctggttggtgctttgtttatggtagtagtttttctgtaacacagaatataggataagaaataagaataaagtaccttgactttgttcacagcatgtagggtgatgagcactcacaattgttgactaaaatgctgcttttaaaacataggaaagtagaatggttgagtgcaaatccatagcacaagataaattgagctagttaaggcaaatcaggtaaaatagtcatgattctatgtaatgtaaaccagaaaaaataaatgttcatgatttcaagatgttatattaaagaaaaactttaaaaattattatatatttatagcaaagttatcttaaatatgaattctgttgtaatttaatgacttttgaattacagagatataaatgaagtattatctgtaaaaattgttataattagagttgtgatacagagtatatttccattcagacaatatatcataacttaataaatattgtattttagatatattctctaataaaattcagaattcta

SEQ ID NO: 341992 - DNA, 1027 bp, Homo sapiens
  misc_feature (42)..(42): n is a, c, g, or t
  misc_feature (46)..(47): n is a, c, g, or t
tgattctagagtatccccggtcatcttgctacacaattaaancaannggcaagagtgctgacttcactaacttcgatcctcgtggcctccttcctgaatccctggattactggacctacccaggctcactgaccacccctcctcttctggaatgtgtgacctggattgtgctcaaggaacccatcagcgtcagcagcgagcaggtgttgaaattccgtaaacttaacttcaatggggagggtgaacccgaagaactgatggtggacaactggcgcccagctcagccactgaagaacaggcaaatcaaagcttccttcaaataagatggtcccatagtctgtatccaaataatgaatcttcgggtgtttccctttagctaagcacagatctaccttggtgatttggaccctggttgctttgtgtctagttttctagacccttcatctcttacttgatagacttactaataaaatgtgaagactagaccaattgtcatgcttgacacaactgctgtggctggttggtgctttgtttatggtagtagtttttctgtaacacagaatataggataagaaataagaataaagtaccttgactttgttcacagcatgtagggtgatgagcactcacaattgttgactaaaatgctgcttttaaaacataggaaagtagaatggttgagtgcaaatccatagcacaagataaattgagctagttaaggcaaatcaggtaaaatagtcatgattctatgtaatgtaaaccagaaaaaataaatgttcatgatttcaagatgttatattaaagaaaaactttaaaaattattatatatttatagcaaagttatcttaaatatgaattctgttgtaatttaatgacttttgaattacagagatataaatgaagtattatctgtaaaaattgttataattagagttgtgatacagagtatatttccattcagacaatatatcataacttaataaatattgtattttagatatattctctaataaaattcagaattcta

SEQ ID NO: 341993 - DNA, 433 bp, Homo sapiens
ctttttgtagagaccggatcttgctattctgcccaggctggtcttaaactcttcgcctcaagagatccttctgcctcagcctcccaaagtgctggaattacaggctctggccatctgctgttgctcccctttctctgtggccaaagccccactctggaaatttccatcatcggtggtcgtgtgtcgatcacagcacactgggttcactccatggcctcatccttgggtagtgagttcccacccgtccagtgctcctctccagcctcagtcaccagcatctcctacttggattattgcaacggctcctaagcatcagcattaagcaccaacacagatgaatcctcctcctacagacattagatcatgtcacacctctgcccagacctcccagtggcttccagtatcatgttgaataaaagaaaagtctttccct

SEQ ID NO: 341994 - DNA, 475 bp, Homo sapiens
ctttgggctagcccatactgaggccccccgcatctgcaacaggaagtcagtgggctgcgtcatctatctttccaaggattctcccagctctgatgaccgaaggttgtaagtctatgttattcccaacctcctttctcttttccaggctctggccatctgctgttgctcccctttctctgtggccaaagccccactctggaaatttccatcatcggtggtcgtgtgtcgatcacagcacactgggttcactccatggcctcatccttgggtagtgagttcccacccgtccagtgctcctctccagcctcagtcaccagcatctcctacttggattattgcaacggctcctaagcatcagcattaagcaccaacacagatgaatcctcctcctacagacattagatcatgtcacacctctgcccagacctcccagtggcttccagtatcatgttgaataaaagaaaagtctttccct

SEQ ID NO: 341995 - DNA, 1927 bp, Homo sapiens
atggggcaatgatttcagtttcctatatgacttgataaaaattatataagaatgtaatggtttgccttttttttttcctgcaataagagttccatccaagggactgagccagaagtcacataccacctttatccccctgttaaatgtcattttcttccttcctaaaacctttcttttgacagtcaaacttggttttatatccttctcttttaactcccctgattaggtaaagaaaagaaactagtatttgtgtgtatgcaagccaaccctgttcaaggtggctgtctcagatggtttaataagggggtccccaacccctgggcttcagactggtaccagtctgtggcctgttaggagccaggccactcagcaggaggtgagcagcagtgagcgagcattactgcctaagctctgcctcctatcagatcagtggcagcgttagatactcacaggagcgcgaaccctgttgtgaacagtgcgtgcaagggatctaggttgcgtgctccttatgagaatctaactaatgcctgacggtctgaggaggaacagtttcatcttgaaaccatcccccctaaccttgtccctggaaaaattgtcttccacaaaaccagtccctggtgccaaaaaggttggggactgctgcattaccataattcctttgtacctcttatgacacattttagttatttgttatagttttttctgcccatattagattatgaatacttctagggcagtgtaggtgactttcattatttgtttttaggaacctaataaatatttgttgaagaaataaaaggaaagatggatgagtggtaggtacatttaacatcatcctgtagtttccttgtgtatgaaaggaagggagatgaattttattttaaagaatctgagaataaaagcctcatttttcctcctccattaagatttttaattaaattaagttaactgattaatttattttttagagatagggtcttcccttgttactgaggccagagtgcagtggtgtgatcacagcctcaaactcctgagattaagcaatcccccaagtagctgggactgattattggtgtgtgtcaccaccctggctaattttctttatatttttagtgacaggagtctcgctatgttgcccaggctagtgttgaactcctgatctcaagtgatcctcctaccttagcatcctaagtagctggaatcacaggcatgagccaccacactcagcccattgagttttaaaacctccctaatgacagatataacagttggagaattctgttaaggtttaatgacagtattttatatcatgcccagatggagctaagcaaaataagtagatttaactgtgtttatactaagttgcacagccagttttggaatctgaaaagcatttaataaattgctgcctttattctgtccatttcattattgtttatagttattaaatttaagaataaccaggggttactataaggagatatatttataatgtgttaaatatgatatatcttaaagaagatggttaaactaaatttaagatatttcaatatataaaaatggctcttgaagtccctatcttaaatgaaaaaatttttatatatcaaatctgtctttcatactctcagaatggcacagagaagacataaaagagtaagaacatggactcgtcacataaacatttttaataaagattacatctttgtacctgtaaatgagtcgtaagtatttcagattatttaagaacatattggaaagaattcagaaaaaaattttgtagtgtttttagattcataatcagtaaaaattatggccacatacatctcaggtattattttaatttttttaaataaaagtagctaaggcaatgaattccttatcttggattttggtttgacaatggttatgttgtaaaagtagtaaaaaa

SEQ ID NO: 341996 - DNA, 4707 bp, Homo sapiens
tcctttcccctccccctccctctccaagccggaggggtcctgaggtgacagcgcctgcaactgaaatttcagcagcgggagaagatggacaagagaaagctcgggcgacggccatcttcatccgaaatcatcacagaaggaaaaaggaaaaagtcatcttctgatttatcggagataagaaagatgttaaatgcaaaaccagaggatgtccatgttcaatcaccactgtccaaattcagaagctcagaacgctggactctccctttgcagtgggaaagaagcctaaggaataaagtcatctctctagaccataaaaataaaaaacatatccgagggtgtcctgttacttccaagtcatcaccagaaaggcaactcaaagttatgttgacgaatgtcctatggacggatttaggacgaaaattcagaaagaccctacctagaaacgatgctaatttatgtgatgccaacaaggtgcaatcagactcattgccttcgacatctgttgacagcctagagacatgtcaaaaattagaacctcttcgccaaagccttaatttatctgaaaggggctcacaacgaagtaagacagtagatgacaattctgcaaagcagactgcgcacaataaagaaaaacgaagaaaggatgatggcatttctcttttaatatctgatactcagcctgaagaccttaacagtggaagtagaggttgtgatcatctcgaacaggaaagcagaaacaaggatgttaaatattctgattcaaaagtggaactcactctgatttccaggaagacaaagagaaggcttagaaataatttacctgattctcaatattgtacttctttggataagtcaacagaacagacaaaaaaacaagaagatgactcaacaatatccactgagtttgaaaagccaagtgaaaactatcatcaggatccaaaactgcctgaagaaattacaactaaacctacaaaaagtgattttactaaactatcctcacttaacagtcaggagttgactttgagtaatgccaccaaaagtgcctctgccggttcaaccactgaaaccgttgagaactctaattccattgatattgtggggatttcttccctggttgagaaggatgagaatgagttgaataccatagaaaagcctattctaagaggacataatgaagggaaccaatcactgatctcagctgaaccaattgttgtttccagtgatgaagaaggacctgttgaacataaaagttcagaaattcttaagttacaatctaagcaagaccgtgagacaactaatgaaaatgagagtacttctgaatcagcattgttagaactaccattgattacatgtgaatctgtacagatgtcatctgaattatgcccatataatcctgtcatggagaacatttccagtattatgcctagtaatgagatggatctacaactggattttatatttacttctgtttatattggtaaaataaaaggagcttctaaaggttgtgttacaatcacaaaaaaatatattaagatcccatttcaagtgtccctgaatgagatttcattgctagtggataccacacatttaaagcggtttgggttatggaaaagtaaggatgataatcacagtaaaaggagtcatgctattcttttcttctgggtctcttcagattatcttcaagagattcagacccaattagaacactctgtattaagccagcaatcaaaatctagtgaattcattttccttgaactacacaatcctgtttcacaaagagaagaattgaagctgaaagatattatgacggaaataagtataatcagtggagaattagagctttcttacccgttgtcttgggttcaggcatttcctttgtttcagaacctctcttcaaaagaaagttcttttattcattattactgtgtttcaacttgttctttccctgctggtgttgctgttgctgaagaaatgaagctgaaatcagtatctcagccctcaaacacagatgcggccaagcctacttacaccttcctgcagaagcaaagtagcggttgctactccctttctattacatctaatccagatgaagaatggcgagaagtcaggcacactggacttgttcagaagttgattgtatatcctccaccacctactaaggggggattaggagtaactaatgaagatctggagtgtttagaagaaggagagtttcttaatgatgtaatcattgatttttaccttaagtatcttatattggagaaggcatcagatgaacttgttgaacgaagtcacatttttagtagctttttctataaatgcttgacaagaaaggaaaataatttaacagaagataatccaaatctttcaatggcacagagaagacataaaagagtaagaacatggactcgtcacataaacatttttaataaagattacatctttgtacctgtaaatgagtcgtctcactggtatctcgcagtcatttgttttccatggttagaagaagctgtgtatgaagattttccacaaactgtatcccagcagtcccaggctcagcagtcccaaaatgacaacaaaacaatagataatgatctacgtactacttcgacactgtctttgagtgcagaggattcccaaagtaccgagtcgaatatgtcagtaccaaagaaaatgtgtaaaaggccatgtattcttatactagactccttgaaagctgcttctgtacaaaacacagttcagaatttacgagagtatttagaggtagagtgggaagttaaactaaaaactcatcgtcaattcagcaaaacaaacatggtggatctatgccctaaagttcctaaacaggacaatagcagtgattgtggagtatatttattgcagtatgtggaaagcttcttcaaggatcctattgttaactttgaacttccaattcatttggagaagtggtttcctcgtcatgtaataaagaccaaacgggaagatattcgagagctcatcttgaaacttcatttacagcaacagaagggcagcagtagctagttaatctgtacaaacatgacacagatgttctctaagattactggaaagcctcttaccagcatttgtgttagccagctcacagagaagaaaataacttgcagtagttttataataagtcattggaacattatttaaaatatgtaggacacattattagaattgttgggatctcatagatggaatgggaatgggggtgatatagataaacttactagatataaattaaaattttataaatatttcatatttttctgagtaaatatgattggattatgcaacagcatatgtaatatgggaatgttttgtagataataaaacttacatgatctgtacttccacgtgactgggtgctgaggggagttaaagcctccctggtgccagccccagtgcttgtcaaatttgctgacaggtcacatcatattgtaattctattctttgcagctcaagcatgcagtatgaatactgtgtattttttaaaaaaataatttagtatcaaggcttcagaaaatgccatttacggcatcccttctgtatgtaacaaaaagacattcataatgttaggaagatgataaaaattcgctcttttaaagtgcagcttattattctcaattgctaaatacgattactctgctttattttttttcatttcttttgatgtcatatgtgagtatcttataatttagttcatttgttcagggtaaaatttgaaacaaaaaattttacctgtgcaaaatagttttttaaaaattatacatgtagctcaacttgaggtactgctatataaatattcactcacattatcacggaatttatgtatagtttctctaatatagaagataaaattggtgtcctcataactttaacaaagaaaaccctcagtcctatttattaatgggtagaattaaatatataattttatagctcagtttacccagtattcatctgcaaagccagattgctctcattgcttttatatttttaaattgtagcttttagagacctatgatcctcatggaacttaattttttattaaatattcaggtaacagttctgaattcatgtgataatggtggcattatatatgattaaacacttcagaactttctaatgttatcaggagtattttgagggagatatgattatattgtattttctcagataagaaaaatgttttttaacaatattattttaatctgttttaagcatctcttagatttacattataactacataaagcagtgaagcaaaggcaaattaagataaagctagaaagtctgaacattttatttcaaaatcatacgaatcggggtcagttaagcctcagtattcttagcttttgttgattttggcactatctttatattattaaatatatttgttgtttggatatttcatataaagatggctataattacatatttcattcccaatttgtgtgtgttggggggtacttttaaaggtgactattgttttgtacatctaattttgggaaagcaagtctataagacatcttgtgatttcttaatgtttttgtttgtatgtttttcaaagatatcactgtcctttatcatgttttgaagattgtttaaaattcattttcctaaattaatgtgcaagtaatgttttgaggatatcagtgttttatattaaacatatttccaattc

SEQ ID NO: 341997 - DNA, 531 bp, Homo sapiens
ctttatattattaaatatagtgccaaaatcaacaaaaggctaagaatactgaggcttaactgaccccgattcgtatgattttgaaataaaatgttcagactattcttagcttttgttgattttggcactatctttatattattaaatatatttgttgtttggatatttcatataaagatggctataattacatatttcattcccaatttgtgtgtgttggggggtacttttaaaggtgactattgttttgtacatctaattttgggaaagcaagtctataagacatcttgtgatttcttaatgtttttgtttgtatgtttttcaaagatatcactgtcctttatcatgttttgaagattgtttaaaattcattttcctaaattaatgtgcaagtaatgttttgaggatatcagtgttttatattaaacatatttccaattcattaaattgaggtgtaatttttttccttaagaaacatgagctactgttagaaataaatttccagttgtatgctgctctgtgtatatcatg

SEQ ID NO: 341998 - DNA, 624 bp, Homo sapiens
cacatcaaattaaaaagcttctgcacagcaaagaaaacaatcaacaaagtgaggagataacccacagagtaggagaaaatatttgcaaactatccatctgacaaggataaatttaagatatttcaatatataaaaatggctcttgaagtccctatcttaaatgaaaaaatttttatatatcaaatctgtctttcatactctcagaatggcacagagaagacataaaagagtaagaacatggactcgtcacataaacatttttaataaagattacatctttgtacctgtaaatgagtcgtctcactggtatctcgcagtcatttgttttccatggttagaagaagctgtgtatgaagattttccacaaactgtatcccagcagtcccaggctcagcagtcccaaaatgacaacaaaacaataggtgacatccataacgtagatggtgtttttaataatgatgacaataatttaatggttacagggaagaaaatgaagttaacggtagtatagttatttactatcattaaacctactttaacaggatgaataaaaaatctgaaatttttaatgatagacaaaatataattctgaagttgtactgttatatcaagttttattatggc

SEQ ID NO: 341999 - DNA, 607 bp, Homo sapiens
catgttctgtcttctgggctgatgttttgcctctgggagtagctttttgtcttcagggatggctttttttcttctaggagtggctttttttcttcagaacgtatcttttcttcttcagggattagttttttttctgactcgtcagcaggaagtgaatctgtggtttctaacggagactgtggcaaggctttactggggacaggtacaatagtctttggacccctgggtggcatgtatgagcaccagtcatggtagggatgagccatttgtgccagttcttgggattcctggtggtaacatgggttagggtggtggttagggtccaggcaggtcagttcttgggtccctggtcagcatgtttggtgccagctgtggccgaggtaggtgacaggaaacaatgggtgggttctcaggccacttgggcattggcaatgtacttgggcattggcagtgtacttgggcattggcaatggtgagtagggtgggctagtgcttaggccccttgacagtgtgtgtgggctgtggtggtggcagtggacagggcagccctgtctttaggcacagtattgtgcgggcaggtcctgtggcagcagattgggtgggcctg

SEQ ID NO: 342000 - DNA, 4992 bp, Homo sapiens
tcctttcccctccccctccctctccaagccggaggggtcctgaggtgacagcgcctgcaactgaaatttcagcagcgggagaagatggacaagagaaagctcgggcgacggccatcttcatccgaaatcatcacagaaggaaaaaggaaaaagtcatcttctgatttatcggagataagaaagatgttaaatgcaaaaccagaggatgtccatgttcaatcaccactgtccaaattcagaagctcagaacgctggactctccctttgcagtgggaaagaagcctaaggaataaagtcatctctctagaccataaaaataaaaaacatatccgagggtgtcctgttacttccaagtcatcaccagaaaggcaactcaaagttatgttgacgaatgtcctatggacggatttaggacgaaaattcagaaagaccctacctagaaacgatgctaatttatgtgatgccaacaaggtgcaatcagactcattgccttcgacatctgttgacagcctagagacatgtcaaaaattagaacctcttcgccaaagccttaatttatctgaaaggatacccagagttatattgacgaatgtcctgggaacggagttaggaagaaaatacataaggaccccacctgtaactgagggaagtttgagtgatacagacaacttgcaatcagagcaactttcttcatcatctgatggcagcctagaatcttatcaaaatctaaaccctcacaagagctgttatttatctgaaaggggctcacaacgaagtaagacagtagatgacaattctgcaaagcagactgcgcacaataaagaaaaacgaagaaaggatgatggcatttctcttttaatatctgatactcagcctgaagaccttaacagtggaagtagaggttgtgatcatctcgaacaggaaagcagaaacaaggatgttaaatattctgattcaaaagtggaactcactctgatttccaggaagacaaagagaaggcttagaaataatttacctgattctcaatattgtacttctttggataagtcaacagaacagacaaaaaaacaagaagatgactcaacaatatccactgagtttgaaaagccaagtgaaaactatcatcaggatccaaaactgcctgaagaaattacaactaaacctacaaaaagtgattttactaaactatcctcacttaacagtcaggagttgactttgagtaatgccaccaaaagtgcctctgccggttcaaccactgaaaccgttgagaactctaattccattgatattgtggggatttcttccctggttgagaaggatgagaatgagttgaataccatagaaaagcctattctaagaggacataatgaagggaaccaatcactgatctcagctgaaccaattgttgtttccagtgatgaagaaggacctgttgaacataaaagttcagaaattcttaagttacaatctaagcaagaccgtgagacaactaatgaaaatgagagtacttctgaatcagcattgttagaactaccattgattacatgtgaatctgtacagatgtcatctgaattatgcccatataatcctgtcatggagaacatttccagtattatgcctagtaatgagatggatctacaactggattttatatttacttctgtttatattggtaaaataaaaggagcttctaaaggttgtgttacaatcacaaaaaaatatattaagatcccatttcaagtgtccctgaatgagatttcattgctagtggataccacacatttaaagcggtttgggttatggaaaagtaaggatgataatcacagtaaaaggagtcatgctattcttttcttctgggtctcttcagattatcttcaagagattcagacccaattagaacactctgtattaagccagcaatcaaaatctagtgaattcattttccttgaactacacaatcctgtttcacaaagagaagaattgaagctgaaagatattatgacggaaataagtataatcagtggagaattagagctttcttacccgttgtcttgggttcaggcatttcctttgtttcagaacctctcttcaaaagaaagttcttttattcattattactgtgtttcaacttgttctttccctgctggtgttgctgttgctgaagaaatgaagctgaaatcagtatctcagccctcaaacacagatgcggccaagcctacttacaccttcctgcagaagcaaagtagcggttgctactccctttctattacatctaatccagatgaagaatggcgagaagtcaggcacactggacttgttcagaagttgattgtatatcctccaccacctactaaggggggattaggagtaactaatgaagatctggagtgtttagaagaaggagagtttcttaatgatgtaatcattgatttttaccttaagtatcttatattggagaaggcatcagatgaacttgttgaacgaagtcacatttttagtagctttttctataaatgcttgacaagaaaggaaaataatttaacagaagataatccaaatctttcaatggcacagagaagacataaaagagtaagaacatggactcgtcacataaacatttttaataaagattacatctttgtacctgtaaatgagtcgtctcactggtatctcgcagtcatttgttttccatggttagaagaagctgtgtatgaagattttccacaaactgtatcccagcagtcccaggctcagcagtcccaaaatgacaacaaaacaatagataatgatctacgtactacttcgacactgtctttgagtgcagaggattcccaaagtaccgagtcgaatatgtcagtaccaaagaaaatgtgtaaaaggccatgtattcttatactagactccttgaaagctgcttctgtacaaaacacagttcagaatttacgagagtatttagaggtagagtgggaagttaaactaaaaactcatcgtcaattcagcaaaacaaacatggtggatctatgccctaaagttcctaaacaggacaatagcagtgattgtggagtatatttattgcagtatgtggaaagcttcttcaaggatcctattgttaactttgaacttccaattcatttggagaagtggtttcctcgtcatgtaataaagaccaaacgggaagatattcgagagctcatcttgaaacttcatttacagcaacagaagggcagcagtagctagttaatctgtacaaacatgacacagatgttctctaagattactggaaagcctcttaccagcatttgtgttagccagctcacagagaagaaaataacttgcagtagttttataataagtcattggaacattatttaaaatatgtaggacacattattagaattgttgggatctcatagatggaatgggaatgggggtgatatagataaacttactagatataaattaaaattttataaatatttcatatttttctgagtaaatatgattggattatgcaacagcatatgtaatatgggaatgttttgtagataataaaacttacatgatctgtacttccacgtgactgggtgctgaggggagttaaagcctccctggtgccagccccagtgcttgtcaaatttgctgacaggtcacatcatattgtaattctattctttgcagctcaagcatgcagtatgaatactgtgtattttttaaaaaaataatttagtatcaaggcttcagaaaatgccatttacggcatcccttctgtatgtaacaaaaagacattcataatgttaggaagatgataaaaattcgctcttttaaagtgcagcttattattctcaattgctaaatacgattactctgctttattttttttcatttcttttgatgtcatatgtgagtatcttataatttagttcatttgttcagggtaaaatttgaaacaaaaaattttacctgtgcaaaatagttttttaaaaattatacatgtagctcaacttgaggtactgctatataaatattcactcacattatcacggaatttatgtatagtttctctaatatagaagataaaattggtgtcctcataactttaacaaagaaaaccctcagtcctatttattaatgggtagaattaaatatataattttatagctcagtttacccagtattcatctgcaaagccagattgctctcattgcttttatatttttaaattgtagcttttagagacctatgatcctcatggaacttaattttttattaaatattcaggtaacagttctgaattcatgtgataatggtggcattatatatgattaaacacttcagaactttctaatgttatcaggagtattttgagggagatatgattatattgtattttctcagataagaaaaatgttttttaacaatattattttaatctgttttaagcatctcttagatttacattataactacataaagcagtgaagcaaaggcaaattaagataaagctagaaagtctgaacattttatttcaaaatcatacgaatcggggtcagttaagcctcagtattcttagcttttgttgattttggcactatctttatattattaaatatatttgttgtttggatatttcatataaagatggctataattacatatttcattcccaatttgtgtgtgttggggggtacttttaaaggtgactattgttttgtacatctaattttgggaaagcaagtctataagacatcttgtgatttcttaatgtttttgtttgtatgtttttcaaagatatcactgtcctttatcatgttttgaagattgtttaaaattcattttcctaaattaatgtgcaagtaatgttttgaggatatcagtgttttatattaaacatatttccaattcattaaattgaggtgtaatttttttccttaagaaacatgagctactgttagaaataaatttccagttgtatgctgctctgtgtatatcatg

SEQ ID NO: 342001 - DNA, 4797 bp, Homo sapiens
tcctttcccctccccctccctctccaagccggaggggtcctgaggtgacagcgcctgcaactgaaatttcagcagcgggagaagatggacaagagaaagctcgggcgacggccatcttcatccgaaatcatcacagaaggaaaaaggaaaaagtcatcttctgatttatcggagataagaaagatgttaaatgcaaaaccagaggatgtccatgttcaatcaccactgtccaaattcagaagctcagaacgctggactctccctttgcagtgggaaagaagcctaaggaataaagtcatctctctagaccataaaaataaaaaacatatccgagggtgtcctgttacttccaagtcatcaccagaaaggcaactcaaagttatgttgacgaatgtcctatggacggatttaggacgaaaattcagaaagaccctacctagaaacgatgctaatttatgtgatgccaacaaggtgcaatcagactcattgccttcgacatctgttgacagcctagagacatgtcaaaaattagaacctcttcgccaaagccttaatttatctgaaaggggctcacaacgaagtaagacagtagatgacaattctgcaaagcagactgcgcacaataaagaaaaacgaagaaaggatgatggcatttctcttttaatatctgatactcagcctgaagaccttaacagtggaagtagaggttgtgatcatctcgaacaggaaagcagaaacaaggatgttaaatattctgattcaaaagtggaactcactctgatttccaggaagacaaagagaaggcttagaaataatttacctgattctcaatattgtacttctttggataagtcaacagaacagacaaaaaaacaagaagatgactcaacaatatccactgagtttgaaaagccaagtgaaaactatcatcaggatccaaaactgcctgaagaaattacaactaaacctacaaaaagtgattttactaaactatcctcacttaacagtcaggagttgactttgagtaatgccaccaaaagtgcctctgccggttcaaccactgaaaccgttgagaactctaattccattgatattgtggggatttcttccctggttgagaaggatgagaatgagttgaataccatagaaaagcctattctaagaggacataatgaagggaaccaatcactgatctcagctgaaccaattgttgtttccagtgatgaagaaggacctgttgaacataaaagttcagaaattcttaagttacaatctaagcaagaccgtgagacaactaatgaaaatgagagtacttctgaatcagcattgttagaactaccattgattacatgtgaatctgtacagatgtcatctgaattatgcccatataatcctgtcatggagaacatttccagtattatgcctagtaatgagatggatctacaactggattttatatttacttctgtttatattggtaaaataaaaggagcttctaaaggttgtgttacaatcacaaaaaaatatattaagatcccatttcaagtgtccctgaatgagatttcattgctagtggataccacacatttaaagcggtttgggttatggaaaagtaaggatgataatcacagtaaaaggagtcatgctattcttttcttctgggtctcttcagattatcttcaagagattcagacccaattagaacactctgtattaagccagcaatcaaaatctagtgaattcattttccttgaactacacaatcctgtttcacaaagagaagaattgaagctgaaagatattatgacggaaataagtataatcagtggagaattagagctttcttacccgttgtcttgggttcaggcatttcctttgtttcagaacctctcttcaaaagaaagttcttttattcattattactgtgtttcaacttgttctttccctgctggtgttgctgttgctgaagaaatgaagctgaaatcagtatctcagccctcaaacacagatgcggccaagcctacttacaccttcctgcagaagcaaagtagcggttgctactccctttctattacatctaatccagatgaagaatggcgagaagtcaggcacactggacttgttcagaagttgattgtatatcctccaccacctactaaggggggattaggagtaactaatgaagatctggagtgtttagaagaaggagagtttcttaatgatgtaatcattgatttttaccttaagtatcttatattggagaaggcatcagatgaacttgttgaacgaagtcacatttttagtagctttttctataaatgcttgacaagaaaggaaaataatttaacagaagataatccaaatctttcaatggcacagagaagacataaaagagtaagaacatggactcgtcacataaacatttttaataaagattacatctttgtacctgtaaatgagtcgtctcactggtatctcgcagtcatttgttttccatggttagaagaagctgtgtatgaagattttccacaaactgtatcccagcagtcccaggctcagcagtcccaaaatgacaacaaaacaatagataatgatctacgtactacttcgacactgtctttgagtgcagaggattcccaaagtaccgagtcgaatatgtcagtaccaaagaaaatgtgtaaaaggccatgtattcttatactagactccttgaaagctgcttctgtacaaaacacagttcagaatttacgagagtatttagaggtagagtgggaagttaaactaaaaactcatcgtcaattcagcaaaacaaacatggtggatctatgccctaaagttcctaaacaggacaatagcagtgattgtggagtatatttattgcagtatgtggaaagcttcttcaaggatcctattgttaactttgaacttccaattcatttggagaagtggtttcctcgtcatgtaataaagaccaaacgggaagatattcgagagctcatcttgaaacttcatttacagcaacagaagggcagcagtagctagttaatctgtacaaacatgacacagatgttctctaagattactggaaagcctcttaccagcatttgtgttagccagctcacagagaagaaaataacttgcagtagttttataataagtcattggaacattatttaaaatatgtaggacacattattagaattgttgggatctcatagatggaatgggaatgggggtgatatagataaacttactagatataaattaaaattttataaatatttcatatttttctgagtaaatatgattggattatgcaacagcatatgtaatatgggaatgttttgtagataataaaacttacatgatctgtacttccacgtgactgggtgctgaggggagttaaagcctccctggtgccagccccagtgcttgtcaaatttgctgacaggtcacatcatattgtaattctattctttgcagctcaagcatgcagtatgaatactgtgtattttttaaaaaaataatttagtatcaaggcttcagaaaatgccatttacggcatcccttctgtatgtaacaaaaagacattcataatgttaggaagatgataaaaattcgctcttttaaagtgcagcttattattctcaattgctaaatacgattactctgctttattttttttcatttcttttgatgtcatatgtgagtatcttataatttagttcatttgttcagggtaaaatttgaaacaaaaaattttacctgtgcaaaatagttttttaaaaattatacatgtagctcaacttgaggtactgctatataaatattcactcacattatcacggaatttatgtatagtttctctaatatagaagataaaattggtgtcctcataactttaacaaagaaaaccctcagtcctatttattaatgggtagaattaaatatataattttatagctcagtttacccagtattcatctgcaaagccagattgctctcattgcttttatatttttaaattgtagcttttagagacctatgatcctcatggaacttaattttttattaaatattcaggtaacagttctgaattcatgtgataatggtggcattatatatgattaaacacttcagaactttctaatgttatcaggagtattttgagggagatatgattatattgtattttctcagataagaaaaatgttttttaacaatattattttaatctgttttaagcatctcttagatttacattataactacataaagcagtgaagcaaaggcaaattaagataaagctagaaagtctgaacattttatttcaaaatcatacgaatcggggtcagttaagcctcagtattcttagcttttgttgattttggcactatctttatattattaaatatatttgttgtttggatatttcatataaagatggctataattacatatttcattcccaatttgtgtgtgttggggggtacttttaaaggtgactattgttttgtacatctaattttgggaaagcaagtctataagacatcttgtgatttcttaatgtttttgtttgtatgtttttcaaagatatcactgtcctttatcatgttttgaagattgtttaaaattcattttcctaaattaatgtgcaagtaatgttttgaggatatcagtgttttatattaaacatatttccaattcattaaattgaggtgtaatttttttccttaagaaacatgagctactgttagaaataaatttccagttgtatgctgctctgtgtatatcatg

SEQ ID NO: 342002 - DNA, 1229 bp, Homo sapiens
gtcaggaaggaatgataacgattggctctcgtaacagtgcaggttattagtactcttagagtgttaaattacgattactctgattctggtctgacatagtgtttggatgcttcaaatgtgagtatatgcatcaggtgagtacagatgggttcagggtaaaatttagatggagtacatgtttgatccatgttagtgaatcattatcaattagagaagttctatacgtgtatcgactatcattgaggtactgctatataaatattcactcacattatcacggaatttatgtatagtttctctaatatagaagataaaattggtgtcctcataactttaacaaagaaaaccctcagtcctatttattaatgggtagaattaaatatataattttatagctcagtttacccagtattcatctgcaaagccagattgctctcattgcttttatatttttaaattgtagcttttagagacctatgatcctcatggaacttaattttttattaaatattcaggtaacagttctgaattcatgtgataatggtggcattatatatgattaaacacttcagaactttctaatgttatcaggagtattttgagggagatatgattatattgtattttctcagataagaaaaatgttttttaacaatattattttaatctgttttaagcatctcttagatttacattataactacataaagcagtgaagcaaaggcaaattaagataaagctagaaagtctgaacattttatttcaaaatcatacgaatcggggtcagttaagcctcagtattcttagcttttgttgattttggcactatctttatattattaaatatatttgttgtttggatatttcatataaagatggctataattacatatttcattcccaatttgtgtgtgttggggggtacttttaaaggtgactattgttttgtacatctaattttgggaaagcaagtctataagacatcttgtgatttcttaatgtttttgtttgtatgtttttcaaagatatcactgtcctttatcatgttttgaagattgtttaaaattcattttcctaaattaatgtgcaagtaatgttttgaggatatcagtgttttatattaaacatatttccaattcattaaattgaggtgtaatttttttccttaagaaacatgagctactgttagaaataaatttccagttgtatgctgctctgtgtatatcatg

SEQ ID NO: 342003 - DNA, 1045 bp, Homo sapiens
tcctttcccctccccctccctctccaagccggaggggtcctgaggtgacagcgcctgcaactgaaatttcagcagcgggagaagatggacaagagaaagctcgggcgacggccatcttcatccgaaatcatcacagaaggaaaaaggaaaaagtcatcttctgatttatcggagataagaaagatgttaaatgcaaaaccagaggatgtccatgttcaatcaccactgtccaaattcagaagctcagaacgctggactctccctttgcagtgggaaagaagcctaaggaataaagtcatctctctagaccataaaaataaaaaacatatccgagggtgtcctgttacttccaagtcatcaccagaaaggcaactcaaagttatgttgacgaatgtcctatggacggatttaggacgaaaattcagaaagaccctacctagaaacgatgctaatttatgtgatgccaacaaggtgcaatcagactcattgccttcgacatctgttgacagcctagagacatgtcaaaaattagaacctcttcgccaaagccttaatttatctgaaaggatacccagagttatattgacgaatgtcctgggaacggagttaggaagaaaatacataaggaccccacctgtaactgagggaagtttgagtgatacagacaacttgcaatcagagcaactttcttcatcatctgatggcagcctagaatcttatcaaaatctaaaccctcacaagagctgttatttatctgaaaggggctcacaacgaagtaagacagtagatgacaattctgcaaagcagactgcgcacaataaagaaaaacgaagaaaggatgatggcatttctcttttaatatctgatactcagcctgaaggtttgtgaaccttagaaaactgttggaatttgaattttttcttattgtattaataataatttttgttataaataaattattttattttactttgaaaggatatgtgaaagtaaagggagattatttggcaacacaaataaaattgctaaacctacaaaaaatgta

SEQ ID NO: 342004 - DNA, 2321 bp, Homo sapiens
tcctttcccctccccctccctctccaagccggaggggtcctgaggtgacagcgcctgcaactgaaatttcagcagcgggagaagatggacaagagaaagctcgggcgacggccatcttcatccgaaatcatcacagaaggaaaaaggaaaaagtcatcttctgatttatcggagataagaaagatgttaaatgcaaaaccagaggatgtccatgttcaatcaccactgtccaaattcagaagctcagaacgctggactctccctttgcagtgggaaagaagcctaaggaataaagtcatctctctagaccataaaaataaaaaacatatccgagggtgtcctgttacttccaagtcatcaccagaaaggcaactcaaagttatgttgacgaatgtcctatggacggatttaggacgaaaattcagaaagaccctacctagaaacgatgctaatttatgtgatgccaacaaggtgcaatcagactcattgccttcgacatctgttgacagcctagagacatgtcaaaaattagaacctcttcgccaaagccttaatttatctgaaaggatacccagagttatattgacgaatgtcctgggaacggagttaggaagaaaatacataaggaccccacctgtaactgagggaagtttgagtgatacagacaacttgcaatcagagcaactttcttcatcatctgatggcagcctagaatcttatcaaaatctaaaccctcacaagagctgttatttatctgaaaggggctcacaacgaagtaagacagtagatgacaattctgcaaagcagactgcgcacaataaagaaaaacgaagaaaggatgatggcatttctcttttaatatctgatactcagcctgaagaccttaacagtggaagtagaggttgtgatcatctcgaacaggaaagcagaaacaaggatgttaaatattctgattcaaaagtggaactcactctgatttccaggaagacaaagagaaggcttagaaataatttacctgattctcaatattgtacttctttggataagtcaacagaacagacaaaaaaacaagaagatgactcaacaatatccactgagtttgaaaagccaagtgaaaactatcatcaggatccaaaactgcctgaagaaattacaactaaacctacaaaaagtgattttactaaactatcctcacttaacagtcaggagttgactttgagtaatgccaccaaaagtgcctctgccggttcaaccactgaaaccgttgagaactctaattccattgatattgtggggatttcttccctggttgagaaggatgagaatgagttgaataccatagaaaagcctattctaagaggacataatgaagggaaccaatcactgatctcagctgaaccaattgttgtttccagtgatgaagaaggacctgttgaacataaaagttcagaaattcttaagttacaatctaagcaagaccgtgagacaactaatgaaaatgagagtacttctgaatcagcattgttagaactaccattgattacatgtgaatctgtacagatgtcatctgaattatgcccatataatcctgtcatggagaacatttccagtattatgcctagtaatgagatggatctacaactggattttatatttacttctgtttatattggtaaaataaaaggagcttctaaaggttgtgttacaatcacaaaaaaatatattaagatcccatttcaagtgtccctgaatgagatttcattgctagtggataccacacatttaaagcggtttgggttatggaaaagtaaggatgataatcacagtaaaaggagtcatgctattcttttcttctgggtctcttcagattatcttcaagagattcagacccaattagaacactctgtattaagccagcaatatggagtctcgctttgtcacccaggctggagtgcagtggcactatctctgctcaccgcaagctctgcctcccgggttcacgccattctcctgcctcagcctcctgagtagctgggactacaggtgcccgccaccgtgcccggctaattttttgtatttttagtagagacggggtttcatcgtgttagccaggatggtctcgatctcctgaccttgtgatccgcccgcctcagcctcccaaagtgctgggattacaggcgtgagccactgcgcctggccctaattttgtttcttaattttaggatagattatttaattcacataatttctccttatagttgtattcaaccaattgaaattctcatctaaaataaaaagaatagcttaaaaaatcttaaatg

SEQ ID NO: 342005 - DNA, 759 bp, Homo sapiens
  misc_feature (10)..(10): n is a, c, g, or t
ctcggtctancttgttatcttcgcctgcaactgaaatttcagcagcgggagaagatggacaagagaaagctcgggcgacggccatcttcatccgataagaaagatgttaaatgcaaaaccagaggatgtccatgttcaatcaccactgtccaaattcagaagctcagaacgctggactctccctttgcagtgggaaagaagcctaaggaataaagtcatctctctagaccataaaaataaaaaacatatccgagggtgtcctgttacttccaagtcatcaccagaaagactcgtcagcaggaagtgaatctgtggtttctaacggagactgtggcaaggctttactggggacaggtacaatagtctttggacccctgggtggcatgtatgagcaccagtcatggtagggatgagccatttgtgccagttcttgggattcctggtggtaacatgggttagggtggtggttagggtccaggcaggtcagttcttgggtccctggtcagcatgtttggtgccagctgtggccgaggtaggtgacaggaaacaatgggtgggttctcaggccacttgggcattggcaatgtacttgggcattggcagtgtacttgggcattggcaatggtgagtagggtgggctagtgcttaggccccttgacagtgtgtgtgggctgtggtggtggcagtggacagggcagccctgtctttaggcacagtattgtgcgggcaggtcctgtggcagcagattgggtgggcctg

SEQ ID NO: 342006 - DNA, 4942 bp, Homo sapiens
tcctttcccctccccctccctctccaagccggaggggtcctgaggtgacagcgcctgcaactgaaatttcagcagcgggagaagatggacaagagaaagctcgggcgacggccatcttcatccgataagaaagatgttaaatgcaaaaccagaggatgtccatgttcaatcaccactgtccaaattcagaagctcagaacgctggactctccctttgcagtgggaaagaagcctaaggaataaagtcatctctctagaccataaaaataaaaaacatatccgagggtgtcctgttacttccaagtcatcaccagaaaggcaactcaaagttatgttgacgaatgtcctatggacggatttaggacgaaaattcagaaagaccctacctagaaacgatgctaatttatgtgatgccaacaaggtgcaatcagactcattgccttcgacatctgttgacagcctagagacatgtcaaaaattagaacctcttcgccaaagccttaatttatctgaaaggatacccagagttatattgacgaatgtcctgggaacggagttaggaagaaaatacataaggaccccacctgtaactgagggaagtttgagtgatacagacaacttgcaatcagagcaactttcttcatcatctgatggcagcctagaatcttatcaaaatctaaaccctcacaagagctgttatttatctgaaaggggctcacaacgaagtaagacagtagatgacaattctgcaaagcagactgcgcacaataaagaaaaacgaagaaaggatgatggcatttctcttttaatatctgatactcagcctgaagaccttaacagtggaagtagaggttgtgatcatctcgaacaggaaagcagaaacaaggatgttaaatattctgattcaaaagtggaactcactctgatttccaggaagacaaagagaaggcttagaaataatttacctgattctcaatattgtacttctttggataagtcaacagaacagacaaaaaaacaagaagatgactcaacaatatccactgagtttgaaaagccaagtgaaaactatcatcaggatccaaaactgcctgaagaaattacaactaaacctacaaaaagtgattttactaaactatcctcacttaacagtcaggagttgactttgagtaatgccaccaaaagtgcctctgccggttcaaccactgaaaccgttgagaactctaattccattgatattgtggggatttcttccctggttgagaaggatgagaatgagttgaataccatagaaaagcctattctaagaggacataatgaagggaaccaatcactgatctcagctgaaccaattgttgtttccagtgatgaagaaggacctgttgaacataaaagttcagaaattcttaagttacaatctaagcaagaccgtgagacaactaatgaaaatgagagtacttctgaatcagcattgttagaactaccattgattacatgtgaatctgtacagatgtcatctgaattatgcccatataatcctgtcatggagaacatttccagtattatgcctagtaatgagatggatctacaactggattttatatttacttctgtttatattggtaaaataaaaggagcttctaaaggttgtgttacaatcacaaaaaaatatattaagatcccatttcaagtgtccctgaatgagatttcattgctagtggataccacacatttaaagcggtttgggttatggaaaagtaaggatgataatcacagtaaaaggagtcatgctattcttttcttctgggtctcttcagattatcttcaagagattcagacccaattagaacactctgtattaagccagcaatcaaaatctagtgaattcattttccttgaactacacaatcctgtttcacaaagagaagaattgaagctgaaagatattatgacggaaataagtataatcagtggagaattagagctttcttacccgttgtcttgggttcaggcatttcctttgtttcagaacctctcttcaaaagaaagttcttttattcattattactgtgtttcaacttgttctttccctgctggtgttgctgttgctgaagaaatgaagctgaaatcagtatctcagccctcaaacacagatgcggccaagcctacttacaccttcctgcagaagcaaagtagcggttgctactccctttctattacatctaatccagatgaagaatggcgagaagtcaggcacactggacttgttcagaagttgattgtatatcctccaccacctactaaggggggattaggagtaactaatgaagatctggagtgtttagaagaaggagagtttcttaatgatgtaatcattgatttttaccttaagtatcttatattggagaaggcatcagatgaacttgttgaacgaagtcacatttttagtagctttttctataaatgcttgacaagaaaggaaaataatttaacagaagataatccaaatctttcaatggcacagagaagacataaaagagtaagaacatggactcgtcacataaacatttttaataaagattacatctttgtacctgtaaatgagtcgtctcactggtatctcgcagtcatttgttttccatggttagaagaagctgtgtatgaagattttccacaaactgtatcccagcagtcccaggctcagcagtcccaaaatgacaacaaaacaatagataatgatctacgtactacttcgacactgtctttgagtgcagaggattcccaaagtaccgagtcgaatatgtcagtaccaaagaaaatgtgtaaaaggccatgtattcttatactagactccttgaaagctgcttctgtacaaaacacagttcagaatttacgagagtatttagaggtagagtgggaagttaaactaaaaactcatcgtcaattcagcaaaacaaacatggtggatctatgccctaaagttcctaaacaggacaatagcagtgattgtggagtatatttattgcagtatgtggaaagcttcttcaaggatcctattgttaactttgaacttccaattcatttggagaagtggtttcctcgtcatgtaataaagaccaaacgggaagatattcgagagctcatcttgaaacttcatttacagcaacagaagggcagcagtagctagttaatctgtacaaacatgacacagatgttctctaagattactggaaagcctcttaccagcatttgtgttagccagctcacagagaagaaaataacttgcagtagttttataataagtcattggaacattatttaaaatatgtaggacacattattagaattgttgggatctcatagatggaatgggaatgggggtgatatagataaacttactagatataaattaaaattttataaatatttcatatttttctgagtaaatatgattggattatgcaacagcatatgtaatatgggaatgttttgtagataataaaacttacatgatctgtacttccacgtgactgggtgctgaggggagttaaagcctccctggtgccagccccagtgcttgtcaaatttgctgacaggtcacatcatattgtaattctattctttgcagctcaagcatgcagtatgaatactgtgtattttttaaaaaaataatttagtatcaaggcttcagaaaatgccatttacggcatcccttctgtatgtaacaaaaagacattcataatgttaggaagatgataaaaattcgctcttttaaagtgcagcttattattctcaattgctaaatacgattactctgctttattttttttcatttcttttgatgtcatatgtgagtatcttataatttagttcatttgttcagggtaaaatttgaaacaaaaaattttacctgtgcaaaatagttttttaaaaattatacatgtagctcaacttgaggtactgctatataaatattcactcacattatcacggaatttatgtatagtttctctaatatagaagataaaattggtgtcctcataactttaacaaagaaaaccctcagtcctatttattaatgggtagaattaaatatataattttatagctcagtttacccagtattcatctgcaaagccagattgctctcattgcttttatatttttaaattgtagcttttagagacctatgatcctcatggaacttaattttttattaaatattcaggtaacagttctgaattcatgtgataatggtggcattatatatgattaaacacttcagaactttctaatgttatcaggagtattttgagggagatatgattatattgtattttctcagataagaaaaatgttttttaacaatattattttaatctgttttaagcatctcttagatttacattataactacataaagcagtgaagcaaaggcaaattaagataaagctagaaagtctgaacattttatttcaaaatcatacgaatcggggtcagttaagcctcagtattcttagcttttgttgattttggcactatctttatattattaaatatatttgttgtttggatatttcatataaagatggctataattacatatttcattcccaatttgtgtgtgttggggggtacttttaaaggtgactattgttttgtacatctaattttgggaaagcaagtctataagacatcttgtgatttcttaatgtttttgtttgtatgtttttcaaagatatcactgtcctttatcatgttttgaagattgtttaaaattcattttcctaaattaatgtgcaagtaatgttttgaggatatcagtgttttatattaaacatatttccaattcattaaattgaggtgtaatttttttccttaagaaacatgagctactgttagaaataaatttccagttgtatgctgctctgtgtatatcatg

SEQ ID NO: 342007 - DNA, 2863 bp, Homo sapiens
tcctttcccctccccctccctctccaagccggaggggtcctgaggtgacagcgcctgcaactgaaatttcagcagcgggagaagatggacaagagaaagctcgggcgacggccatcttcatccgaaatcatcacagaaggaaaaaggaaaaagtcatcttctgatttatcggagataagaaagatgttaaatgcaaaaccagaggatgtccatgttcaatcaccactgtccaaattcagaagctcagaacgctggactctccctttgcagtgggaaagaagcctaaggaataaagtcatctctctagaccataaaaataaaaaacatatccgagggtgtcctgttacttccaagtcatcaccagaaaggcaactcaaagttatgttgacgaatgtcctatggacggatttaggacgaaaattcagaaagaccctacctagaaacgatgctaatttatgtgatgccaacaaggtgcaatcagactcattgccttcgacatctgttgacagcctagagacatgtcaaaaattagaacctcttcgccaaagccttaatttatctgaaaggatacccagagttatattgacgaatgtcctgggaacggagttaggaagaaaatacataaggaccccacctgtaactgagggaagtttgagtgatacagacaacttgcaatcagagcaactttcttcatcatctgatggcagcctagaatcttatcaaaatctaaaccctcacaagagctgttatttatctgaaaggggctcacaacgaagtaagacagtagatgacaattctgcaaagcagactgcgcacaataaagaaaaacgaagaaaggatgatggcatttctcttttaatatctgatactcagcctgaagaccttaacagtggaagtagaggttgtgatcatctcgaacaggaaagcagaaacaaggatgttaaatattctgattcaaaagtggaactcactctgatttccaggaagacaaagagaaggcttagaaataatttacctgattctcaatattgtacttctttggataagtcaacagaacagacaaaaaaacaagaagatgactcaacaatatccactgagtttgaaaagccaagtgaaaactatcatcaggatccaaaactgcctgaagaaattacaactaaacctacaaaaagtgattttactaaactatcctcacttaacagtcaggagttgactttgagtaatgccaccaaaagtgcctctgccggttcaaccactgaaaccgttgagaactctaattccattgatattgtggggatttcttccctggttgagaaggatgagaatgagttgaataccatagaaaagcctattctaagaggacataatgaagggaaccaatcactgatctcagctgaaccaattgttgtttccagtgatgaagaaggacctgttgaacataaaagttcagaaattcttaagttacaatctaagcaagaccgtgagacaactaatgaaaatgagagtacttctgaatcagcattgttagaactaccattgattacatgtgaatctgtacagatgtcatctgaattatgcccatataatcctgtcatggagaacatttccagtattatgcctagtaatgagatggatctacaactggattttatatttacttctgtttatattggtaaaataaaaggagcttctaaaggttgtgttacaatcacaaaaaaatatattaagatcccatttcaagtgtccctgaatgagatttcattgctagtggataccacacatttaaagcggtttgggttatggaaaagtaaggatgataatcacagtaaaaggagtcatgctattcttttcttctgggtctcttcagattatcttcaagagattcagacccaattagaacactctgtattaagccagcaatcaaaatctagtgaattcattttccttgaactacacaatcctgtttcacaaagagaagaattgaagctgaaagatattatgacggaaataagtataatcagtggagaattagagctttcttacccgttgtcttgggttcaggcatttcctttgtttcagaacctctcttcaaaagaaagttcttttattcattattactgtgtttcaacttgttctttccctgctggtgttgctgttgctgaagaaatgaagctgaaatcagtatctcagccctcaaacacagatgcggccaagcctacttacaccttcctgcagaagcaaagtagcggttgctactccctttctattacatctaatccagatgaagaatggcgagaagtcaggcacactggacttgttcagaagttgattgtatatcctccaccacctactaaggggggattaggagtaactaatgaagatctggagtgtttagaagaaggagagtttcttaatgatgtaatcattgatttttaccttaagtatcttatattggagaaggcatcagatgaacttgttgaacgaagtcacatttttagtagctttttctataaatgcttgacaagaaaggaaaataatttaacagaagataatccaaatctttcaatggcacagagaagacataaaagagtaagaacatggactcgtcacataaacatttttaataaagattacatctttgtacctgtaaatgagtcgtaagtatttcagattatttaagaacatattggaaagaattcagaaaaaaattttgtagtgtttttagattcataatcagtaaaaattatggccacatacatctcaggtattattttaatttttttaaataaaagtagctaaggcaatgaattccttatcttggattttggtttgacaatggttatgttgtaaaagtagtaaaaaa

SEQ ID NO: 342008 - DNA, 850 bp, Homo sapiens
tcctttcccctccccctccctctccaagccggaggggtcctgaggtgacagcgcctgcaactgaaatttcagcagcgggagaagatggacaagagaaagctcgggcgacggccatcttcatccgaaatcatcacagaaggaaaaaggaaaaagtcatcttctgatttatcggagataagaaagatgttaaatgcaaaaccagaggatgtccatgttcaatcaccactgtccaaattcagaagctcagaacgctggactctccctttgcagtgggaaagaagcctaaggaataaagtcatctctctagaccataaaaataaaaaacatatccgagggtgtcctgttacttccaagtcatcaccagaaaggcaactcaaagttatgttgacgaatgtcctatggacggatttaggacgaaaattcagaaagaccctacctagaaacgatgctaatttatgtgatgccaacaaggtgcaatcagactcattgccttcgacatctgttgacagcctagagacatgtcaaaaattagaacctcttcgccaaagccttaatttatctgaaaggggctcacaacgaagtaagacagtagatgacaattctgcaaagcagactgcgcacaataaagaaaaacgaagaaaggatgatggcatttctcttttaatatctgatactcagcctgaaggtttgtgaaccttagaaaactgttggaatttgaattttttcttattgtattaataataatttttgttataaataaattattttattttactttgaaaggatatgtgaaagtaaagggagattatttggcaacacaaataaaattgctaaacctacaaaaaatgta

SEQ ID NO: 342009 - DNA, 4056 bp, Homo sapiens
atggggcaatgatttcagtttcctatatgacttgataaaaattatataagaatgtaatggtttgccttttttttttcctgcaataagagttccatccaagggactgagccagaagtcacataccacctttatccccctgttaaatgtcattttcttccttcctaaaacctttcttttgacagtcaaacttggttttatatccttctcttttaactcccctgattaggtaaagaaaagaaactagtatttgtgtgtatgcaagccaaccctgttcaaggtggctgtctcagatggtttaataagggggtccccaacccctgggcttcagactggtaccagtctgtggcctgttaggagccaggccactcagcaggaggtgagcagcagtgagcgagcattactgcctaagctctgcctcctatcagatcagtggcagcgttagatactcacaggagcgcgaaccctgttgtgaacagtgcgtgcaagggatctaggttgcgtgctccttatgagaatctaactaatgcctgacggtctgaggaggaacagtttcatcttgaaaccatcccccctaaccttgtccctggaaaaattgtcttccacaaaaccagtccctggtgccaaaaaggttggggactgctgcattaccataattcctttgtacctcttatgacacattttagttatttgttatagttttttctgcccatattagattatgaatacttctagggcagtgtaggtgactttcattatttgtttttaggaacctaataaatatttgttgaagaaataaaaggaaagatggatgagtggtaggtacatttaacatcatcctgtagtttccttgtgtatgaaaggaagggagatgaattttattttaaagaatctgagaataaaagcctcatttttcctcctccattaagatttttaattaaattaagttaactgattaatttattttttagagatagggtcttcccttgttactgaggccagagtgcagtggtgtgatcacagcctcaaactcctgagattaagcaatcccccaagtagctgggactgattattggtgtgtgtcaccaccctggctaattttctttatatttttagtgacaggagtctcgctatgttgcccaggctagtgttgaactcctgatctcaagtgatcctcctaccttagcatcctaagtagctggaatcacaggcatgagccaccacactcagcccattgagttttaaaacctccctaatgacagatataacagttggagaattctgttaaggtttaatgacagtattttatatcatgcccagatggagctaagcaaaataagtagatttaactgtgtttatactaagttgcacagccagttttggaatctgaaaagcatttaataaattgctgcctttattctgtccatttcattattgtttatagttattaaatttaagaataaccaggggttactataaggagatatatttataatgtgttaaatatgatatatcttaaagaagatggttaaactaaatttaagatatttcaatatataaaaatggctcttgaagtccctatcttaaatgaaaaaatttttatatatcaaatctgtctttcatactctcagaatggcacagagaagacataaaagagtaagaacatggactcgtcacataaacatttttaataaagattacatctttgtacctgtaaatgagtcgtctcactggtatctcgcagtcatttgttttccatggttagaagaagctgtgtatgaagattttccacaaactgtatcccagcagtcccaggctcagcagtcccaaaatgacaacaaaacaatagataatgatctacgtactacttcgacactgtctttgagtgcagaggattcccaaagtaccgagtcgaatatgtcagtaccaaagaaaatgtgtaaaaggccatgtattcttatactagactccttgaaagctgcttctgtacaaaacacagttcagaatttacgagagtatttagaggtagagtgggaagttaaactaaaaactcatcgtcaattcagcaaaacaaacatggtggatctatgccctaaagttcctaaacaggacaatagcagtgattgtggagtatatttattgcagtatgtggaaagcttcttcaaggatcctattgttaactttgaacttccaattcatttggagaagtggtttcctcgtcatgtaataaagaccaaacgggaagatattcgagagctcatcttgaaacttcatttacagcaacagaagggcagcagtagctagttaatctgtacaaacatgacacagatgttctctaagattactggaaagcctcttaccagcatttgtgttagccagctcacagagaagaaaataacttgcagtagttttataataagtcattggaacattatttaaaatatgtaggacacattattagaattgttgggatctcatagatggaatgggaatgggggtgatatagataaacttactagatataaattaaaattttataaatatttcatatttttctgagtaaatatgattggattatgcaacagcatatgtaatatgggaatgttttgtagataataaaacttacatgatctgtacttccacgtgactgggtgctgaggggagttaaagcctccctggtgccagccccagtgcttgtcaaatttgctgacaggtcacatcatattgtaattctattctttgcagctcaagcatgcagtatgaatactgtgtattttttaaaaaaataatttagtatcaaggcttcagaaaatgccatttacggcatcccttctgtatgtaacaaaaagacattcataatgttaggaagatgataaaaattcgctcttttaaagtgcagcttattattctcaattgctaaatacgattactctgctttattttttttcatttcttttgatgtcatatgtgagtatcttataatttagttcatttgttcagggtaaaatttgaaacaaaaaattttacctgtgcaaaatagttttttaaaaattatacatgtagctcaacttgaggtactgctatataaatattcactcacattatcacggaatttatgtatagtttctctaatatagaagataaaattggtgtcctcataactttaacaaagaaaaccctcagtcctatttattaatgggtagaattaaatatataattttatagctcagtttacccagtattcatctgcaaagccagattgctctcattgcttttatatttttaaattgtagcttttagagacctatgatcctcatggaacttaattttttattaaatattcaggtaacagttctgaattcatgtgataatggtggcattatatatgattaaacacttcagaactttctaatgttatcaggagtattttgagggagatatgattatattgtattttctcagataagaaaaatgttttttaacaatattattttaatctgttttaagcatctcttagatttacattataactacataaagcagtgaagcaaaggcaaattaagataaagctagaaagtctgaacattttatttcaaaatcatacgaatcggggtcagttaagcctcagtattcttagcttttgttgattttggcactatctttatattattaaatatatttgttgtttggatatttcatataaagatggctataattacatatttcattcccaatttgtgtgtgttggggggtacttttaaaggtgactattgttttgtacatctaattttgggaaagcaagtctataagacatcttgtgatttcttaatgtttttgtttgtatgtttttcaaagatatcactgtcctttatcatgttttgaagattgtttaaaattcattttcctaaattaatgtgcaagtaatgttttgaggatatcagtgttttatattaaacatatttccaattcattaaattgaggtgtaatttttttccttaagaaacatgagctactgttagaaataaatttccagttgtatgctgctctgtgtatatcatg

SEQ ID NO: 342010 - DNA, 419 bp, Homo sapiens
attacacagacgagttcttttcattagattggttgacataagcttgtcctttcagaatactgcagcaaatataggttgtatgattccattaggataaaagaaatatttttacacaatttttctctgtggcgcagtttagttcaccctctgttagagcaaattactggaagaactggttcttaggtttctaatggcgcagcgttaacagagtgaatgattcacggatgttcttcttaacattcaggagtaacaaggaaggctagcagtgcagcccaggtccagagctgatgaatggtgcagtgctgctgttgtcatagcaaccaagaggaaaaaagcagcaccatataaggatctgtgacatggattctgggaacaatttatattaaaaagctgtaagctcctcatgccttaaagctgta

SEQ ID NO: 342011 - DNA, 295 bp, Homo sapiens
agggtctcatactgtcacccaggctggaatgcaatgaagtaatcacggctcactacaactttaccttcccagcctcaggcgattctcctacctaaacctcccaagcagctgggaccagaggagtaacaaggaaggctagcagtgcagcccaggtccagagctgatgaatggtgcagtgctgctgttgtcatagcaaccaagaggaaaaaagcagcaccatataaggatctgtgacatggattctgggaacaatttatattaaaaagctgtaagctcctcatgccttaaagctgta

SEQ ID NO: 342012 - DNA, 390 bp, Homo sapiens
gattctcccttttggataatgaaagaactaagttttggcttctaacaaccagaagagtctccctgtggaggcaggagagaactgcagctgggctgcccctttgtgaggctcctcagaaggtacccgtggcttacagggcaaagacgaacctccctagcgtaacgcacaggctcttcatgatttctcatcactgtgtttcttaacaagagtatctcccaccattcctacacctacacacgcaccctaccccttagccacaccagacagtcatgattccttcctgttctccatgccaagcctcctcatccttgaggacccaactcaaataacagctaataacacttagcattaaatgagtgcttactgcctaccaggcactagtctcaatgc

SEQ ID NO: 342013 - DNA, 155 bp, Homo sapiens
cgaagtcggatcacccagtagcacgctcacccagcatgactcgccgaatgcatgctgtgtggctgcttctagaatccatttagggataatgtcaaaaggctgcttcttcagagaggccctcgggggtcatcctcagtaaagtcccctcccacccc

SEQ ID NO: 342014 - DNA, 468 bp, Homo sapiens
gaatttgcaatctggtggggtaaagaagggcatgtgggtacaggagagttttggataatggagtcagggttgactagctgttcagacaggtctcggggtggtttataaggtcaccatggtacaggatcagacctcaggtttgcaagtccaaagatgggatttggtcacccagagtgtttcaggctcaggggaactgacttgttgcaggcaaccccacaagagcacaaaccagaatgtcattttattaatatgcattgagaactagaattcacaagcagatcagaatactacaccggctgtgcattttctcccagtaggaaagtctaaatgggaagcatattataaacaagtggctcagtgagctgaggcaggagaatcacttgaacctgggaggcggaggttgcagtgagctgagattgcgccattgcactctagcctgggtgacagagcgagactccatctcaaaaa

SEQ ID NO: 342015 - DNA, 1382 bp, Homo sapiens
ccgcatcgccctgggtctctcgagcctgctgcctgctcccccgccccaccagccatggtggtttctggagcgcccccagccctgggtgggggctgtctcggcaccttcacctccctgctgctgctggcgtcgacagccatcctcaatgcggccaggatacctgttcccccagcctgtgggaagccccagcagctgaaccgggttgtgggcggcgaggacagcactgacagcgagtggccctggatcgtgagcatccagaagaatgggacccaccactgcgcaggttctctgctcaccagccgctgggtgatcactgctgcccactgtttcaaggacaacctgaacaaaccatacctgttctctgtgctgctgggggcctggcagctggggaaccctggctctcggtcccagaaggtgggtgttgcctgggtggagccccaccctgtgtattcctggaaggaaggtgcctgtgcagacattgccctggtgcgtctcgagcgctccatacagttctcagagcgggtcctgcccatctgcctacctgatgcctctatccacctccctccaaacacccactgctggatctcaggctgggggagcatccaagatggagttcccttgccccaccctcagaccctgcagaagctgaaggttcctatcatcgactcggaagtctgcagccatctgtactggcggggagcaggacagggacccatcactgaggacatgctgtgtgccggctacttggagggggagcgggatgcttgtctgggcgactccgggggccccctcatgtgccaggtggacggcgcctggctgctggccggcatcatcagctggggcgagggctgtgccgagcgcaacaggcccggggtctacatcagcctctctgcgcaccgctcctgggtggagaagatcgtgcaaggggtgcagctccgcgggcgcgctcaggggggtggggccctcagggcaccgagccagggctctggggccgccgcgcgctcctagggcgcagcgggacgcggggctcggatctgaaaggcggccagatccagatctggatctggatctgcggcggcctcgggcggtttcccccgccgtaaataggctcatctacctctacctctgggggcccggacggctgctgcggaaaggaaaccccctccccgacccgcccgacggcctcaggccccgcctccaaggcatcaggccccgcccaacggcctcatgtccccgcccccacgacttccggccccgcccccgggccccagcgcttttgtgtatataaatgttaatgatttttataggtatttgtaaccctgcccacatatcttatttattcctccaatttcaataaattatttattctccagaaaaaattt

SEQ ID NO: 342016 - DNA, 1180 bp, Homo sapiens
gttcaatcttggtgcccctcgattctacctagaagcctctcctgccttcaggggccttcacacccatgctgttcccccaggtacctcctcccagaccaggcctggctgatcctccccttccctttccttccagcaacctgaacaaaccatacctgttctctgtgctgctgggggcctggcagctggggaaccctggctctcggtcccagaaggtgggtgttgcctgggtggagccccaccctgtgtattcctggaaggaaggtgcctgtgcagacattgccctggtgcgtctcgagcgctccatacagttctcagagcgggtcctgcccatctgcctacctgatgcctctatccacctccctccaaacacccactgctggatctcaggctgggggagcatccaagatggagttcccttgccccaccctcagaccctgcagaagctgaaggttcctatcatcgactcggaagtctgcagccatctgtactggcggggagcaggacagggacccatcactgaggacatgctgtgtgccggctacttggagggggagcgggatgcttgtctgggcgactccgggggccccctcatgtgccaggtggacggcgcctggctgctggccggcatcatcagctggggcgagggctgtgccgagcgcaacaggcccggggtctacatcagcctctctgcgcaccgctcctgggtggagaagatcgtgcaaggggtgcagctccgcgggcgcgctcaggggggtggggccctcagggcaccgagccagggctctggggccgccgcgcgctcctagggcgcagcgggacgcggggctcggatctgaaaggcggccagatccagatctggatctggatctgcggcggcctcgggcggtttcccccgccgtaaataggctcatctacctctacctctgggggcccggacggctgctgcggaaaggaaaccccctccccgacccgcccgacggcctcaggccccgcctccaaggcatcaggccccgcccaacggcctcatgtccccgcccccacgacttccggccccgcccccgggccccagcgcttttgtgtatataaatgttaatgatttttataggtatttgtaaccctgcccacatatcttatttattcctccaatttcaataaattatttattctccagaaaaaattt

SEQ ID NO: 342017 - DNA, 1340 bp, Homo sapiens
gttcaatcttggtgcccctcgattctacctagaagcctctcctgccttcaggggccttcacacccatgctgttcccccaggtacctcctcccagaccaggcctggctgatcctccccttccctttccttccagcaacctgaacaaaccatacctgttctctgtgctgctgggggcctggcagctggggaaccctggctctcggtcccagaaggtgggtgttgcctgggtggagccccaccctgtgtattcctggaaggaaggtgcctgtgcagacattgccctggtgcgtctcgagcgctccatacagttctcagagcgggtcctgcccatctgcctacctgatgcctctatccacctccctccaaacacccactgctggatctcaggctgggggagcatccaagatggaggggcttcttcaagagctagaatcgcggactttcagtccacaatctgcagaccacagtctgtagaccagctccagcagtcccagtgctggatgaagtaatgcagtatctgagacaggaagggctctaaccatctgtggatataagaaaatttattaaagagttcccttgccccaccctcagaccctgcagaagctgaaggttcctatcatcgactcggaagtctgcagccatctgtactggcggggagcaggacagggacccatcactgaggacatgctgtgtgccggctacttggagggggagcgggatgcttgtctgggcgactccgggggccccctcatgtgccaggtggacggcgcctggctgctggccggcatcatcagctggggcgagggctgtgccgagcgcaacaggcccggggtctacatcagcctctctgcgcaccgctcctgggtggagaagatcgtgcaaggggtgcagctccgcgggcgcgctcaggggggtggggccctcagggcaccgagccagggctctggggccgccgcgcgctcctagggcgcagcgggacgcggggctcggatctgaaaggcggccagatccagatctggatctggatctgcggcggcctcgggcggtttcccccgccgtaaataggctcatctacctctacctctgggggcccggacggctgctgcggaaaggaaaccccctccccgacccgcccgacggcctcaggccccgcctccaaggcatcaggccccgcccaacggcctcatgtccccgcccccacgacttccggccccgcccccgggccccagcgcttttgtgtatataaatgttaatgatttttataggtatttgtaaccctgcccacatatcttatttattcctccaatttcaataaattatttattctccagaaaaaattt

SEQ ID NO: 342018 - DNA, 932 bp, Homo sapiens
ccgcatcgccctgggtctctcgagcctgctgcctgctcccccgccccaccagccatggtggtttctggagcgcccccagccctgggtgggggctgtctcggcaccttcacctccctgctgctgctggcgtcgacagccatcctcaatgcggccaggatacctgttcccccagcctgtgggaagccccagcagctgaaccgggttgtgggcggcgaggacagcactgacagcgagtggccctggatcgtgagcatccagaagaatgggacccaccactgcgcaggttctctgctcaccagccgctgggtgatcactgctgcccactgtttcaaggacaacctgaacaaaccatacctgttctctgtgctgctgggggcctggcagctggggaaccctggctctcggtcccagaaggtgggtgttgcctgggtggagccccaccctgtgtattcctgggtggagaagatcgtgcaaggggtgcagctccgcgggcgcgctcaggggggtggggccctcagggcaccgagccagggctctggggccgccgcgcgctcctagggcgcagcgggacgcggggctcggatctgaaaggcggccagatccagatctggatctggatctgcggcggcctcgggcggtttcccccgccgtaaataggctcatctacctctacctctgggggcccggacggctgctgcggaaaggaaaccccctccccgacccgcccgacggcctcaggccccgcctccaaggcatcaggccccgcccaacggcctcatgtccccgcccccacgacttccggccccgcccccgggccccagcgcttttgtgtatataaatgttaatgatttttataggtatttgtaaccctgcccacatatcttatttattcctccaatttcaataaattatttattctccagaaaaaattt

SEQ ID NO: 342019 - DNA, 545 bp, Homo sapiens
gaggtggagacctggaatttcaattttctgaaggcatcttgggagagacctggtagagctaatctgttagcctttgagaaccgctgctgagaggaatggtgttgggggggaatagtcctttgaggaggcaacgaggaggggagacccccaaacctgattctgtcctctttcctcccagttcccttgccccaccctcagaccctgcagaagctgaaggttcctatcatcgactcggaagtctgcagccatctgtactggcggggagcaggacagggacccatcactgaggacatgctgtgtgccggctacttggagggggagcgggatgcttgtctggtgagctccctcgagccccccacccctggccaggagggcctcgggaaggagccagcgtcagtcctgtccccactgagccccacaacctctccctggcctcctccccagaactggctgtgcctgacagtcccgggtccccatagaaccagcctcagcctggctcagccactcacttatttgttcagacattaaactgggcatcccagctg

SEQ ID NO: 342020 - DNA, 401 bp, Homo sapiens
caagagctagaatcgcggactttcagtccacaatctgcagaccacagtctgtagaccagctccaggcaaggcgtggggatccctcaggtcctggtaattttcaacatcgagtggacatttattgaacacttcttctatagcagtcccagtgctggatgaagtaatgcagtatctgagacaggaagggctctaaccatctgtggatataagaaaatttattaaagaggtagggtcttaggtttcacattcatgttctaattcagcagggccagaggtggagacctggaatttcaattttctgaaggcatcttgggagagacctggtagagctaatctgttagcctttgagaaccgctgctgagaggaatggtgttgggggggaatagtcctttgaggaggca

SEQ ID NO: 342021 - DNA, 351 bp, Homo sapiens
gaccccttctcactgggtgctgggggcttctcgctgggcgctgagggaccctcctcactgggtactgggacccctcctcactgggcgctgagggaccctcctcagggggtgctgggacccctcctcactgggcgctgagggaccctcctcactgggtgctgggacctccacctcactgggcactgggatcccttcttactgggtgttgggggccttcctcactgggcgttgagggcccctcaccactgtgtcctggggcccctcaccggcctaaccgtttccttctcttgccctcagccatcctcaatgcggccaggatacctggtgagtggagctggcagctctgacggg

SEQ ID NO: 342022 - DNA, 699 bp, Homo sapiens
cctctctccctcctggccttgcctctctcatctcctttccgcttctgctctgtttatctcttgctccttaactgctctgtgcctcggtttcttctacggctgtgaggatgaaacagaaaacgcagcaagtacgcagcgcgcctcggtctccagttaccgtcggcgtcgccatcgcctgctccctctcgcctccgtgttctcccatctcctcgtcctccgctgcttgcctctggggaagcaccgttttgtgttgttcctgccgcaggaggtcaggggagggcacaccagcggcagcagcgtccagagccgaggggctcaggtctgtgcctccctcgaggagccggtcctggtccccggaaggcaggctggacgggaagctgcgggagggcagggtcacagctgtgcagccagggcctggccaggccccaggaaatgccccgccggtaggggccctggggttgagagacttgagagtctccctgggcactggagggctagaggttcctcaccaccaggtactcaaggggaccccctcctcactgggcgctgggacgcctgctcactgggcgctgggacccctcctcactgggcgctgggaccccctcctcactgagcgctgggaccccctcgtcactgggcgctggggacccctcctcactgggcgctggggagccctcctcactgggcgctggggacccc

SEQ ID NO: 342023 - DNA, 1322 bp, Homo sapiens
cctctctccctcctggccttgcctctctcatctcctttccgcttctgctctgtttatctcttgctccttaactgctctgtgcctcggtttcttctacggctgtgaggatgaaacagaaaacgcagcaaccatcctcaatgcggccaggatacctgttcccccagcctgtgggaagccccagcagctgaaccgggttgtgggcggcgaggacagcactgacagcgagtggccctggatcgtgagcatccagaagaatgggacccaccactgcgcagcaacctgaacaaaccatacctgttctctgtgctgctgggggcctggcagctggggaaccctggctctcggtcccagaaggtgggtgttgcctgggtggagccccaccctgtgtattcctggaaggaaggtgcctgtgcagacattgccctggtgcgtctcgagcgctccatacagttctcagagcgggtcctgcccatctgcctacctgatgcctctatccacctccctccaaacacccactgctggatctcaggctgggggagcatccaagatggagttcccttgccccaccctcagaccctgcagaagctgaaggttcctatcatcgactcggaagtctgcagccatctgtactggcggggagcaggacagggacccatcactgaggacatgctgtgtgccggctacttggagggggagcgggatgcttgtctgggcgactccgggggccccctcatgtgccaggtggacggcgcctggctgctggccggcatcatcagctggggcgagggctgtgccgagcgcaacaggcccggggtctacatcagcctctctgcgcaccgctcctgggtggagaagatcgtgcaaggggtgcagctccgcgggcgcgctcaggggggtggggccctcagggcaccgagccagggctctggggccgccgcgcgctcctagggcgcagcgggacgcggggctcggatctgaaaggcggccagatccagatctggatctggatctgcggcggcctcgggcggtttcccccgccgtaaataggctcatctacctctacctctgggggcccggacggctgctgcggaaaggaaaccccctccccgacccgcccgacggcctcaggccccgcctccaaggcatcaggccccgcccaacggcctcatgtccccgcccccacgacttccggccccgcccccgggccccagcgcttttgtgtatataaatgttaatgatttttataggtatttgtaaccctgcccacatatcttatttattcctccaatttcaataaattatttattctccagaaaaaattt

SEQ ID NO: 342024 - DNA, 200 bp, Homo sapiens
catcgccctgggtctctcgagcctgctgcctgctcccccgccccaccagccatggtggtttctggagcgcccccagccctgggtgggggctgtctcggcaccttcacctccctgctgctgctggcgtcgacaggtacgtccggaggctgctcctccctcctccctctcacctccaccctccttccctccttccctccctc

SEQ ID NO: 342025 - DNA, 324 bp, Homo sapiens
atcagactcaaaacataacaaaaatctaatcttctcatttagaggtcaccccataaacatcaggacaaaatcccaataacttatattggcattcaagtcccttcacaacttggcctaaacttatatcctccccctgatctccaccacttcccacaagtcctctatattctagccacatgtttctctcataactcttctttgaaatgtctttccacaacagctttgcatatgctgctctgcttccccatctagaccatgagcatctcaaaggcagaaacaacatttaattcatctttgcatcccaacagcctaaccctgagtctg

SEQ ID NO: 342026 - DNA, 1153 bp, Homo sapiens
caaaaaacaaaaatgtagcatgtaaccatagatatcatataagaatgtctgagttatgcaggatagtcagctggaaaattagttaccagagaacagccaataaaagtgagagtgttgcaacagttttagttaccacagtcctatagagttgcacattattatcctttgtactgaaagattcagctaacaaccatgacatgattcagatatacaaatgcagctaaaaggaatgatgggacatgaatctgtttccacattctacactagaacaccattcttaggtctatagctacagtaaccgtttatagggcttttctcgtcatttgtgactgaagactcatgaaacactagtcaattttctttgtttaaaaaaagtcacggccgggtgcagtggctcacgcctgtaattccagcacattgggaggccgaggcgggcggatcagctgaggtcaggagtttgagaccagcatggccaacatggagaaaccccatctctaccaaaaatacaaaattagctgggcgtggtggcgcatgcctgtaatcccagctactcaggaggctgaggcaggagaatcacttgaacccaggaggcggaggttgcagtgagccgagatcatgccattgtactcctgcatgggcaacgagaggcgaaactctgtctcaaaacaaaacaaaacaaacaaacaaacaaaaaaagtcacttcatctcttcttccttcaggataagtcagtatatctctaagagccttaagataaaaaagaacatggatgaaccttgaaaacatcatattaagtgaaaaaagccagtcataaaggatacatttttaaaatcctatttatataagaggcccagaataagcaaatctatagaaatagaaagtagattggtagttgcttagagcaagggaagggggaggagcggggagaatgaggggactgaggagcgaaggccattctttttggaataatgataactaaaatgttctaaaattgattgtggtgatagacagaaaactctaatattctaaaagccactgaattgtacactttgagcaaactatatgtcacacacctcactgtctcataaacgttctaagggactatgatattcgcctcatacatcatctttcgcgcttcggtccgatgtcgcgcc

SEQ ID NO: 342027 - DNA, 310 bp, Homo sapiens
ccttttatcctttgtgactttacaaccttggatttgaaaatcatggtgctgtctatggcaggcatatatgcggccccgccaggggctctgggctcttgtcctcacaggtagagactgtgggttccaaatacagtgaggaacagtggaggagcatgggccttgagaccagacacacataggcctgaatgctagccagctaggagaccttgatcatgttcttgtacctctcctttgccagctaggagaccttgatcatgtccttacaactctctgagccacagcttccctgtcattagctgaggggagttgc

SEQ ID NO: 342028 - DNA, 501 bp, Homo sapiens
tatttccagctcctcttggacgttgccctgatggatgctgaactccctgtgggcccgcctgtttcactggcccggcccctcactctgatggggcaagatggagcgatgtctatacacggacagatgttatgcaccaaggaagaaaatctgctaatcgaaagcagcttcagctaattgtggcactctcccttctgcgtggtgccctgaaatagtagccatgctctgttcttttttcacatcagggagccccaactggcaacttaaatgaggttgcaaagaagtcagttacacagacctctgctgccagtttccatggatgaggccttgctgatgctccttggataggacccgtgtgcaactgtttgtggacttggcttcttgctgtggataatttggacccactgttgggctggaaaagcctcatttaaccctggggaaaactggaaccttcagaaatttaatggaatactaagcccaagaacacatggtctgaccttgaac

SEQ ID NO: 342029 - DNA, 142 bp, Homo sapiens
tacctttatgtgtccaggcactgtgaggccactaaggattcagaaatgaaacaattcctgctcacagatgatggaagagtgatcttacaagacaaatgatagaaagcagcatactctatttcataagaaatcagaacactta

SEQ ID NO: 342030 - DNA, 762 bp, Homo sapiens
tggattagagctgccttcctggaccagtaggatgcagtggagggagcaccatgccactcttagggtccaggccatgagaggcattgcagattttgcttgtgctgtcttggaattcagccctgacaccaccttgtcatcaagccagtccagcctactggaagataagcagccgcatggaggagaaccaaggggtgcagtcaacagccagcaccaacttgtgacatatgagtgaaacatcgtggaccctccagcccagttactcctccagagccacaggagtgaacccaggaaaaaccagcagagaggccagccaacacacagaactataggaaataaatccttgctattttacatgcctgtctcatataggcatgtacaataacaaggatcatttacacgcctttataatacaatattataggtgtgtaaaatacttatgccacatgcagggagatgccccttcctcccagcaagtcagtcccacagcccaacaaattcctcccaccacagactctgtcaggagagccctgacgtgtgaatccaccctgtttgccaagttccaatgtgtaacacagttcttagcaaaacacattggatttgggttttgttatgttttgtttaaagcattctcccaaatccacatgcacacaattggctggggtttgtcaaatatctgctggatccaagctcgcagcctctattatcccactccccatctggatggcagctctgtacatcagctggctgagttctgcctatcca

SEQ ID NO: 342031 - DNA, 218 bp, Homo sapiens
tttctgggaagttctttatatcccttcgattgtatttttttctgtctaaacttgcacaaatgggtacttttgtttccaactaagaatcatggcttgcaaagattaggagatttgttaagtagagtgaccaaaagaacatgtatatcctcagaatagtgttaagcaagaaaagtgaatttacttagtgagctccttctaggggaaagcaggaattaagt

SEQ ID NO: 342032 - DNA, 670 bp, Homo sapiens
cttagcctcctgagtagctgggactagaggcatgagccacagttcctggctaattttaattttaatttttatttttgtagaaattgggcttcactatgttgcccaggctggtctcaagctcctgggctcctgccccaaccttccaaagcgctgagattacaggcatgagccattgcatctggccaaaaatttttagaaatggaaaaaagcatacagaatatgagtataaagaaaggaaatatttttgtatagctgtataatgtatttgggttttaagctaagtgttataagagtcaaaacttaggaaaaaaactacaaagcttattaagtaaaaatgttacagttgtttattgttgtagaaagaaacacttcaaaaattttagtgtagcctaagggtatagtgttttgaagccacagtagtgtatagtcatcctggatcttcccattcactcaccactcacttgctgactcacccagagcaacttccagtcctgcagcctccattcctggtaagtgctctatgcaggtgtaccactttttatgattcccccgttgctggatgctatctttatgagatggccagagtacacctcttctactacttcacttgccacttctagcctagacagtgacccttgttaaaacggtagaggaagtacagtgacaactg

SEQ ID NO: 342033 - DNA, 416 bp, Homo sapiens
ccatgtacagtgacccacaaaataagccttcatcaagtgatagacaatttcttttctggaaaggttggcagtagcagactggaacaaatgagaacaaaaaggatctagatatttctgatttagtgctggcaaacattcaataaaataatgaactaacctggcgttagacatttacctagtaaatttttactcttttcaaaaacgattcttttaaatgacaagggctaagttaggatttcagaattaatgataataaattaaaattaaaagttatttgaacaatactccatcctgactcaacttcagccatagtcaaaagagggactttcacctttctaacattaaagaattaagtaattaggaaaaaaggaacaattatctcaaaaagtttttttttgtttttttttttttttttt

SEQ ID NO: 342034 - DNA, 196 bp, Homo sapiens
  misc_feature (10)..(10): n is a, c, g, or t
cagctggcantagagctactccagcctgggcagtagagctactccagcctgggcataagagctactccatcctgactcaacttcagccatagtcaaaagagggactttcacctttctaacattaaagaattaagtaattaggaaaaaaggaacaattatctcaaaaagtttttttttgtttttttttttttttttt

SEQ ID NO: 342035 - DNA, 812 bp, Homo sapiens
gggaataatgctgcaataaacatgtgtgcatgtgtctttatagtagcatgatttataatcctttggatatatacccagtaatgggatcgctgggtcaaatggtatttgtagttctagatccttgaggaatcgtcacactgtcttccacaatggttgaactaatttacactcccaccaacagtgtaaatagagttcctctttcacccagcaccacgtaaaagcaattgtttgagctttgactcttgcctctccacttggtgtggtgttgcagacccctaattcccattgatgtgatcactctttggtcacacagaacagaagatcccagaactggctcagtctcaggtcaggctccttagactgagaactaatattatggtatccaaaagcagcagttgagcttttccttttgctcccctgcgattacatcaatatttacaaagtggtccatgataatcagttacacccccaacatccccttgggagtctccgggactgctgtcctacagtctcctcgactctgggatccagcatgcttgcctctgatggccgctgcccgtgggctgcccagaactcctcccaaggctgatgctgtctggaccatgtgtgggcagcacctgtcccgaagcgaggcctgtgttccgtggcctgtgctctgggcttgtctggtagcggcccacctgagtgggatgaggccccggactaggagggtccccaacgctgtttgtttctttagtccttcagcccagggtttctttagaggaatgttctaattgcaaatgatcaagactatgatcattatggtctttgta

SEQ ID NO: 342036 - DNA, 706 bp, Homo sapiens
ggaaatttgatgaaagcaactctttagggggattatcttgccagtgcatgtgtaggacgcgttgtttcagaagaccagttagaatattacaacagtctggagctagtgtttcccaaactatacaactgggaatagtaattctgagagctcaaaatagtaataaaagcacctatttgggggatttttttttcttgactggacattaaaggcctgtgccagagaaatccataatttcacaaacttatttgcagataaaaggctttgttcattgtgtacctattcataaacatatcactgtgttccactgaaattactggaaattttggtcttatcaattacctacttatttataaatctatctaagaaacaatagaagaaagggaaagataaaactcaaaacttcattagaaaggtactgagacatcatttagtccagaccctgtctttaatcttggtaatcagaaaccgaatgttacctttgactttgacacctttctggtcaaattaagtagtgcctttaatgatacttgtttgccaatcctctttccctcatgagaccataaaatacccaataatcagattaacctttgtcttaccatcattgtaatctctaaatctggctgatagtaggtggtagaaaaatacttgttgacttgaaagtgatgagaaaactaaacagtttgtggcatacctgtaattacatgga

SEQ ID NO: 342037 - DNA, 764 bp, Homo sapiens
ggaaatttgatgaaagcaactctttagggggattatcttgccagtgcatgtgtaggacgcgttgtttcagaagaccagttagaatattacaacagtctggagctagtgtttcccaaactatacaactgggaatagtaattctgagagctcaaaatagtaataaaagcacctatttgggggatttttttttcttgactggaaaaaaaaggaaacattacatataaaatcttcttcttggagatacactacacattaacacattaaaggcctgtgccagagaaatccataatttcacaaacttatttgcagataaaaggctttgttcattgtgtacctattcataaacatatcactgtgttccactgaaattactggaaattttggtcttatcaattacctacttatttataaatctatctaagaaacaatagaagaaagggaaagataaaactcaaaacttcattagaaaggtactgagacatcatttagtccagaccctgtctttaatcttggtaatcagaaaccgaatgttacctttgactttgacacctttctggtcaaattaagtagtgcctttaatgatacttgtttgccaatcctctttccctcatgagaccataaaatacccaataatcagattaacctttgtcttaccatcattgtaatctctaaatctggctgatagtaggtggtagaaaaatacttgttgacttgaaagtgatgagaaaactaaacagtttgtggcatacctgtaattacatgga

SEQ ID NO: 342038 - DNA, 961 bp, Homo sapiens
ctgctgagaaaaccaaacacatacatcgacagttttagaaggcaatgtgttcttcttgcattgagtgtaatgggaagagagttagaactggaaatagagagaaagttttctggaaggagtgtcacctgaactgaaaaattgtctagaaacaaagttgtcaaattatgcagtttagcttgctgcctgatttttttgtaaagaaagttttatgggaaccacagcaatatttatttcagtgttgtctgtggctgctttagcactacaattgcaaagttaagtagatgtgatgaaggcatatgatccacaaagcctcaaatatgtactacatggcccattacaaaaagttggtcaacacctgcattctagaaagcagaaacatatggtactattcaaggaatcacaagcaaagattaaggcagggaatggtagtgtctgaagctggtgaggtggcagagtctagatcactgagatcctgcaccccatagggaacgttcgctttctccagggcaatgaggatcaatgcagggtattaagcagtgacactacagagtcaagcttgaactttggatcgattagtctgtttgcttcatggggtatagattggagggggaaaagactgttagaaaggaaactattaggaggtttgtagaagtaatttatgctgtaattaatgaactgagtagaagtttgaccataaatatgtgaaatggaatattacatgatcattataaagaaatatatctggattatattgacaaggaaagataactacagtatgtttagtaaaaataatcaaggaaactgcctatacaaacatacaaaacatatgtgttactttatgcatagaagaaaaatgaagagaatatacagaaaaatgtcaaaagtcttttgtggacggagaggaggtaaaattacaggaaactatcgcctttaattttacatatttctatactctttttgc

SEQ ID NO: 342039 - DNA, 1374 bp, Homo sapiens
aaaatcactatatttggtgacgaaggagtcccagtgcaagtggatggtgaagcgtgggttcagcctccagggattatcaaaattgtgcacaaaaacagagcacaaatgctaacaagggacagagcctttgagagcactctgaaatcttgggaagataagcagaagtgtgattctggtaaaccagttctccgaacccatttgtacatccatcacgccattgacttggcaacagaagaggtgtcgcagatgcagctatgctcccaggctgcagaggagctcattactaggatatgtgacgcagccacaattcactgtcttttggagcaagaactggcccatgctgtgaatgcctgctcccatgccctgaataaagccaacccaaggtgcccggagagtcttacaagagacactgccactgaaatagccatcaatgtgaaggcgctgtataatgaaacagaatctttgctagttggcagggttcctttgcagctggaatcgccacatgaagagcgagtatccaatgccttacactctgtggaggtggaattacagaaactgacagagattccttggctttattatatcttacacccaaatgaggatgaggaacctcctatggattgcaccaaaaggaacaacagaagcaccgtatttcgaatagtgccaaagtttaaaaaggaaaaggttcagaagcagaagacaagttcacagcctggatctggggataccgaaagtgggtcatgtgaagcgaattctccagggaattaaagagcttggaaggagcactccacagtcggaggtgtaatcatattggtgctatttcttggaagagaagttattgccacttaatacaaagtccttggaagcaagtggctgttcttgtagttttctgcatagataagtaagcaccactgaagcacctctgtggcttgatattttgctgtgggtgaaattttgatttgaggtattagaaaatatttttgtgccgaacaatacattccacaaagccattttctttttgtgcaaacctgacatgttcaaatatattcacaatggtaataaggtaggaggaatctgagacgattgcattgtctaaacagtggaattgcaaaatgtttactttccatagatctggtctgatggaatgttcctactgtgcaactgcataacaatatgtggttaaaacttcctaggtttcattacgggggggcattggccattttcttaaaatcataggttaggagactaaaatataaattaagttgtgatttgaatgtagattggtatcacctccaactcctagtgcttagtggtcaaatatgttgaaaacctttccaatactatgaatgaatgcaaatcttaatgcacgatgtt

SEQ ID NO: 342040 - DNA, 1603 bp, Homo sapiens
aaaatcactatatttggtgacgaaggagtcccagtgcaagtggatggtgaagcgtgggttcagcctccagggattatcaaaattgtgcacaaaaacagagcacaaatgctaacaagggacagagcctttgagagcactctgaaatcttgggaagataagcagaagtgtgattctggtaaaccagttctccgaacccatttgtacatccatcacgccattgacttggcaacagaagaggtgtcgcagatgcagctatgctcccaggctgcagaggagctcattactaggatatgtgacgcagccacaattcactgtcttttggagcaagaactggcccatgctgtgaatgcctgctcccatgccctgaataaagccaacccaaggtgcccggagagtcttacaagagacactgccactgaaatagccatcaatgtgaaggcgctgtataatgaaacagaatctttgctagttggcagggttcctttgaaaagtgccacctttggggcatcctttgctctgagaagagaagctgaaaggctgcatgaaagccatcgctcttacctacctccgccaagaaaagcttttagaagttgatttcagaattgaccagcagctaaacacgcgctggccttgagataagcaatattaaacaattgcagctcatccaccagcagagctgactaactgaggccccctgctccacaagccagaactacagctttgattgaataaaagactggtttcagtatttttctcctgctaagagaccacccacagatcgactagttccagccgagttacagatgctgtgcatttgagtgccttcctttccctgcttcaccttttgacatatagggcttacttgtaatatatttcaatgttaagtctccacctaagggaagcatgagatgcatgtaacatgcatgtttattcagtatgcatgccatgttcccccttcatgaatatctggacgaaagactgcatagctcctcccgtaacctgttgaatatatacatatatttggccaacctgttcaacaaaacgtatgtctcatccttccctccctcgaagtacccgctgacagaggcttctcacagaagctacacttctcagcctgtcagaatggccacattgtaggctgcgagtctttatagcaaacaaagtctcctttctaaatttgtgatttttaagctgataccatagaattcatctttcaaatcaggacacttttaagagtgaaatgaagtgctaaaaatcctggtatcttttttcaaaaatttactaactgacaaatacatttttattttttgatggatctgccaaataattattttgaaacactatttcaaaaatattttttctagaaagtagaataacatatatctgtgtacaccaaagaaaacttttaaaacttctttacatatataaaaagtagaaattttataataatataatcagaataattacccctttagtcattttttgaaaacacatttgtctcaaataccatgtcattctatttttctaaagaatgttttcttttccttatatggtcttgctatgttaaaattttgaataaaattgtcccaatattttcttcaaa

SEQ ID NO: 342041 - DNA, 262 bp, Homo sapiens
agatgcagtcttactgtgttgcccaggatggtctcaaactcctggctacaagctatcctcctgcctctgtctcccaaagtgctggggttacaagcgagagccaccaggcctggcctaattgcttcttaacaacttactattctttgttcactacagtgtatacataactgactgtttctttggagcttcattttgtaatgaaggctctggtcacgtgtaaaacttgtattaaataaatttgcatgcttttctcctgttaatc

SEQ ID NO: 342042 - DNA, 171 bp, Homo sapiens
cttgtccccttttgcctgaggacacaccccagcaaacacaccccaggctttccacaaaacttaatgcaggggggacgggaaatcccatttccctcacgatgaccctgggagcgccggtgagtagaggtgcccacttctgcccttgggtcccagacccgcctgttcttccga

SEQ ID NO: 342043 - DNA, 1042 bp, Homo sapiens
tcattttattttattttacagggagtttctaatttagagaatgcaaaaccaaaaaagagaaagttattccggagatttatgtctgaaaataaaatatttgaaggaaaaactgtgaatgacaaaatctggcaggaacacagcaagcataagaatgattcccacatcagaaggccctgtcagctaaaagatctaaatgaagatgattttctaagtaacaacatacatacctatcaaggaaaaactctacaaggaacttcctatcaggtgacctctgaatgttggagtccatttcactatcaaagacatgttgagaccactgttgatgaactggctcaagaatttatgtaaagtaacaaaagaagatacttatctagtcaaatgtccccaaggatatttgaggaacaatgaattcctgtgatccaatccttcaatttaaagatgaagggctgaagtgcagagaggagaagtggctcactcaagttcacatggccagtcacaaagcagattttcaaagcagaacaatcattagtcggcacacaagggcaggttcttactctaggttttcttaacatttcttgtgtatatgaaataaatattagataaaaatgtttttttactgtgtaattttccattcatagctcctcttcttgctaagaatccaatagatacttaataaaaattaattaatttgcatactggctcttaaatttcctattgttcataatttttggtcagctaggaggtgtacccagaaacagaaatgttcttatgagtagttctagaaacttcttcaaaatttcagagcagaggatattacgcaggaagtaagaaagatgtggcttctgtggccttttctcttaaatcaacacaacccccatttgcaatgctggtttgtgtaatcctggcaactcccagctagcttggcagtgtgtccacattcaaagactgacccaaagctataggtcagtgagcaaaaagcagtcttggcttcccctgcagaagtggagaaatggcagtgacattgcgacttcattatactatg

SEQ ID NO: 342044 - DNA, 418 bp, Homo sapiens
ggcaatcatatttttcaaagcagggcaacaagagagtgaagctggtcaaaatgaatcttttctgcatttcgctggagggctctatggatagcttatatgagccaatcccagagcaacaagctaaccaagaaaacatgtctagtagaactgattctcctatcccaccctttggagagagtgaacaaacaccaaacaatctcttcgtgggagtttctaatttagagaatgcaaaaccaaaaaagagaaagttattccggagatttatgtctgaaaataaaatatttgaataatcctctttggtagttcattggctgctcatcttccagctctccatgtgtagcttggctgctccgtggtcaaggtgacttgttagagatcattttagatctgtgaatctaggagacaataaaaaattagc

SEQ ID NO: 342045 - DNA, 648 bp, Homo sapiens
ggcaatcatatttttcaaagcagggcaacaagagagtgaagctggtcaaaatgaatcttttctgcatttcgctggagggctctatggatagcttatatgagccaatcccagagcaacaagctaaccaagaaaacatgtctagtagaactgattctcctatcccaccctttggagagagtgaacaaacaccaaacaatctcttcgtgggagtttctaatttagagaatgcaaaaccaaaaaagagaaagttattccggagatttatgtctgaaaataaaatatttggttagtgattcctaaggttacaagtgtaaacgatgtattctgtctccccacaagttcttttctcctgctcctgccacaaagcaacaaaactgattaatgaaagtcaaattgagttgtctttgaattatatagaagaacattttttaaaagtggcttcattctaactttaaatggctatgacaaagaaatcattgatttatttgcaatattttccgtttatatttaaacagaataatcctctttggtagttcattggctgctcatcttccagctctccatgtgtagcttggctgctccgtggtcaaggtgacttgttagagatcattttagatctgtgaatctaggagacaataaaaaattagc

SEQ ID NO: 342046 - DNA, 747 bp, Homo sapiens
ggcaatcatatttttcaaagcagggcaacaagagagtgaagctggtcaaaatgaatcttttctgcatttcgctggagggctctatggatagcttatatgagccaatcccagagcaacaagctaaccaagaaaacatgtctagtagaactgattctcctatcccaccctttggagagagtgaacaaacaccaaacaatctcttcgtgggagtttctaatttagagaatgcaaaaccaaaaaagagaaagttattccggagatttatgtctgaaaataaaatatttgaaggaaaaactgtgaatgacaaaatctggcaggaacacagcaagcataagaatgattcccacatcagaaggccctgtcagctaaaagatctaaatgaagatgattttctaagtaacaacatacatacctatcaaggaaaaactctacaaggaacttcctatcaggtgacctctgaatgttggagtccatttcactatcaaagacatgttgagaccactgttgatgaactggtgagacatttcttcccagatgtaactatttaagtggatttcccatctcttttccactcattttaatgccacaagcactgttttctatagttctttattacttctgttttcagctgccacatggaagtgtttctaaagaacataaatagaggcttgtccttactgagtggttttctgaactaaaaggaacataaagcatttccttcaaagaaggaaaggttgttatataaaa

SEQ ID NO: 342047 - DNA, 749 bp, Homo sapiens
  misc_feature (720)..(720): n is a, c, g, or t
gcgtctgtgtagttctctcagacagtcagagaggagagacggagcagcgtggcagacaggctggctctgcacgagctcctggcggggaccagcagcgcctgcaagggggtggagggacaggcgctcgggtggcctgggccgccggcccctcacgctgcccccgctcagccttcatgctctcccctgcttttccacaggcaactggacaacaaccacatcagctgcattgaagatggagccttccgagcgctgcgcgatttggagatccttaccctcaacaacaacaacatcagtcgcatcctggtcaccagcttcaaccacatgccgaagatccgaactctgcgcctccactccaaccacctgtactgcgactgccacctggcctggctctcggattggctgcgacagcgacggacagttggccagttcacactctgcatggctcctgtgcatttgaggggcttcaacgtggcggatgtgcagaagaaggagtacgtgtgcccagccccccactcggagcccccatcctgcaatgccaactccatctcctgcccttcgccctgcacgtgcagcaataacatcgtggactgtcgaggaaagggcttgatggagattcctgccaacttgccggagggcatcgtcgaaatacgcctagaacagaactccatcaaagccatccctgcaggagccttcacccagtacaagaaactgaagcgaatngactcccagaatcgattcggtatgcccca

SEQ ID NO: 342048 - DNA, 511 bp, Homo sapiens
acatgtagggtgatccaaattggtctggggtcaggatttggcccacagtctatcagtttgcgtcatctagttttagttttgactttaggtttcttgaaggaagggaccaagcctgcttttgtcatcattatatcctcacggcttaggtgtaagcctgtcagagagcctggtacaggaaaggcacctgtttgtaaaatagatgggtggatggaggggagggtaggcagatggatgagtgaataaattcttacagtcttcagagcacaagtatttcaaagcagcctacctgggaactgctcatggtcctgctggccacctagaccaccaatgccctgacttctatgccctctgcagagaatccgtgcctgggacaagtagtccgagaggtgatccgccgccagaaaggttatgcatcatgtgccacagcctccaaggtgcccatcatggaatgtcgtgggggctgtgggccccagtgctgccagcccacccttatgcttaacattttcgtatg

SEQ ID NO: 342049 - DNA, 421 bp, Homo sapiens
ttttttttgctcacacccatttatttcccattagctttacacattgtgagtactcatcattggacaggagagagaggtgacgaacaagctggttagaaagccagcctgccacagaacttgagtaaactgaggaaataaagccagtgcgcttcctggattggtgaagaggtttcttgtccctttaggggatgttctgtcaatatatcaacattgaaaagataaaccatttgctttgtttcacaacgtgaacagtgcacctatgcatggtagagaatagaaagacacaacagggcacatgcctccttttccacaggatcctgagctacaaccggctgaggtgcatccccgtccacgccttcaacgggctgcggtccctgcgagtgctgtgagtaccccaatgtgctgattttgacttacacat

SEQ ID NO: 342050 - DNA, 534 bp, Homo sapiens
tttcctaaaggagattccaatcagtattgcctatcaggactttaccttgatgcaacgaggagagtagctgccagctgagcccgcgctgcccggagcagtgcacctgtatggagacagtggtgcgatgcagcaacaaggggctccgcgccctccccagaggcatgcccaaggatgtgaccgagctgtaagtacccccagctgcctccaagcaccctgtcatctcaccatcagcagcatcctccatactttaccccagaatctcaagcaaggctacatggcgaaactgccggggggtagaccctacttgaatggtatcccagcaagtatggcagtggagccctcaccaagtatggcagccatggtctttgacaagggcacaggaaacatggctcccacagtgtctctgcctggcagaggaggagtctctgaccctgtaattctctaaagataccctgtagtataagtgggagggttattgcctcattttccgtatcacacctgaaacctctgctccgtacaccctcttcctaagac

SEQ ID NO: 342051 - DNA, 9546 bp, Homo sapiens
  misc_feature (6750)..(6750): n is a, c, g, or t
  misc_feature (6958)..(6958): n is a, c, g, or t
  misc_feature (8820)..(8820): n is a, c, g, or t
gcgctccgcacctgggcactcccagcgatgcgcagcggggcagcgccggccccgccgatggagctgctgttgctgccgccgccgccgcccggagcgccccgctccgcccgcgccccgtgcgcctgagcaccgagctcgcccctcctccgcgctaactccgccgcccgctccccaggccgcccgcgctccccgcgcgcctcctcgggctccacgcgtcttgccccgcagaggcagcctcctccaggagcggggccctgcacaccatggcccccgggtgggcaggggtcggcgccgccgtgcgcgcccgcctggcgctggccttggcgctggcgagcgtcctgagtgggcctccagccgtcgcctgccccaccaagtgtacctgctccgctgccagcgtggactgccacgggctgggcctccgcgcggttcctcggggcatcccccgcaacgctgagcgccttgacctggacagaaataatatcaccaggatcaccaagatggacttcgctgggctcaagaacctccgagtcttgcatctggaagacaaccaggtcagcgtcatcgagagaggcgccttccaggacctgaagcagctagagcgactgcgcctgaacaagaataagctgcaagtccttccagaattgcttttccagagcacgccgaagctcaccagactagatttgagtgaaaaccagatccaggggatcccgaggaaggcgttccgcggcatcaccgatgtgaagaacctgcaactggacaacaaccacatcagctgcattgaagatggagccttccgagcgctgcgcgatttggagatccttaccctcaacaacaacaacatcagtcgcatcctggtcaccagcttcaaccacatgccgaagatccgaactctgcgcctccactccaaccacctgtactgcgactgccacctggcctggctctcggattggctgcgacagcgacggacagttggccagttcacactctgcatggctcctgtgcatttgaggggcttcaacgtggcggatgtgcagaagaaggagtacgtgtgcccagccccccactcggagcccccatcctgcaatgccaactccatctcctgcccttcgccctgcacgtgcagcaataacatcgtggactgtcgaggaaagggcttgatggagattcctgccaacttgccggagggcatcgtcgaaatacgcctagaacagaactccatcaaagccatccctgcaggagccttcacccagtacaagaaactgaagcgaatagacatcagcaagaatcagatatcggatattgctccagatgccttccagggcctgaaatcactcacatcgctggtcctgtatgggaacaagatcaccgagattgccaagggactgtttgatgggctggtgtccctacagctgctcctcctcaatgccaacaagatcaactgcctgcgggtgaacacgtttcaggacctgcagaacctcaacttgctctccctgtatgacaacaagctgcagaccatcagcaaggggctcttcgcccctctgcagtccatccagacactccacttagcccaaaacccatttgtgtgcgactgccacttgaagtggctggccgactacctccaggacaaccccatcgagacaagcggggcccgctgcagcagcccgcgccgactcgccaacaagcgcatcagccagatcaagagcaagaagttccgctgctcaggctccgaggattaccgcagcaggttcagcagcgagtgcttcatggacctcgtgtgccccgagaagtgtcgctgtgagggcacgattgtggactgctccaaccagaagctggtccgcatcccaagccacctccctgaatatgtcaccgacctgcgactgaatgacaatgaggtatctgttctggaggccactggcatcttcaagaagttgcccaacctgcggaaaataaatctgagtaacaataagatcaaggaggtgcgagagggagctttcgatggagcagccagcgtgcaggagctgatgctgacagggaaccagctggagaccgtgcacgggcgcgtgttccgtggcctcagtggcctcaaaaccttgatgctgaggagtaacttgatcggctgtgtgagtaatgacacctttgccggcctgagttcggtgagactgctgtccctctatgacaatcggatcaccaccatcacccctggggccttcaccacgcttgtctccctgtccaccataaacctcctgtccaaccccttcaactgcaactgccacctggcctggctcggcaagtggttgaggaagaggcggatcgtcagtgggaaccctaggtgccagaagccatttttcctcaaggagattcccatccaggatgtggccatccaggacttcacctgtgatggcaacgaggagagtagctgccagctgagcccgcgctgcccggagcagtgcacctgtatggagacagtggtgcgatgcagcaacaaggggctccgcgccctccccagaggcatgcccaaggatgtgaccgagctgtacctggaaggaaaccacctaacagccgtgcccagagagctgtccgccctccgacacctgacgcttattgacctgagcaacaacagcatcagcatgctgaccaattacaccttcagtaacatgtctcacctctccactctgatcctgagctacaaccggctgaggtgcatccccgtccacgccttcaacgggctgcggtccctgcgagtgctaaccctccatggcaatgacatttccagcgttcctgaaggctccttcaacgacctcacatctctttcccatctggcgctgggaaccaacccactccactgtgactgcagtcttcggtggctgtcggagtgggtgaaggcggggtacaaggagcctggcatcgcccgctgcagtagccctgagcccatggctgacaggctcctgctcaccaccccaacccaccgcttccagtgcaaagggccagtggacatcaacattgtggccaaatgcaatgcctgcctctccagcccgtgcaagaataacgggacatgcacccaggaccctgtggagctgtaccgctgtgcctgcccctacagctacaagggcaaggactgcactgtgcccatcaacacctgcatccagaacccctgtcagcatggaggcacctgccacctgagtgacagccacaaggatgggttcagctgctcctgccctctgggctttgaggggcagcggtgtgagatcaacccagatgactgtgaggacaacgactgcgaaaacaatgccacctgcgtggacgggatcaacaactacgtgtgtatctgtccgcctaactacacaggtgagctatgcgacgaggtgattgaccactgtgtgcctgagctgaacctctgtcagcatgaggccaagtgcatccccctggacaaaggattcagctgcgagtgtgtccctggctacagcgggaagctctgtgagacagacaatgatgactgtgtggcccacaagtgccgccacggggcccagtgcgtggacacaatcaatggctacacatgcacctgcccccagggcttcagtggacccttctgtgaacaccccccacccatggtcctactgcagaccagcccatgcgaccagtacgagtgccagaacggggcccagtgcatcgtggtgcagcaggagcccacctgccgctgcccaccaggcttcgccggccccagatgcgagaagctcatcactgtcaacttcgtgggcaaagactcctacgtggaactggcctccgccaaggtccgaccccaggccaacatctccctgcaggtggccactgacaaggacaacggcatccttctctacaaaggagacaatgaccccctggcactggagctgtaccagggccacgtgcggctggtctatgacagcctgagttcccctccaaccacagtgtacagtgtggagacagtgaatgatgggcagtttcacagtgtggagctggtgacgctaaaccagaccctgaacctagtagtggacaaaggaactccaaagagcctggggaagctccagaagcagccagcagtgggcatcaacagccccctctaccttggaggcatccccacctccaccggcctctccgccttgcgccagggcacggaccggcctctaggcggcttccacggatgcatccatgaggtgcgcatcaacaacgagctgcaggacttcaaggccctcccaccacagtccctgggggtgtcaccaggctgcaagtcctgcaccgtgtgcaagcacggcctgtgccgctccgtggagaaggacagcgtggtgtgcgagtgccgcccaggctggaccggcccactctgcgatcaggaggcccgggacccctgcctcggccacagatgccaccatggaaaatgtgtggcaactgggacctcatacatgtgcaagtgtgccgagggctatggaggggacttgtgtgacaacaagaatgactctgccaatgcctgctcagccttcaagtgtcaccatgggcagtgccacatctcagaccaaggggagccctactgcctgtgccagcccggctttagcggcgagcactgccaacaagagaatccgtgcctgggacaagtagtccgagaggtgatccgccgccagaaaggttatgcatcatgtgccacagcctccaaggtgcccatcatggaatgtcgtgggggctgtgggccccagtgctgccagcccacccgcagcaagcggcggaaatacgtcttccagtgcacggacggctcctcgtttgtagaagaggtggagagacacttagagtgcggctgcctcgcgtgttcctaagcccctgcccgcctgcctgccacctctcggactccagcttgatggagttgggacagccatgtgggaccccctggtgattcagcatgaaggaaatgaagctggagaggaaggtaaagaagaagagaatattaagtatattgtaaaataaacaaaaaatagaacttatttttattatggaaagtgactattttcatcttttattatataaatatattacaccatctgcgtatatgtaccatatagtgagttatttttaccaagttttgtgttgtgtatttgttgtgtttttaaaaatagctgtttaaaaatttaagaaaaaaatagactaataaaaatgctttaaaacaaaaggataagaataaagaatgatagcctgtctgaggaaggaggaagatgttttcatgtttatgaaacggtattatgtcggcagtagaccaagagctgctcattgagatcagaaaaaggaataagaggaagagagagaaggaaaagacctttgtttcttgttttttaactcccttttatttttcctcccctaaaattacccagcttttcggagtcctggatgtcagtgcccaaaatgcccagttcttccaggaaaagctgctgagccctggccttctcagtctcactgccactcaaaaatattgctgtccctgtctgtcccagaccccccttcagggtatctgaacccactgggggacccctcttctccttcctgggtggccctggcttccgtatctgaacccactgggggacccctcttctccttcctggctggccctggcttccaatcgaggactgactattgaagtctgctacaggtgtcatttggaactgtcttaccaaattttaaaacagctgctatttttcctgctcctccccaggagaggggtcttcctagaggaggcgagggaagagaatatcatggtgtctcctcaggacccatgcactggccctctctcctccttccaggtaatttttcattggaatgtatcccagtagagaaggtagtcagcccttcttggaagcggaaggctgggagccaagtcaagtctgcccacagcgctagatgtccaactctggaaggttcttggaggctcttgttgtaagacaggcctctgccacctgatcctccaggtcaccagcatgacgatagagactccttgcccatctgtgacactttccaatgcatatccaaactttaccttattttatctatgcaacccctgcctccctgggaaggataagggagtagagctgggttcactaagaaggaagtttaggccctcacaggctctggaacttgccttaagccacacaccagataagtggaggagccagaccagaagtccagacccaaagcttgagattcttcctctagaatgggtgagcacaggtgattcaggcggcttaaatccatcagagcagccctgccggaaaaggaaataatatgatgttttttcctgctcttgttctgccttgctcactccttctccctccgcagtatctggaaagattctggagaccagggcttatgcatctagggaaagtgaccaagggcagcctatccagcctctgcctccattcctgaaggggacttccctgcccctgtttctttccatgtctctccctccctcactcccatttgcccccttccaccccatcaggttagccacatatcttccagggctcagctgttcacaccaactccctggctcttatcatccatccctccttcccccaggagcttccactgtaggagtttcagggagaagagtttggaattcattggacctttcagccctcaggttccctagaggagcctagttgatctgtgagtaccaatggtgggccaaagacgcagggaataatgaagggagaaagaaaagaaaggaagatggaggaaaacgangcaactggaagaagaaggaagggatggaggggatgaagagaagggagagagggatatagctgaggaatttatctaaaaatgtgcatgtaaatctccattatgttccaggtactgtgccttatgatggctttgttttttgttgtcattagagacaaggtcttgctttgtcacccaggctggagtagagtggttcgatcatagctcaccncagcctcaacctcctaggctcaagccatcttcctgcctcagtctcccaaaatgctgggattacaggtgtgagccactatgctcagcctgtttcaaacattattataatagcagatttatttagtactttattatacatcagataccactctaattgtgaaatagatatatattcatttaattattgaaacaaccatgtagttaaaacactattaactcattttacagttgagtagactgagacacagagaagttaaagaacttgcccaagagtaaatgtctaataaaccgtagagccaggatctgggcccaggctgtctgactccagaacttgctcactcaaccactaaaccatcctgcttctcatgggaaagaaacacatcctgcctttgaggatcctacagcctgtgacaaaaacagtcataaaaatggacaattgccttattacacaaggagctcttaagtggcaatacaagcaatggaagtggctgtccagaggagggaacttctagtcctaggtctttaaggatgaataggagtttgccagagtgagaaagggaattgaactttcctgggagtggccttttaaaaagcaatgagatatggccaggcctggcttgtttggggaagagtcaaaatctagggtggcaagagtatgggaagcacactgaggagcagagagaaatggggtaggtaggaaggtagggttttgaccacaaagagctgtgcatgctaaactgggccacaggtgccagcagggttgtttgaggaagggaagagcaagacaagctctggtttaggaagagagctgtggcagcataaaggcctgaaagaggagacagagctgtcacccaaaatggacttgagagctccctgtggtttactctgtggctagaaaacactgccggccagatggatcacaaatgtctatggtagcttagaagctctgctcttgaagaggatcctgggatctgcccaacacccttcccaacctccatttccccatccccacctccattgccccatcccccctctccccctaggcaggtggatctgagccttatcccaccaccaatgcccctgctagcctctccccacccagcccagagcctactcagcctgccatctcaagagccccaccgagggtcactggcttcctgggaggagtcaccaggctgccagctttccctctgcctccccaaggaacctgagacctccctctgctcatcaccctgggcccaatcctgaatccagcccccatcaaccaagacagcaaaagggccaggtctgtcccttataattttgagccttctccctcaagtttggaagccctgactttaagaaatgccaaatgcaaggaccattaagaaaattctccccgaaatgaggctcctctaacaaatgatgattaaaacgctctctccttgagcagtcacattctagaaacaggacattccatgaggcaggaagagttcagttaatttgctcctgaaaaagtgtggttcagtgtttgtgtggcaatgtacgtgggcagaagaggccgctcaagctgtgtcccccctgagcaggattcaggaaagggaaaagaagttctcttcaactcagccaaggggccgtacgatggccgatgagattatgtatttaaaagttctttgtaaagtgtaaactaaaaaccttaaatgtaagatgctgttgttattattactgttgttgttgctgttatggacatgccaaaaggcccttgttagaagacagttttgccttttcaatctcatagcaaggaactcaagtctgatgcttcaaaaagatgagaagaagggcaagaagagggataactcccaagctcagagggaaaaaaaaggngggggaaaagagccccagggtgaccttcaggaaaggccaggaccaggatgatctaacctttcccttcaccagaaacaaagctattgccagactgaaccctaaagtcaagcagtcacccactgcctttgctgggagcagaagcccatagcaacaagtgacctgcccctcagactcaagatcccagataccagagctggaggagtcatagggcattactggtaggcaggaaaactgagggtcgaacaaatggaagaatgcggtgatcatagaccaaagacacacagataattaaccccatgtgtccacccaggccaaagttcttcctgctaccccacagtggatgtccaggcagatggtccccacatgatggggaagcagagggcatagtgtggttttgtgggacttgttcatgttttgtagtgtgggctcaacagtgccaaaggaaacactagggaaaagttggtgaaacatgccagctagcaggaccagtaaaggcataatcaggcatttggcaaagcttgcttttctaattcaatgataggttctaataggaaatttttgaagattttttaaaacaatgttatagtggcacttccccagtatggaataaataacatgcattcttttttcaatatactgtcatattcagatgtcattaaaataaatggatgagtcacagaggagctatcagatgctctcatgactaccataactcagaaaaaaaca

SEQ ID NO: 342052 - DNA, 8995 bp, Homo sapiens
  misc_feature (6199)..(6199): n is a, c, g, or t
  misc_feature (6407)..(6407): n is a, c, g, or t
  misc_feature (8269)..(8269): n is a, c, g, or t
gcgtctgtgtagttctctcagacagtcagagaggagagacggagcagcgtggcagacaggctggctctgcacgagctcctggcggggaccagcagcgcctgcaagggggtggagggacaggcgctcgggtggcctgggccgccggcccctcacgctgcccccgctcagccttcatgctctcccctgcttttccacaggcaactggacaacaaccacatcagctgcattgaagatggagccttccgagcgctgcgcgatttggagatccttaccctcaacaacaacaacatcagtcgcatcctggtcaccagcttcaaccacatgccgaagatccgaactctgcgcctccactccaaccacctgtactgcgactgccacctggcctggctctcggattggctgcgacagcgacggacagttggccagttcacactctgcatggctcctgtgcatttgaggggcttcaacgtggcggatgtgcagaagaaggagtacgtgtgcccagccccccactcggagcccccatcctgcaatgccaactccatctcctgcccttcgccctgcacgtgcagcaataacatcgtggactgtcgaggaaagggcttgatggagattcctgccaacttgccggagggcatcgtcgaaatacgcctagaacagaactccatcaaagccatccctgcaggagccttcacccagtacaagaaactgaagcgaatagacatcagcaagaatcagatatcggatattgctccagatgccttccagggcctgaaatcactcacatcgctggtcctgtatgggaacaagatcaccgagattgccaagggactgtttgatgggctggtgtccctacagctgctcctcctcaatgccaacaagatcaactgcctgcgggtgaacacgtttcaggacctgcagaacctcaacttgctctccctgtatgacaacaagctgcagaccatcagcaaggggctcttcgcccctctgcagtccatccagacactccacttagcccaaaacccatttgtgtgcgactgccacttgaagtggctggccgactacctccaggacaaccccatcgagacaagcggggcccgctgcagcagcccgcgccgactcgccaacaagcgcatcagccagatcaagagcaagaagttccgctgctcaggctccgaggattaccgcagcaggttcagcagcgagtgcttcatggacctcgtgtgccccgagaagtgtcgctgtgagggcacgattgtggactgctccaaccagaagctggtccgcatcccaagccacctccctgaatatgtcaccgacctgcgactgaatgacaatgaggtatctgttctggaggccactggcatcttcaagaagttgcccaacctgcggaaaataaatctgagtaacaataagatcaaggaggtgcgagagggagctttcgatggagcagccagcgtgcaggagctgatgctgacagggaaccagctggagaccgtgcacgggcgcgtgttccgtggcctcagtggcctcaaaaccttgatgctgaggagtaacttgatcggctgtgtgagtaatgacacctttgccggcctgagttcggtgagactgctgtccctctatgacaatcggatcaccaccatcacccctggggccttcaccacgcttgtctccctgtccaccataaacctcctgtccaaccccttcaactgcaactgccacctggcctggctcggcaagtggttgaggaagaggcggatcgtcagtgggaaccctaggtgccagaagccatttttcctcaaggagattcccatccaggatgtggccatccaggacttcacctgtgatggcaacgaggagagtagctgccagctgagcccgcgctgcccggagcagtgcacctgtatggagacagtggtgcgatgcagcaacaaggggctccgcgccctccccagaggcatgcccaaggatgtgaccgagctgtacctggaaggaaaccacctaacagccgtgcccagagagctgtccgccctccgacacctgacgcttattgacctgagcaacaacagcatcagcatgctgaccaattacaccttcagtaacatgtctcacctctccactctgatcctgagctacaaccggctgaggtgcatccccgtccacgccttcaacgggctgcggtccctgcgagtgctaaccctccatggcaatgacatttccagcgttcctgaaggctccttcaacgacctcacatctctttcccatctggcgctgggaaccaacccactccactgtgactgcagtcttcggtggctgtcggagtgggtgaaggcggggtacaaggagcctggcatcgcccgctgcagtagccctgagcccatggctgacaggctcctgctcaccaccccaacccaccgcttccagtgcaaagggccagtggacatcaacattgtggccaaatgcaatgcctgcctctccagcccgtgcaagaataacgggacatgcacccaggaccctgtggagctgtaccgctgtgcctgcccctacagctacaagggcaaggactgcactgtgcccatcaacacctgcatccagaacccctgtcagcatggaggcacctgccacctgagtgacagccacaaggatgggttcagctgctcctgccctctgggctttgaggggcagcggtgtgagatcaacccagatgactgtgaggacaacgactgcgaaaacaatgccacctgcgtggacgggatcaacaactacgtgtgtatctgtccgcctaactacacaggtgagctatgcgacgaggtgattgaccactgtgtgcctgagctgaacctctgtcagcatgaggccaagtgcatccccctggacaaaggattcagctgcgagtgtgtccctggctacagcgggaagctctgtgagacagacaatgatgactgtgtggcccacaagtgccgccacggggcccagtgcgtggacacaatcaatggctacacatgcacctgcccccagggcttcagtggacccttctgtgaacaccccccacccatggtcctactgcagaccagcccatgcgaccagtacgagtgccagaacggggcccagtgcatcgtggtgcagcaggagcccacctgccgctgcccaccaggcttcgccggccccagatgcgagaagctcatcactgtcaacttcgtgggcaaagactcctacgtggaactggcctccgccaaggtccgaccccaggccaacatctccctgcaggtggccactgacaaggacaacggcatccttctctacaaaggagacaatgaccccctggcactggagctgtaccagggccacgtgcggctggtctatgacagcctgagttcccctccaaccacagtgtacagtgtggagacagtgaatgatgggcagtttcacagtgtggagctggtgacgctaaaccagaccctgaacctagtagtggacaaaggaactccaaagagcctggggaagctccagaagcagccagcagtgggcatcaacagccccctctaccttggaggcatccccacctccaccggcctctccgccttgcgccagggcacggaccggcctctaggcggcttccacggatgcatccatgaggtgcgcatcaacaacgagctgcaggacttcaaggccctcccaccacagtccctgggggtgtcaccaggctgcaagtcctgcaccgtgtgcaagcacggcctgtgccgctccgtggagaaggacagcgtggtgtgcgagtgccgcccaggctggaccggcccactctgcgatcaggaggcccgggacccctgcctcggccacagatgccaccatggaaaatgtgtggcaactgggacctcatacatgtgcaagtgtgccgagggctatggaggggacttgtgtgacaacaagaatgactctgccaatgcctgctcagccttcaagtgtcaccatgggcagtgccacatctcagaccaaggggagccctactgcctgtgccagcccggctttagcggcgagcactgccaacaagagaatccgtgcctgggacaagtagtccgagaggtgatccgccgccagaaaggttatgcatcatgtgccacagcctccaaggtgcccatcatggaatgtcgtgggggctgtgggccccagtgctgccagcccacccgcagcaagcggcggaaatacgtcttccagtgcacggacggctcctcgtttgtagaagaggtggagagacacttagagtgcggctgcctcgcgtgttcctaagcccctgcccgcctgcctgccacctctcggactccagcttgatggagttgggacagccatgtgggaccccctggtgattcagcatgaaggaaatgaagctggagaggaaggtaaagaagaagagaatattaagtatattgtaaaataaacaaaaaatagaacttatttttattatggaaagtgactattttcatcttttattatataaatatattacaccatctgcgtatatgtaccatatagtgagttatttttaccaagttttgtgttgtgtatttgttgtgtttttaaaaatagctgtttaaaaatttaagaaaaaaatagactaataaaaatgctttaaaacaaaaggataagaataaagaatgatagcctgtctgaggaaggaggaagatgttttcatgtttatgaaacggtattatgtcggcagtagaccaagagctgctcattgagatcagaaaaaggaataagaggaagagagagaaggaaaagacctttgtttcttgttttttaactcccttttatttttcctcccctaaaattacccagcttttcggagtcctggatgtcagtgcccaaaatgcccagttcttccaggaaaagctgctgagccctggccttctcagtctcactgccactcaaaaatattgctgtccctgtctgtcccagaccccccttcagggtatctgaacccactgggggacccctcttctccttcctgggtggccctggcttccgtatctgaacccactgggggacccctcttctccttcctggctggccctggcttccaatcgaggactgactattgaagtctgctacaggtgtcatttggaactgtcttaccaaattttaaaacagctgctatttttcctgctcctccccaggagaggggtcttcctagaggaggcgagggaagagaatatcatggtgtctcctcaggacccatgcactggccctctctcctccttccaggtaatttttcattggaatgtatcccagtagagaaggtagtcagcccttcttggaagcggaaggctgggagccaagtcaagtctgcccacagcgctagatgtccaactctggaaggttcttggaggctcttgttgtaagacaggcctctgccacctgatcctccaggtcaccagcatgacgatagagactccttgcccatctgtgacactttccaatgcatatccaaactttaccttattttatctatgcaacccctgcctccctgggaaggataagggagtagagctgggttcactaagaaggaagtttaggccctcacaggctctggaacttgccttaagccacacaccagataagtggaggagccagaccagaagtccagacccaaagcttgagattcttcctctagaatgggtgagcacaggtgattcaggcggcttaaatccatcagagcagccctgccggaaaaggaaataatatgatgttttttcctgctcttgttctgccttgctcactccttctccctccgcagtatctggaaagattctggagaccagggcttatgcatctagggaaagtgaccaagggcagcctatccagcctctgcctccattcctgaaggggacttccctgcccctgtttctttccatgtctctccctccctcactcccatttgcccccttccaccccatcaggttagccacatatcttccagggctcagctgttcacaccaactccctggctcttatcatccatccctccttcccccaggagcttccactgtaggagtttcagggagaagagtttggaattcattggacctttcagccctcaggttccctagaggagcctagttgatctgtgagtaccaatggtgggccaaagacgcagggaataatgaagggagaaagaaaagaaaggaagatggaggaaaacgangcaactggaagaagaaggaagggatggaggggatgaagagaagggagagagggatatagctgaggaatttatctaaaaatgtgcatgtaaatctccattatgttccaggtactgtgccttatgatggctttgttttttgttgtcattagagacaaggtcttgctttgtcacccaggctggagtagagtggttcgatcatagctcaccncagcctcaacctcctaggctcaagccatcttcctgcctcagtctcccaaaatgctgggattacaggtgtgagccactatgctcagcctgtttcaaacattattataatagcagatttatttagtactttattatacatcagataccactctaattgtgaaatagatatatattcatttaattattgaaacaaccatgtagttaaaacactattaactcattttacagttgagtagactgagacacagagaagttaaagaacttgcccaagagtaaatgtctaataaaccgtagagccaggatctgggcccaggctgtctgactccagaacttgctcactcaaccactaaaccatcctgcttctcatgggaaagaaacacatcctgcctttgaggatcctacagcctgtgacaaaaacagtcataaaaatggacaattgccttattacacaaggagctcttaagtggcaatacaagcaatggaagtggctgtccagaggagggaacttctagtcctaggtctttaaggatgaataggagtttgccagagtgagaaagggaattgaactttcctgggagtggccttttaaaaagcaatgagatatggccaggcctggcttgtttggggaagagtcaaaatctagggtggcaagagtatgggaagcacactgaggagcagagagaaatggggtaggtaggaaggtagggttttgaccacaaagagctgtgcatgctaaactgggccacaggtgccagcagggttgtttgaggaagggaagagcaagacaagctctggtttaggaagagagctgtggcagcataaaggcctgaaagaggagacagagctgtcacccaaaatggacttgagagctccctgtggtttactctgtggctagaaaacactgccggccagatggatcacaaatgtctatggtagcttagaagctctgctcttgaagaggatcctgggatctgcccaacacccttcccaacctccatttccccatccccacctccattgccccatcccccctctccccctaggcaggtggatctgagccttatcccaccaccaatgcccctgctagcctctccccacccagcccagagcctactcagcctgccatctcaagagccccaccgagggtcactggcttcctgggaggagtcaccaggctgccagctttccctctgcctccccaaggaacctgagacctccctctgctcatcaccctgggcccaatcctgaatccagcccccatcaaccaagacagcaaaagggccaggtctgtcccttataattttgagccttctccctcaagtttggaagccctgactttaagaaatgccaaatgcaaggaccattaagaaaattctccccgaaatgaggctcctctaacaaatgatgattaaaacgctctctccttgagcagtcacattctagaaacaggacattccatgaggcaggaagagttcagttaatttgctcctgaaaaagtgtggttcagtgtttgtgtggcaatgtacgtgggcagaagaggccgctcaagctgtgtcccccctgagcaggattcaggaaagggaaaagaagttctcttcaactcagccaaggggccgtacgatggccgatgagattatgtatttaaaagttctttgtaaagtgtaaactaaaaaccttaaatgtaagatgctgttgttattattactgttgttgttgctgttatggacatgccaaaaggcccttgttagaagacagttttgccttttcaatctcatagcaaggaactcaagtctgatgcttcaaaaagatgagaagaagggcaagaagagggataactcccaagctcagagggaaaaaaaaggngggggaaaagagccccagggtgaccttcaggaaaggccaggaccaggatgatctaacctttcccttcaccagaaacaaagctattgccagactgaaccctaaagtcaagcagtcacccactgcctttgctgggagcagaagcccatagcaacaagtgacctgcccctcagactcaagatcccagataccagagctggaggagtcatagggcattactggtaggcaggaaaactgagggtcgaacaaatggaagaatgcggtgatcatagaccaaagacacacagataattaaccccatgtgtccacccaggccaaagttcttcctgctaccccacagtggatgtccaggcagatggtccccacatgatggggaagcagagggcatagtgtggttttgtgggacttgttcatgttttgtagtgtgggctcaacagtgccaaaggaaacactagggaaaagttggtgaaacatgccagctagcaggaccagtaaaggcataatcaggcatttggcaaagcttgcttttctaattcaatgataggttctaataggaaatttttgaagattttttaaaacaatgttatagtggcacttccccagtatggaataaataacatgcattcttttttcaatatactgtcatattcagatgtcattaaaataaatggatgagtcacagaggagctatcagatgctctcatgactaccataactcagaaaaaaaca

SEQ ID NO: 342053 - DNA, 8695 bp, Homo sapiens
  misc_feature (5899)..(5899): n is a, c, g, or t
  misc_feature (6107)..(6107): n is a, c, g, or t
  misc_feature (7969)..(7969): n is a, c, g, or t
gcgtctgtgtagttctctcagacagtcagagaggagagacggagcagcgtggcagacaggctggctctgcacgagctcctggcggggaccagcagcgcctgcaagggggtggagggacaggcgctcgggtggcctgggccgccggcccctcacgctgcccccgctcagccttcatgctctcccctgcttttccacaggcaactggacaacaaccacatcagctgcattgaagatggagccttccgagcgctgcgcgatttggagatccttaccctcaacaacaacaacatcagtcgcatcctggtcaccagcttcaaccacatgccgaagatccgaactctgcgcctccactccaaccacctgtactgcgactgccacctggcctggctctcggattggctgcgacagcgacggacagttggccagttcacactctgcatggctcctgtgcatttgaggggcttcaacgtggcggatgtgcagaagaaggagtacgtgtgcccagccccccactcggagcccccatcctgcaatgccaactccatctcctgcccttcgccctgcacgtgcagcaataacatcgtggactgtcgaggaaagggcttgatggagattcctgccaacttgccggagggcatcgtcgaaatacgcctagaacagaactccatcaaagccatccctgcaggagccttcacccagtacaagaaactgaagcgaatagacatcagcaagaatcagatatcggatattgctccagatgccttccagggcctgaaatcactcacatcgctggtcctgtatgggaacaagatcaccgagattgccaagggactgtttgatgggctggtgtccctacagctgctcctcctcaatgccaacaagatcaactgcctgcgggtgaacacgtttcaggacctgcagaacctcaacttgctctccctgtatgacaacaagctgcagaccatcagcaaggggctcttcgcccctctgcagtccatccagacactccacttagcccaaaacccatttgtgtgcgactgccacttgaagtggctggccgactacctccaggacaaccccatcgagacaagcggggcccgctgcagcagcccgcgccgactcgccaacaagcgcatcagccagatcaagagcaagaagttccgctgctcaggctccgaggattaccgcagcaggttcagcagcgagtgcttcatggacctcgtgtgccccgagaagtgtcgctgtgagggcacgattgtggactgctccaaccagaagctggtccgcatcccaagccacctccctgaatatgtcaccgacctgcgactgaatgacaatgaggtatctgttctggaggccactggcatcttcaagaagttgcccaacctgcggaaaataaatctgagtaacaataagatcaaggaggtgcgagagggagctttcgatggagcagccagcgtgcaggagctgatgctgacagggaaccagctggagaccgtgcacgggcgcgtgttccgtggcctcagtggcctcaaaaccttgatgctgaggagtaacttgatcggctgtgtgagtaatgacacctttgccggcctgagttcggtgagactgctgtccctctatgacaatcggatcaccaccatcacccctggggccttcaccacgcttgtctccctgtccaccataaacctcctgtccaaccccttcaactgcaactgccacctggcctggctcggcaagtggttgaggaagaggcggatcgtcagtgggaaccctaggtgccagaagccatttttcctcaaggagattcccatccaggatgtggccatccaggacttcacctgtgatggcaacgaggagagtagctgccagctgagcccgcgctgcccggagcagtgcacctgtatggagacagtggtgcgatgcagcaacaaggggctccgcgccctccccagaggcatgcccaaggatgtgaccgagctgtacctggaaggaaaccacctaacagccgtgcccagagagctgtccgccctccgacacctgacgcttattgacctgagcaacaacagcatcagcatgctgaccaattacaccttcagtaacatgtctcacctctccactctgatcctgagctacaaccggctgaggtgcatccccgtccacgccttcaacgggctgcggtccctgcgagtgctaaccctccatggcaatgacatttccagcgttcctgaaggctccttcaacgacctcacatctctttcccatctggcgctgggaaccaacccactccactgtgactgcagtcttcggtggctgtcggagtgggtgaaggcggggtacaaggagcctggcatcgcccgctgcagtagccctgagcccatggctgacaggctcctgctcaccaccccaacccaccgcttccagtgcaaagggccagtggacatcaacattgtggccaaatgcaatgcctgcctctccagcccgtgcaagaataacgggacatgcacccaggaccctgtggagctgtaccgctgtgcctgcccctacagctacaagggcaaggactgcactgtgcccatcaacacctgcatccagaacccctgtcagcatggaggcacctgccacctgagtgacagccacaaggatgggttcagctgctcctgccctctgggctttgaggggcagcggtgtgagatcaacccagatgactgtgaggacaacgactgcgaaaacaatgccacctgcgtggacgggatcaacaactacgtgtgtatctgtccgcctaactacacaggtgagctatgcgacgaggtgattgaccactgtgtgcctgagctgaacctctgtcagcatgaggccaagtgcatccccctggacaaaggattcagctgcgagtgtgtccctggctacagcgggaagctctgtgagacagacaatgatgactgtgtggcccacaagtgccgccacggggcccagtgcgtggacacaatcaatggctacacatgcacctgcccccagggcttcagtggacccttctgtgaacaccccccacccatggtctatgacagcctgagttcccctccaaccacagtgtacagtgtggagacagtgaatgatgggcagtttcacagtgtggagctggtgacgctaaaccagaccctgaacctagtagtggacaaaggaactccaaagagcctggggaagctccagaagcagccagcagtgggcatcaacagccccctctaccttggaggcatccccacctccaccggcctctccgccttgcgccagggcacggaccggcctctaggcggcttccacggatgcatccatgaggtgcgcatcaacaacgagctgcaggacttcaaggccctcccaccacagtccctgggggtgtcaccaggctgcaagtcctgcaccgtgtgcaagcacggcctgtgccgctccgtggagaaggacagcgtggtgtgcgagtgccgcccaggctggaccggcccactctgcgatcaggaggcccgggacccctgcctcggccacagatgccaccatggaaaatgtgtggcaactgggacctcatacatgtgcaagtgtgccgagggctatggaggggacttgtgtgacaacaagaatgactctgccaatgcctgctcagccttcaagtgtcaccatgggcagtgccacatctcagaccaaggggagccctactgcctgtgccagcccggctttagcggcgagcactgccaacaagagaatccgtgcctgggacaagtagtccgagaggtgatccgccgccagaaaggttatgcatcatgtgccacagcctccaaggtgcccatcatggaatgtcgtgggggctgtgggccccagtgctgccagcccacccgcagcaagcggcggaaatacgtcttccagtgcacggacggctcctcgtttgtagaagaggtggagagacacttagagtgcggctgcctcgcgtgttcctaagcccctgcccgcctgcctgccacctctcggactccagcttgatggagttgggacagccatgtgggaccccctggtgattcagcatgaaggaaatgaagctggagaggaaggtaaagaagaagagaatattaagtatattgtaaaataaacaaaaaatagaacttatttttattatggaaagtgactattttcatcttttattatataaatatattacaccatctgcgtatatgtaccatatagtgagttatttttaccaagttttgtgttgtgtatttgttgtgtttttaaaaatagctgtttaaaaatttaagaaaaaaatagactaataaaaatgctttaaaacaaaaggataagaataaagaatgatagcctgtctgaggaaggaggaagatgttttcatgtttatgaaacggtattatgtcggcagtagaccaagagctgctcattgagatcagaaaaaggaataagaggaagagagagaaggaaaagacctttgtttcttgttttttaactcccttttatttttcctcccctaaaattacccagcttttcggagtcctggatgtcagtgcccaaaatgcccagttcttccaggaaaagctgctgagccctggccttctcagtctcactgccactcaaaaatattgctgtccctgtctgtcccagaccccccttcagggtatctgaacccactgggggacccctcttctccttcctgggtggccctggcttccgtatctgaacccactgggggacccctcttctccttcctggctggccctggcttccaatcgaggactgactattgaagtctgctacaggtgtcatttggaactgtcttaccaaattttaaaacagctgctatttttcctgctcctccccaggagaggggtcttcctagaggaggcgagggaagagaatatcatggtgtctcctcaggacccatgcactggccctctctcctccttccaggtaatttttcattggaatgtatcccagtagagaaggtagtcagcccttcttggaagcggaaggctgggagccaagtcaagtctgcccacagcgctagatgtccaactctggaaggttcttggaggctcttgttgtaagacaggcctctgccacctgatcctccaggtcaccagcatgacgatagagactccttgcccatctgtgacactttccaatgcatatccaaactttaccttattttatctatgcaacccctgcctccctgggaaggataagggagtagagctgggttcactaagaaggaagtttaggccctcacaggctctggaacttgccttaagccacacaccagataagtggaggagccagaccagaagtccagacccaaagcttgagattcttcctctagaatgggtgagcacaggtgattcaggcggcttaaatccatcagagcagccctgccggaaaaggaaataatatgatgttttttcctgctcttgttctgccttgctcactccttctccctccgcagtatctggaaagattctggagaccagggcttatgcatctagggaaagtgaccaagggcagcctatccagcctctgcctccattcctgaaggggacttccctgcccctgtttctttccatgtctctccctccctcactcccatttgcccccttccaccccatcaggttagccacatatcttccagggctcagctgttcacaccaactccctggctcttatcatccatccctccttcccccaggagcttccactgtaggagtttcagggagaagagtttggaattcattggacctttcagccctcaggttccctagaggagcctagttgatctgtgagtaccaatggtgggccaaagacgcagggaataatgaagggagaaagaaaagaaaggaagatggaggaaaacgangcaactggaagaagaaggaagggatggaggggatgaagagaagggagagagggatatagctgaggaatttatctaaaaatgtgcatgtaaatctccattatgttccaggtactgtgccttatgatggctttgttttttgttgtcattagagacaaggtcttgctttgtcacccaggctggagtagagtggttcgatcatagctcaccncagcctcaacctcctaggctcaagccatcttcctgcctcagtctcccaaaatgctgggattacaggtgtgagccactatgctcagcctgtttcaaacattattataatagcagatttatttagtactttattatacatcagataccactctaattgtgaaatagatatatattcatttaattattgaaacaaccatgtagttaaaacactattaactcattttacagttgagtagactgagacacagagaagttaaagaacttgcccaagagtaaatgtctaataaaccgtagagccaggatctgggcccaggctgtctgactccagaacttgctcactcaaccactaaaccatcctgcttctcatgggaaagaaacacatcctgcctttgaggatcctacagcctgtgacaaaaacagtcataaaaatggacaattgccttattacacaaggagctcttaagtggcaatacaagcaatggaagtggctgtccagaggagggaacttctagtcctaggtctttaaggatgaataggagtttgccagagtgagaaagggaattgaactttcctgggagtggccttttaaaaagcaatgagatatggccaggcctggcttgtttggggaagagtcaaaatctagggtggcaagagtatgggaagcacactgaggagcagagagaaatggggtaggtaggaaggtagggttttgaccacaaagagctgtgcatgctaaactgggccacaggtgccagcagggttgtttgaggaagggaagagcaagacaagctctggtttaggaagagagctgtggcagcataaaggcctgaaagaggagacagagctgtcacccaaaatggacttgagagctccctgtggtttactctgtggctagaaaacactgccggccagatggatcacaaatgtctatggtagcttagaagctctgctcttgaagaggatcctgggatctgcccaacacccttcccaacctccatttccccatccccacctccattgccccatcccccctctccccctaggcaggtggatctgagccttatcccaccaccaatgcccctgctagcctctccccacccagcccagagcctactcagcctgccatctcaagagccccaccgagggtcactggcttcctgggaggagtcaccaggctgccagctttccctctgcctccccaaggaacctgagacctccctctgctcatcaccctgggcccaatcctgaatccagcccccatcaaccaagacagcaaaagggccaggtctgtcccttataattttgagccttctccctcaagtttggaagccctgactttaagaaatgccaaatgcaaggaccattaagaaaattctccccgaaatgaggctcctctaacaaatgatgattaaaacgctctctccttgagcagtcacattctagaaacaggacattccatgaggcaggaagagttcagttaatttgctcctgaaaaagtgtggttcagtgtttgtgtggcaatgtacgtgggcagaagaggccgctcaagctgtgtcccccctgagcaggattcaggaaagggaaaagaagttctcttcaactcagccaaggggccgtacgatggccgatgagattatgtatttaaaagttctttgtaaagtgtaaactaaaaaccttaaatgtaagatgctgttgttattattactgttgttgttgctgttatggacatgccaaaaggcccttgttagaagacagttttgccttttcaatctcatagcaaggaactcaagtctgatgcttcaaaaagatgagaagaagggcaagaagagggataactcccaagctcagagggaaaaaaaaggngggggaaaagagccccagggtgaccttcaggaaaggccaggaccaggatgatctaacctttcccttcaccagaaacaaagctattgccagactgaaccctaaagtcaagcagtcacccactgcctttgctgggagcagaagcccatagcaacaagtgacctgcccctcagactcaagatcccagataccagagctggaggagtcatagggcattactggtaggcaggaaaactgagggtcgaacaaatggaagaatgcggtgatcatagaccaaagacacacagataattaaccccatgtgtccacccaggccaaagttcttcctgctaccccacagtggatgtccaggcagatggtccccacatgatggggaagcagagggcatagtgtggttttgtgggacttgttcatgttttgtagtgtgggctcaacagtgccaaaggaaacactagggaaaagttggtgaaacatgccagctagcaggaccagtaaaggcataatcaggcatttggcaaagcttgcttttctaattcaatgataggttctaataggaaatttttgaagattttttaaaacaatgttatagtggcacttccccagtatggaataaataacatgcattcttttttcaatatactgtcatattcagatgtcattaaaataaatggatgagtcacagaggagctatcagatgctctcatgactaccataactcagaaaaaaaca

SEQ ID NO: 342054 - DNA, 6190 bp, Homo sapiens
  misc_feature (3394)..(3394): n is a, c, g, or t
  misc_feature (3602)..(3602): n is a, c, g, or t
  misc_feature (5464)..(5464): n is a, c, g, or t
tctcccccatctgtgccaggtgagctatgcgacgaggtgattgaccactgtgtgcctgagctgaacctctgtcagcatgaggccaagtgcatccccctggacaaaggattcagctgcgagtgtgtccctggctacagcgggaagctctgtgagacagacaatgatgactgtgtggcccacaagtgccgccacggggcccagtgcgtggacacaatcaatggctacacatgcacctgcccccagggcttcagtggacccttctgtgaacaccccccacccatggtcctactgcagaccagcccatgcgaccagtacgagtgccagaacggggcccagtgcatcgtggtgcagcaggagcccacctgccgctgcccaccaggcttcgccggccccagatgcgagaagctcatcactgtcaacttcgtgggcaaagactcctacgtggaactggcctccgccaaggtggccactgacaaggacaacggcatccttctctacaaaggagacaatgaccccctggcactggagctgtaccagggccacgtgcggctggtctatgacagcctgagttcccctccaaccacagtgtacagtgtggagacagtgaatgatgggcagtttcacagtgtggagctggtgacgctaaaccagaccctgaacctagtagtggacaaaggaactccaaagagcctggggaagctccagaagcagccagcagtgggcatcaacagccccctctaccttggaggcatccccacctccaccggcctctccgccttgcgccagggcacggaccggcctctaggcggcttccacggatgcatccatgaggtgcgcatcaacaacgagctgcaggacttcaaggccctcccaccacagtccctgggggtgtcaccaggctgcaagtcctgcaccgtgtgcaagcacggcctgtgccgctccgtggagaaggacagcgtggtgtgcgagtgccgcccaggctggaccggcccactctgcgatcaggaggcccgggacccctgcctcggccacagatgccaccatggaaaatgtgtggcaactgggacctcatacatgtgcaagtgtgccgagggctatggaggggacttgtgtgacaacaagaatgactctgccaatgcctgctcagccttcaagtgtcaccatgggcagtgccacatctcagaccaaggggagccctactgcctgtgccagcccggctttagcggcgagcactgccaacaagagaatccgtgcctgggacaagtagtccgagaggtgatccgccgccagaaaggttatgcatcatgtgccacagcctccaaggtgcccatcatggaatgtcgtgggggctgtgggccccagtgctgccagcccacccgcagcaagcggcggaaatacgtcttccagtgcacggacggctcctcgtttgtagaagaggtggagagacacttagagtgcggctgcctcgcgtgttcctaagcccctgcccgcctgcctgccacctctcggactccagcttgatggagttgggacagccatgtgggaccccctggtgattcagcatgaaggaaatgaagctggagaggaaggtaaagaagaagagaatattaagtatattgtaaaataaacaaaaaatagaacttatttttattatggaaagtgactattttcatcttttattatataaatatattacaccatctgcgtatatgtaccatatagtgagttatttttaccaagttttgtgttgtgtatttgttgtgtttttaaaaatagctgtttaaaaatttaagaaaaaaatagactaataaaaatgctttaaaacaaaaggataagaataaagaatgatagcctgtctgaggaaggaggaagatgttttcatgtttatgaaacggtattatgtcggcagtagaccaagagctgctcattgagatcagaaaaaggaataagaggaagagagagaaggaaaagacctttgtttcttgttttttaactcccttttatttttcctcccctaaaattacccagcttttcggagtcctggatgtcagtgcccaaaatgcccagttcttccaggaaaagctgctgagccctggccttctcagtctcactgccactcaaaaatattgctgtccctgtctgtcccagaccccccttcagggtatctgaacccactgggggacccctcttctccttcctgggtggccctggcttccgtatctgaacccactgggggacccctcttctccttcctggctggccctggcttccaatcgaggactgactattgaagtctgctacaggtgtcatttggaactgtcttaccaaattttaaaacagctgctatttttcctgctcctccccaggagaggggtcttcctagaggaggcgagggaagagaatatcatggtgtctcctcaggacccatgcactggccctctctcctccttccaggtaatttttcattggaatgtatcccagtagagaaggtagtcagcccttcttggaagcggaaggctgggagccaagtcaagtctgcccacagcgctagatgtccaactctggaaggttcttggaggctcttgttgtaagacaggcctctgccacctgatcctccaggtcaccagcatgacgatagagactccttgcccatctgtgacactttccaatgcatatccaaactttaccttattttatctatgcaacccctgcctccctgggaaggataagggagtagagctgggttcactaagaaggaagtttaggccctcacaggctctggaacttgccttaagccacacaccagataagtggaggagccagaccagaagtccagacccaaagcttgagattcttcctctagaatgggtgagcacaggtgattcaggcggcttaaatccatcagagcagccctgccggaaaaggaaataatatgatgttttttcctgctcttgttctgccttgctcactccttctccctccgcagtatctggaaagattctggagaccagggcttatgcatctagggaaagtgaccaagggcagcctatccagcctctgcctccattcctgaaggggacttccctgcccctgtttctttccatgtctctccctccctcactcccatttgcccccttccaccccatcaggttagccacatatcttccagggctcagctgttcacaccaactccctggctcttatcatccatccctccttcccccaggagcttccactgtaggagtttcagggagaagagtttggaattcattggacctttcagccctcaggttccctagaggagcctagttgatctgtgagtaccaatggtgggccaaagacgcagggaataatgaagggagaaagaaaagaaaggaagatggaggaaaacgangcaactggaagaagaaggaagggatggaggggatgaagagaagggagagagggatatagctgaggaatttatctaaaaatgtgcatgtaaatctccattatgttccaggtactgtgccttatgatggctttgttttttgttgtcattagagacaaggtcttgctttgtcacccaggctggagtagagtggttcgatcatagctcaccncagcctcaacctcctaggctcaagccatcttcctgcctcagtctcccaaaatgctgggattacaggtgtgagccactatgctcagcctgtttcaaacattattataatagcagatttatttagtactttattatacatcagataccactctaattgtgaaatagatatatattcatttaattattgaaacaaccatgtagttaaaacactattaactcattttacagttgagtagactgagacacagagaagttaaagaacttgcccaagagtaaatgtctaataaaccgtagagccaggatctgggcccaggctgtctgactccagaacttgctcactcaaccactaaaccatcctgcttctcatgggaaagaaacacatcctgcctttgaggatcctacagcctgtgacaaaaacagtcataaaaatggacaattgccttattacacaaggagctcttaagtggcaatacaagcaatggaagtggctgtccagaggagggaacttctagtcctaggtctttaaggatgaataggagtttgccagagtgagaaagggaattgaactttcctgggagtggccttttaaaaagcaatgagatatggccaggcctggcttgtttggggaagagtcaaaatctagggtggcaagagtatgggaagcacactgaggagcagagagaaatggggtaggtaggaaggtagggttttgaccacaaagagctgtgcatgctaaactgggccacaggtgccagcagggttgtttgaggaagggaagagcaagacaagctctggtttaggaagagagctgtggcagcataaaggcctgaaagaggagacagagctgtcacccaaaatggacttgagagctccctgtggtttactctgtggctagaaaacactgccggccagatggatcacaaatgtctatggtagcttagaagctctgctcttgaagaggatcctgggatctgcccaacacccttcccaacctccatttccccatccccacctccattgccccatcccccctctccccctaggcaggtggatctgagccttatcccaccaccaatgcccctgctagcctctccccacccagcccagagcctactcagcctgccatctcaagagccccaccgagggtcactggcttcctgggaggagtcaccaggctgccagctttccctctgcctccccaaggaacctgagacctccctctgctcatcaccctgggcccaatcctgaatccagcccccatcaaccaagacagcaaaagggccaggtctgtcccttataattttgagccttctccctcaagtttggaagccctgactttaagaaatgccaaatgcaaggaccattaagaaaattctccccgaaatgaggctcctctaacaaatgatgattaaaacgctctctccttgagcagtcacattctagaaacaggacattccatgaggcaggaagagttcagttaatttgctcctgaaaaagtgtggttcagtgtttgtgtggcaatgtacgtgggcagaagaggccgctcaagctgtgtcccccctgagcaggattcaggaaagggaaaagaagttctcttcaactcagccaaggggccgtacgatggccgatgagattatgtatttaaaagttctttgtaaagtgtaaactaaaaaccttaaatgtaagatgctgttgttattattactgttgttgttgctgttatggacatgccaaaaggcccttgttagaagacagttttgccttttcaatctcatagcaaggaactcaagtctgatgcttcaaaaagatgagaagaagggcaagaagagggataactcccaagctcagagggaaaaaaaaggngggggaaaagagccccagggtgaccttcaggaaaggccaggaccaggatgatctaacctttcccttcaccagaaacaaagctattgccagactgaaccctaaagtcaagcagtcacccactgcctttgctgggagcagaagcccatagcaacaagtgacctgcccctcagactcaagatcccagataccagagctggaggagtcatagggcattactggtaggcaggaaaactgagggtcgaacaaatggaagaatgcggtgatcatagaccaaagacacacagataattaaccccatgtgtccacccaggccaaagttcttcctgctaccccacagtggatgtccaggcagatggtccccacatgatggggaagcagagggcatagtgtggttttgtgggacttgttcatgttttgtagtgtgggctcaacagtgccaaaggaaacactagggaaaagttggtgaaacatgccagctagcaggaccagtaaaggcataatcaggcatttggcaaagcttgcttttctaattcaatgataggttctaataggaaatttttgaagattttttaaaacaatgttatagtggcacttccccagtatggaataaataacatgcattcttttttcaatatactgtcatattcagatgtcattaaaataaatggatgagtcacagaggagctatcagatgctctcatgactaccataactcagaaaaaaaca

SEQ ID NO: 342055 - DNA, 8729 bp, Homo sapiens
  misc_feature (5933)..(5933): n is a, c, g, or t
  misc_feature (6141)..(6141): n is a, c, g, or t
  misc_feature (8003)..(8003): n is a, c, g, or t
gcgtctgtgtagttctctcagacagtcagagaggagagacggagcagcgtggcagacaggctggctctgcacgagctcctggcggggaccagcagcgcctgcaagggggtggagggacaggcgctcgggtggcctgggccgccggcccctcacgctgcccccgctcagccttcatgctctcccctgcttttccacaggcaactggacaacaaccacatcagctgcattgaagatggagccttccgagcgctgcgcgatttggagatccttaccctcaacaacaacaacatcagtcgcatcctggtcaccagcttcaaccacatgccgaagatccgaactctgcgcctccactccaaccacctgtactgcgactgccacctggcctggctctcggattggctgcgacagcgacggacagttggccagttcacactctgcatggctcctgtgcatttgaggggcttcaacgtggcggatgtgcagaagaaggagtacgtgtgcccagccccccactcggagcccccatcctgcaatgccaactccatctcctgcccttcgccctgcacgtgcagcaataacatcgtggactgtcgaggaaagggcttgatggagattcctgccaacttgccggagggcatcgtcgaaatacgcctagaacagaactccatcaaagccatccctgcaggagccttcacccagtacaagaaactgaagcgaatagacatcagcaagaatcagatatcggatattgctccagatgccttccagggcctgaaatcactcacatcgctggtcctgtatgggaacaagatcaccgagattgccaagggactgtttgatgggctggtgtccctacagctgctcctcctcaatgccaacaagatcaactgcctgcgggtgaacacgtttcaggacctgcagaacctcaacttgctctccctgtatgacaacaagctgcagaccatcagcaaggggctcttcgcccctctgcagtccatccagacactccacttagcccaaaacccatttgtgtgcgactgccacttgaagtggctggccgactacctccaggacaaccccatcgagacaagcggggcccgctgcagcagcccgcgccgactcgccaacaagcgcatcagccagatcaagagcaagaagttccgctgctcaggctccgaggattaccgcagcaggttcagcagcgagtgcttcatggacctcgtgtgccccgagaagtgtcgctgtgagggcacgattgtggactgctccaaccagaagctggtccgcatcccaagccacctccctgaatatgtcaccgacctgcgactgaatgacaatgaggtatctgttctggaggccactggcatcttcaagaagttgcccaacctgcggaaaataaatctgagtaacaataagatcaaggaggtgcgagagggagctttcgatggagcagccagcgtgcaggagctgatgctgacagggaaccagctggagaccgtgcacgggcgcgtgttccgtggcctcagtggcctcaaaaccttgatgctgaggagtaacttgatcggctgtgtgagtaatgacacctttgccggcctgagttcggtgagactgctgtccctctatgacaatcggatcaccaccatcacccctggggccttcaccacgcttgtctccctgtccaccataaacctcctgtccaaccccttcaactgcaactgccacctggcctggctcggcaagtggttgaggaagaggcggatcgtcagtgggaaccctaggtgccagaagccatttttcctcaaggagattcccatccaggatgtggccatccaggacttcacctgtgatggcaacgaggagagtagctgccagctgagcccgcgctgcccggagcagtgcacctgtatggagacagtggtgcgatgcagcaacaaggggctccgcgccctccccagaggcatgcccaaggatgtgaccgagctgtacctggaaggaaaccacctaacagccgtgcccagagagctgtccgccctccgacacctgacgcttattgacctgagcaacaacagcatcagcatgctgaccaattacaccttcagtaacatgtctcacctctccactctgatcctgagctacaaccggctgaggtgcatccccgtccacgccttcaacgggctgcggtccctgcgagtgctaaccctccatggcaatgacatttccagcgttcctgaaggctccttcaacgacctcacatctctttcccatctggcgctgggaaccaacccactccactgtgactgcagtcttcggtggctgtcggagtgggtgaaggcggggtacaaggagcctggcatcgcccgctgcagtagccctgagcccatggctgacaggctcctgctcaccaccccaacccaccgcttccagtgcaaagggccagtggacatcaacattgtggccaaatgcaatgcctgcctctccagcccgtgcaagaataacgggacatgcacccaggaccctgtggagctgtaccgctgtgcctgcccctacagctacaagggcaaggactgcactgtgcccatcaacacctgcatccagaacccctgtcagcatggaggcacctgccacctgagtgacagccacaaggatgggttcagctgctcctgccctctgggctttgaggggcagcggtgtgagatcaacccagatgactgtgaggacaacgactgcgaaaacaatgccacctgcgtggacgggatcaacaactacgtgtgtatctgtccgcctaactacacaggtgagctatgcgacgaggtgattgaccactgtgtgcctgagctgaacctctgtcagcatgaggccaagtgcatccccctggacaaaggattcagctgcgagtgtgtccctggctacagcgggaagctctgtgagacagacaatgatgactgtgtggcccacaagtgccgccacggggcccagtgcgtggacacaatcaatggctacacatgcacctgcccccagggcttcagtggacccttctgtgaacaccccccacccatggtcctactgcagaccagcccatgcgaccagtacgagtgccagaacggggcccagtgcatcgtggtgcagcaggagcccacctgccgctgcccaccaggcttcgccggccccagatgcgagaagctcatcactgtcaacttcgtgggcaaagactcctacgtggaactggcctccgccaaggtccgaccccaggccaacatctccctgcaggtggccactgacaaggacaacggcatccttctctacaaaggagacaatgaccccctggcactggagctgtaccagggccacgtgcggctggtctatgacagcctgagttcccctccaaccacagtgtacagtgtggagacagtgaatgatgggcagtttcacagtgtggagctggtgacgctaaaccagaccctgaacctagtagtggacaaaggaactccaaagagcctggggaagctccagaagcagccagcagtgggcatcaacagccccctctaccttggaggcatccccacctccaccggcctctccgccttgcgccagggcacggaccggcctctaggcggcttccacggatgcatccatgaggtgcgcatcaacaacgagctgcaggacttcaaggccctcccaccacagtccctgggggtgtcaccaggctgcaagtcctgcaccgtgtgcaagcacggcctgtgccgctccgtggagaaggacagcgtggtgtgcgagtgccgcccaggctggaccggcccactctgcgatcaggaggcccgggacccctgcctcggccacagatgccaccatggaaaatgtgtggcaactgggacctcatacatgtgcaagtgtgccgagggctatggaggggacttgtgtgacaacaagaatgactctgccaatgcctgctcagccttcaagtgtcaccatgggcagtgccacatctcagaccaaggggagccctactgcctgtgccagcccggctttagcggcgagcactgccaacaagactccagcttgatggagttgggacagccatgtgggaccccctggtgattcagcatgaaggaaatgaagctggagaggaaggtaaagaagaagagaatattaagtatattgtaaaataaacaaaaaatagaacttatttttattatggaaagtgactattttcatcttttattatataaatatattacaccatctgcgtatatgtaccatatagtgagttatttttaccaagttttgtgttgtgtatttgttgtgtttttaaaaatagctgtttaaaaatttaagaaaaaaatagactaataaaaatgctttaaaacaaaaggataagaataaagaatgatagcctgtctgaggaaggaggaagatgttttcatgtttatgaaacggtattatgtcggcagtagaccaagagctgctcattgagatcagaaaaaggaataagaggaagagagagaaggaaaagacctttgtttcttgttttttaactcccttttatttttcctcccctaaaattacccagcttttcggagtcctggatgtcagtgcccaaaatgcccagttcttccaggaaaagctgctgagccctggccttctcagtctcactgccactcaaaaatattgctgtccctgtctgtcccagaccccccttcagggtatctgaacccactgggggacccctcttctccttcctgggtggccctggcttccgtatctgaacccactgggggacccctcttctccttcctggctggccctggcttccaatcgaggactgactattgaagtctgctacaggtgtcatttggaactgtcttaccaaattttaaaacagctgctatttttcctgctcctccccaggagaggggtcttcctagaggaggcgagggaagagaatatcatggtgtctcctcaggacccatgcactggccctctctcctccttccaggtaatttttcattggaatgtatcccagtagagaaggtagtcagcccttcttggaagcggaaggctgggagccaagtcaagtctgcccacagcgctagatgtccaactctggaaggttcttggaggctcttgttgtaagacaggcctctgccacctgatcctccaggtcaccagcatgacgatagagactccttgcccatctgtgacactttccaatgcatatccaaactttaccttattttatctatgcaacccctgcctccctgggaaggataagggagtagagctgggttcactaagaaggaagtttaggccctcacaggctctggaacttgccttaagccacacaccagataagtggaggagccagaccagaagtccagacccaaagcttgagattcttcctctagaatgggtgagcacaggtgattcaggcggcttaaatccatcagagcagccctgccggaaaaggaaataatatgatgttttttcctgctcttgttctgccttgctcactccttctccctccgcagtatctggaaagattctggagaccagggcttatgcatctagggaaagtgaccaagggcagcctatccagcctctgcctccattcctgaaggggacttccctgcccctgtttctttccatgtctctccctccctcactcccatttgcccccttccaccccatcaggttagccacatatcttccagggctcagctgttcacaccaactccctggctcttatcatccatccctccttcccccaggagcttccactgtaggagtttcagggagaagagtttggaattcattggacctttcagccctcaggttccctagaggagcctagttgatctgtgagtaccaatggtgggccaaagacgcagggaataatgaagggagaaagaaaagaaaggaagatggaggaaaacgangcaactggaagaagaaggaagggatggaggggatgaagagaagggagagagggatatagctgaggaatttatctaaaaatgtgcatgtaaatctccattatgttccaggtactgtgccttatgatggctttgttttttgttgtcattagagacaaggtcttgctttgtcacccaggctggagtagagtggttcgatcatagctcaccncagcctcaacctcctaggctcaagccatcttcctgcctcagtctcccaaaatgctgggattacaggtgtgagccactatgctcagcctgtttcaaacattattataatagcagatttatttagtactttattatacatcagataccactctaattgtgaaatagatatatattcatttaattattgaaacaaccatgtagttaaaacactattaactcattttacagttgagtagactgagacacagagaagttaaagaacttgcccaagagtaaatgtctaataaaccgtagagccaggatctgggcccaggctgtctgactccagaacttgctcactcaaccactaaaccatcctgcttctcatgggaaagaaacacatcctgcctttgaggatcctacagcctgtgacaaaaacagtcataaaaatggacaattgccttattacacaaggagctcttaagtggcaatacaagcaatggaagtggctgtccagaggagggaacttctagtcctaggtctttaaggatgaataggagtttgccagagtgagaaagggaattgaactttcctgggagtggccttttaaaaagcaatgagatatggccaggcctggcttgtttggggaagagtcaaaatctagggtggcaagagtatgggaagcacactgaggagcagagagaaatggggtaggtaggaaggtagggttttgaccacaaagagctgtgcatgctaaactgggccacaggtgccagcagggttgtttgaggaagggaagagcaagacaagctctggtttaggaagagagctgtggcagcataaaggcctgaaagaggagacagagctgtcacccaaaatggacttgagagctccctgtggtttactctgtggctagaaaacactgccggccagatggatcacaaatgtctatggtagcttagaagctctgctcttgaagaggatcctgggatctgcccaacacccttcccaacctccatttccccatccccacctccattgccccatcccccctctccccctaggcaggtggatctgagccttatcccaccaccaatgcccctgctagcctctccccacccagcccagagcctactcagcctgccatctcaagagccccaccgagggtcactggcttcctgggaggagtcaccaggctgccagctttccctctgcctccccaaggaacctgagacctccctctgctcatcaccctgggcccaatcctgaatccagcccccatcaaccaagacagcaaaagggccaggtctgtcccttataattttgagccttctccctcaagtttggaagccctgactttaagaaatgccaaatgcaaggaccattaagaaaattctccccgaaatgaggctcctctaacaaatgatgattaaaacgctctctccttgagcagtcacattctagaaacaggacattccatgaggcaggaagagttcagttaatttgctcctgaaaaagtgtggttcagtgtttgtgtggcaatgtacgtgggcagaagaggccgctcaagctgtgtcccccctgagcaggattcaggaaagggaaaagaagttctcttcaactcagccaaggggccgtacgatggccgatgagattatgtatttaaaagttctttgtaaagtgtaaactaaaaaccttaaatgtaagatgctgttgttattattactgttgttgttgctgttatggacatgccaaaaggcccttgttagaagacagttttgccttttcaatctcatagcaaggaactcaagtctgatgcttcaaaaagatgagaagaagggcaagaagagggataactcccaagctcagagggaaaaaaaaggngggggaaaagagccccagggtgaccttcaggaaaggccaggaccaggatgatctaacctttcccttcaccagaaacaaagctattgccagactgaaccctaaagtcaagcagtcacccactgcctttgctgggagcagaagcccatagcaacaagtgacctgcccctcagactcaagatcccagataccagagctggaggagtcatagggcattactggtaggcaggaaaactgagggtcgaacaaatggaagaatgcggtgatcatagaccaaagacacacagataattaaccccatgtgtccacccaggccaaagttcttcctgctaccccacagtggatgtccaggcagatggtccccacatgatggggaagcagagggcatagtgtggttttgtgggacttgttcatgttttgtagtgtgggctcaacagtgccaaaggaaacactagggaaaagttggtgaaacatgccagctagcaggaccagtaaaggcataatcaggcatttggcaaagcttgcttttctaattcaatgataggttctaataggaaatttttgaagattttttaaaacaatgttatagtggcacttccccagtatggaataaataacatgcattcttttttcaatatactgtcatattcagatgtcattaaaataaatggatgagtcacagaggagctatcagatgctctcatgactaccataactcagaaaaaaaca

SEQ ID NO: 342056 - DNA, 7161 bp, Homo sapiens
  misc_feature (4365)..(4365): n is a, c, g, or t
  misc_feature (4573)..(4573): n is a, c, g, or t
  misc_feature (6435)..(6435): n is a, c, g, or t
gcgtctgtgtagttctctcagacagtcagagaggagagacggagcagcgtggcagacaggctggctctgcacgagctcctggcggggaccagcagcgcctgcaagggggtggagggacaggcgctcgggtggcctgggccgccggcccctcacgctgcccccgctcagccttcatgctctcccctgcttttccacaggcaactggacaacaaccacatcagctgcattgaagatggagccttccgagcgctgcgcgatttggagatccttaccctcaacaacaacaacatcagtcgcatcctggtcaccagcttcaaccacatgccgaagatccgaactctgcgcctccactccaaccacctgtactgcgactgccacctggcctggctctcggattggctgcgacagcgacggacagttggccagttcacactctgcatggctcctgtgcatttgaggggcttcaacgtggcggatgtgcagaagaaggagtacgtgtgcccagccccccactcggagcccccatcctgcaatgccaactccatctcctgcccttcgccctgcacgtgcagcaataacatcgtggactgtcgaggaaagggcttgatggagattcctgccaacttgccggagggcatcgtcgaaatacgcctagaacagaactccatcaaagccatccctgcaggagccttcacccagtacaagaaactgaagcgaatagacatcagcaagaatcagatatcggatattgctccagatgccttccagggcctgaaatcactcacatcgctggtcctgtatgggaacaagatcaccgagattgccaagggactgtttgatgggctggtgtccctacagctgctcctcctcaatgccaacaagatcaactgcctgcgggtgaacacgtttcaggacctgcagaacctcaacttgctctccctgtatgacaacaagctgcagaccatcagcaaggggctcttcgcccctctgcagtccatccagacactccacttagcccaaaacccatttgtgtgcgactgccacttgaagtggctggccgactacctccaggacaaccccatcgagacaagcggggcccgctgcagcagcccgcgccgactcgccaacaagcgcatcagccagatcaagagcaagaagttccgctgctcaggctccgaggattaccgcagcaggttcagcagcgagtgcttcatggacctcgtgtgccccgagaagtgtcgctgtgagggcacgattgtggactgctccaaccagaagctggtccgcatcccaagccacctccctgaatatgtcaccgacctgcgactgaatgacaatgaggtatctgttctggaggccactggcatcttcaagaagttgcccaacctgcggaaaataaatctgagtaacaataagatcaaggaggtgcgagagggagctttcgatggagcagccagcgtgcaggagctgatgctgacagggaaccagctggagaccgtgcacgggcgcgtgttccgtggcctcagtggcctcaaaaccttgatgctgaggagtaacttgatcggctgtgtgagtaatgacacctttgccggcctgagttcggtgagactgctgtccctctatgacaatcggatcaccaccatcacccctggggccttcaccacgcttgtctccctgtccaccataaacctcctgtccaaccccttcaactgcaactgccacctggcctggctcggcaagtggttgaggaagaggcggatcgtcagtgggaaccctaggtgccagaagccatttttcctcaaggagattcccatccaggatgtggccatccaggacttcacctgtgatggcaacgaggagagtagctgccagctgagcccgcgctgcccggagcagtgcacctgtatggagacagtggtgcgatgcagcaacaaggggctccgcgccctccccagaggcatgcccaaggatgtgaccgagctgtacctggaaggaaaccacctaacagccgtgcccagagagctgtccgccctccgacacctgacgcttattgacctgagcaacaacagcatcagcatgctgaccaattacaccttcagtaacatgtctcacctctccactctgatcctgagctacaaccggctgaggtgcatccccgtccacgccttcaacgggctgcggtccctgcgagtgctaaccctccatggcaatgacatttccagcgttcctgaaggctccttcaacgacctcacatctctttcccatctggcgctgggaaccaacccactccactgtgactgcagtcttcggtggctgtcggagtgggtgaaggcggggtacaaggagcctggcatcgcccgctgcagtagccctgagcccatggctgacaggctcctgctcaccaccccaacccaccgcttccagtgcaaagggccagtggacatcaacattgtggccaaatgcaatgcctgcctctccagactccagcttgatggagttgggacagccatgtgggaccccctggtgattcagcatgaaggaaatgaagctggagaggaaggtaaagaagaagagaatattaagtatattgtaaaataaacaaaaaatagaacttatttttattatggaaagtgactattttcatcttttattatataaatatattacaccatctgcgtatatgtaccatatagtgagttatttttaccaagttttgtgttgtgtatttgttgtgtttttaaaaatagctgtttaaaaatttaagaaaaaaatagactaataaaaatgctttaaaacaaaaggataagaataaagaatgatagcctgtctgaggaaggaggaagatgttttcatgtttatgaaacggtattatgtcggcagtagaccaagagctgctcattgagatcagaaaaaggaataagaggaagagagagaaggaaaagacctttgtttcttgttttttaactcccttttatttttcctcccctaaaattacccagcttttcggagtcctggatgtcagtgcccaaaatgcccagttcttccaggaaaagctgctgagccctggccttctcagtctcactgccactcaaaaatattgctgtccctgtctgtcccagaccccccttcagggtatctgaacccactgggggacccctcttctccttcctgggtggccctggcttccgtatctgaacccactgggggacccctcttctccttcctggctggccctggcttccaatcgaggactgactattgaagtctgctacaggtgtcatttggaactgtcttaccaaattttaaaacagctgctatttttcctgctcctccccaggagaggggtcttcctagaggaggcgagggaagagaatatcatggtgtctcctcaggacccatgcactggccctctctcctccttccaggtaatttttcattggaatgtatcccagtagagaaggtagtcagcccttcttggaagcggaaggctgggagccaagtcaagtctgcccacagcgctagatgtccaactctggaaggttcttggaggctcttgttgtaagacaggcctctgccacctgatcctccaggtcaccagcatgacgatagagactccttgcccatctgtgacactttccaatgcatatccaaactttaccttattttatctatgcaacccctgcctccctgggaaggataagggagtagagctgggttcactaagaaggaagtttaggccctcacaggctctggaacttgccttaagccacacaccagataagtggaggagccagaccagaagtccagacccaaagcttgagattcttcctctagaatgggtgagcacaggtgattcaggcggcttaaatccatcagagcagccctgccggaaaaggaaataatatgatgttttttcctgctcttgttctgccttgctcactccttctccctccgcagtatctggaaagattctggagaccagggcttatgcatctagggaaagtgaccaagggcagcctatccagcctctgcctccattcctgaaggggacttccctgcccctgtttctttccatgtctctccctccctcactcccatttgcccccttccaccccatcaggttagccacatatcttccagggctcagctgttcacaccaactccctggctcttatcatccatccctccttcccccaggagcttccactgtaggagtttcagggagaagagtttggaattcattggacctttcagccctcaggttccctagaggagcctagttgatctgtgagtaccaatggtgggccaaagacgcagggaataatgaagggagaaagaaaagaaaggaagatggaggaaaacgangcaactggaagaagaaggaagggatggaggggatgaagagaagggagagagggatatagctgaggaatttatctaaaaatgtgcatgtaaatctccattatgttccaggtactgtgccttatgatggctttgttttttgttgtcattagagacaaggtcttgctttgtcacccaggctggagtagagtggttcgatcatagctcaccncagcctcaacctcctaggctcaagccatcttcctgcctcagtctcccaaaatgctgggattacaggtgtgagccactatgctcagcctgtttcaaacattattataatagcagatttatttagtactttattatacatcagataccactctaattgtgaaatagatatatattcatttaattattgaaacaaccatgtagttaaaacactattaactcattttacagttgagtagactgagacacagagaagttaaagaacttgcccaagagtaaatgtctaataaaccgtagagccaggatctgggcccaggctgtctgactccagaacttgctcactcaaccactaaaccatcctgcttctcatgggaaagaaacacatcctgcctttgaggatcctacagcctgtgacaaaaacagtcataaaaatggacaattgccttattacacaaggagctcttaagtggcaatacaagcaatggaagtggctgtccagaggagggaacttctagtcctaggtctttaaggatgaataggagtttgccagagtgagaaagggaattgaactttcctgggagtggccttttaaaaagcaatgagatatggccaggcctggcttgtttggggaagagtcaaaatctagggtggcaagagtatgggaagcacactgaggagcagagagaaatggggtaggtaggaaggtagggttttgaccacaaagagctgtgcatgctaaactgggccacaggtgccagcagggttgtttgaggaagggaagagcaagacaagctctggtttaggaagagagctgtggcagcataaaggcctgaaagaggagacagagctgtcacccaaaatggacttgagagctccctgtggtttactctgtggctagaaaacactgccggccagatggatcacaaatgtctatggtagcttagaagctctgctcttgaagaggatcctgggatctgcccaacacccttcccaacctccatttccccatccccacctccattgccccatcccccctctccccctaggcaggtggatctgagccttatcccaccaccaatgcccctgctagcctctccccacccagcccagagcctactcagcctgccatctcaagagccccaccgagggtcactggcttcctgggaggagtcaccaggctgccagctttccctctgcctccccaaggaacctgagacctccctctgctcatcaccctgggcccaatcctgaatccagcccccatcaaccaagacagcaaaagggccaggtctgtcccttataattttgagccttctccctcaagtttggaagccctgactttaagaaatgccaaatgcaaggaccattaagaaaattctccccgaaatgaggctcctctaacaaatgatgattaaaacgctctctccttgagcagtcacattctagaaacaggacattccatgaggcaggaagagttcagttaatttgctcctgaaaaagtgtggttcagtgtttgtgtggcaatgtacgtgggcagaagaggccgctcaagctgtgtcccccctgagcaggattcaggaaagggaaaagaagttctcttcaactcagccaaggggccgtacgatggccgatgagattatgtatttaaaagttctttgtaaagtgtaaactaaaaaccttaaatgtaagatgctgttgttattattactgttgttgttgctgttatggacatgccaaaaggcccttgttagaagacagttttgccttttcaatctcatagcaaggaactcaagtctgatgcttcaaaaagatgagaagaagggcaagaagagggataactcccaagctcagagggaaaaaaaaggngggggaaaagagccccagggtgaccttcaggaaaggccaggaccaggatgatctaacctttcccttcaccagaaacaaagctattgccagactgaaccctaaagtcaagcagtcacccactgcctttgctgggagcagaagcccatagcaacaagtgacctgcccctcagactcaagatcccagataccagagctggaggagtcatagggcattactggtaggcaggaaaactgagggtcgaacaaatggaagaatgcggtgatcatagaccaaagacacacagataattaaccccatgtgtccacccaggccaaagttcttcctgctaccccacagtggatgtccaggcagatggtccccacatgatggggaagcagagggcatagtgtggttttgtgggacttgttcatgttttgtagtgtgggctcaacagtgccaaaggaaacactagggaaaagttggtgaaacatgccagctagcaggaccagtaaaggcataatcaggcatttggcaaagcttgcttttctaattcaatgataggttctaataggaaatttttgaagattttttaaaacaatgttatagtggcacttccccagtatggaataaataacatgcattcttttttcaatatactgtcatattcagatgtcattaaaataaatggatgagtcacagaggagctatcagatgctctcatgactaccataactcagaaaaaaaca

SEQ ID NO: 342057 - DNA, 436 bp, Homo sapiens
gaagctccagaagcagccagcagtgggcatcaacagccccctctaccttggaggtaatgccctctttccctaccacctctacctccctctggccctctgtgctccagtacagaaacccaggccactgccaaagccaatcagggaaggcttcctggaggaagggacaacgaagctgatctctaaaaggtgaataagcactagccaggccatggaggaaagagaatgtgggacaggtgcttggaaaggaaagagaacaggactcctggaaactacacgttgtgacgggcaagggtgagaagggggaggcaggagatggaagcagggtctaggctctgctgaagtctgccagcttcaggtcatattccctctgctctgccacctcctcaaaccctcggaggttcaattaatgaatgtagaagaatttgagattaaaatc

SEQ ID NO: 342058 - DNA, 339 bp, Homo sapiens
ctgtactgtttttatttttgcaacttatgtaagtttaaagttatttccaaataaaaagtaaaacaaaatgtaagcaatgcaggtcaagtccacagcacagggcccagccatggaaggcccttagtgaactctccggctttctccccttctctactggccagtgtggagacagtgaatgatgggcagtttcacagtgtggagctggtgacgctaaaccagaccctgaacctagtagtggacaaaggaactccaaagagcctggggaagctccagaagcagccagcagtgggcatcaacagccccctctaccttggaggtaatgccctctttccctaccac

SEQ ID NO: 342059 - DNA, 4227 bp, Homo sapiens
  misc_feature (1)..(1): n is a, c, g, or t
  misc_feature (849)..(849): n is a, c, g, or t
  misc_feature (944)..(944): n is a, c, g, or t
nctggagtgcatttttaatctacaccctcgtgaggtttgagaagcactggtcaagagtcatcccagtgcccagaatcagttctaggagcagctgctgtggctagggacaggtcatgcatggaggtcagtgggcagctggagccatctcccatctgccttccagctcaatgccctgcattgtgcctccatcacaacaaaatagcagagggggccttgagctgataggagacttgagatgcttgctctgtgcccaaatggctgtgtccagtcacttatggctccaggtacttcacctctcagggctgctgtttccttcttgcagaattaagaattaagacgcagtttgccaaatgttctcacttatacatggaatctaaacaaagccaaactcttagaagcagaaagtagaatggtgatgttcagaggccggtggggtgagggtggggtagagatgaagatgacacagatgttcgtcaaagggtgcaaaatttcaggtagacaggagaagtaagttcaagagatccattgtgttatacaacacggtgaatgtagttaacaacaatgtatcgtatacttgaaaatagctcagagagtagattttaagtgttcttaccacaaataaatgataagcatgtgaggtaatgcataggttaagtagcttgacttagctattccacaatgaaagcatatatcaaaacattgtgttgcacaccaaatatgtatacatttttaaaagactagttgagtacagtagtgaaaaaggaggaaagagtagaacaaggagtttgatctgtaactgactgtgaacaatccattgagagaactcactacctttgaaccagcctaaanatgcagtttttataataataaagaaaaagacaaagtgaccaaggtcaattcccagctaaactgtctatcacttctccaattcccactctccagcncctccaaaccgtggggcatctcacctcatactgtagggagagatgggtccagaagtctagttgtggactgaaaaccagtttgccctcccagagctaaagcagagggtttccgtgctggccacatagcttcctcttgcaactagaggtctcagcaccttgaagggacaattcataatcaggggaaaaaaagacaacacaggccttcccgctagtccagtctaaacagatccttcgtgtttgtctggaatgctttgcataggcagccatgctgagggcaagtgagattaggataatccagagtatttgcttgttaagacccttaaacaaaaccggagcgcggaagaaaagcccggtgtaagctgacgagtttgtgagtgcaatctgcggatttgtcggaggtgatttcgccagctaaagggataaactagacagctgtgccgaagagccttaacctgtgaaatatcgttcaaagtacaggctttggaggcagggaggggaggaagtagaggcctcagcaaaggttgtggcatggttcttttgaaatctattagaagaaggaaggaaacaggctcagagagattcccactgcatgtgcttaagaggctggagtgtctggcttcgctggagtcaattgcttaagaatctgctctgttgtgcttttttttctccacattctctcttcacctccttgttgaccttccaagatcccagctctcccacttctgcacaaaagcaaagacccatttatttattttgttaaagaaaaggaactggagaggtttgatgtcgcaggaaattggagcatctctccttccagtgacaggatcccagaggccatccctgagctaatgactctaagagaaagaatttcccctcagtgaagggccattagcaagagctggtgtccaggttctcagaagtcactgggatgcccgtaattgagcagcctcagggcctctgggaaggagccagggtcgaggagattcctttgcacctgcaaagcctggttagctgccccagaccccgggcccagcattaatagaatcctcctggcccacagcatccctcttgctctcattatccaaagcctgggacattcttatgccctggacttgctcccagatgaggaacacactgccagccagtgacaagcccacatctccaaggcgtccctgagaatcccaggatgtgcttacatcacacagcctagagtttgcaccagaccagacagagacttaagtcactgctcaaaagctcctttcaggtcagggaggaaaagtcactggggaggtgaaatgactctggactttctgggagaaaaatgagcagctgctgaggcatgaggcaagaagatgatgcctacaggaaccctggcttgtggttggttgggtgaagccggttcctgtttcatctgtgtcgttaattgcttggtaatgaaacgtaaggccctaatttgactgggctcaattttccacctacaaagtgatggttcacgtgttcacagcctcgtgtcccgatgaagatgccacgggtgagtattctttgaaaaccaagaagagtgatgtaaatgtggtgcactttatcatgaggtagttgaactgaaggctctttaagctccttctcttgcactatgagtaaatgaattgcttgattgattgattaatccttaccattttgaatgtctgaaatgcttgattcacacttaggagtgaccgttatcgcacctttgagccatgttctcagactttaccgttaacgttttcagagacatcagcaagaatcagatatcggatattgctccagatgccttccagggcctgaaatcactcacatcgctggtcctgtatgggaacaagatcaccgagattgccaagggactgtttgatgggctggtgtccctacagctgctcctcctcaatgccaacaagatcaactgcctgcgggtgaacacgtttcaggacctgcagaacctcaacttgctctccctgtatgacaacaagctgcagaccatcagcaaggggctcttcgcccctctgcagtccatccagacactccacttagcccaaaacccatttgtgtgcgactgccacttgaagtggctggccgactacctccaggacaaccccatcgagacaagcggggcccgctgcagcagcccgcgccgactcgccaacaagcgcatcagccagatcaagagcaagaagttccgctgctcaggctccgaggattaccgcagcaggttcagcagcgagtgcttcatggacctcgtgtgccccgagaagtgtcgctgtgagggcacgattgtggactgctccaaccagaagctggtccgcatcccaagccacctccctgaatatgtcaccgacctgcgactgaatgacaatgaggtatctgttctggaggccactggcatcttcaagaagttgcccaacctgcggaaaataaatctgagtaacaataagatcaaggaggtgcgagagggagctttcgatggagcagccagcgtgcaggagctgatgctgacagggaaccagctggagaccgtgcacgggcgcgtgttccgtggcctcagtggcctcaaaaccttgatgctgaggagtaacttgatcggctgtgtgagtaatgacacctttgccggcctgagttcggtgagactgctgtccctctatgacaatcggatcaccaccatcacccctggggccttcaccacgcttgtctccctgtccaccatgtaagttctcctgggtccactgcccacggactctgggatcccactctgcagcgctctctcctcccagctccctgctacctctagccaggctcatctatctgtctgtccacttaaaaactcgtcaggctttctgtatgtgccaggcaggcatcgtctaggtgttgaggctgcacacacccggcccctccttcctggaactcacagcatagtgaattgccacagaaagcatgtccacagtgatttgaaaacccaagctggaaggccaggcatggtggctcacgcctgtaatcctaacactttgggaggctgaggtgggtggatcacctgaggtgaggaattcgaaaccagcctgaccaacatggtgaaaccccttctctactaaaaattcaaaagttagccagttatggtggtgagtatccgtaatcccagctacctgggagactgaggcaggacagttgctggaacccgggaggcggaggctgcagtgagctgagatcatgccactgcattccagcctaggcgacagagcaagattccgtgtcaaaaaaaaaa

SEQ ID NO: 342060 - DNA, 490 bp, Homo sapiens
acaaaaaatagctggtacctgtttgagcggctgagcccgcgctgcccggagcagtgcacctgtatggagacagtggtgcgatgcagcaacaaggggctccgcgccctccccagaggcatgcccaaggatgtgaccgagctgtaagtacccccagctgcctccaagcaccctgtcatctcaccatcagcagcatcctccatactttaccccagaatctcaagcaaggctacatggcgaaactgccggggggtagaccctacttgaatggtatcccagcaagtatggcagtggagccctcaccaagtatggcagccatggtctttgacaagggcacaggaaacatggctcccacagtgtctctgcctggcagaggaggagtctctgaccctgtaattctctaaagataccctgtagtataagtgggagggttattgcctcattttccgtatcacacctgaaacctctgctccgtacaccctcttcctaagac

SEQ ID NO: 342061 - DNA, 8202 bp, Homo sapiens
  misc_feature (5406)..(5406): n is a, c, g, or t
  misc_feature (5614)..(5614): n is a, c, g, or t
  misc_feature (7476)..(7476): n is a, c, g, or t
gcgctccgcacctgggcactcccagcgatgcgcagcggggcagcgccggccccgccgatggagctgctgttgctgccgccgccgccgcccggagcgccccgctccgcccgcgccccgtgcgcctgagcaccgagctcgcccctcctccgcgctaactccgccgcccgctccccaggccgcccgcgctccccgcgcgcctcctcgggctccacgcgtcttgccccgcagaggcagcctcctccaggagcggggccctgcacaccatggcccccgggtgggcaggggtcggcgccgccgtgcgcgcccgcctggcgctggccttggcgctggcgagcgtcctgagtgggcctccagccgtcgcctgccccaccaagtgtacctgctccgctgccagcgtggactgccacgggctgggcctccgcgcggttcctcggggcatcccccgcaacgctgagcgccttgacctggacagaaataatatcaccaggatcaccaagatggacttcgctgggctcaagaacctccgagtcttgcatctggaagacaaccaggtcagcgtcatcgagagaggcgccttccaggacctgaagcagctagagcgactgcgcctgaacaagaataagctgcaagtccttccagaattgcttttccagagcacgccgaagctcaccagactagatttgagtgaaaaccagatccaggggatcccgaggaaggcgttccgcggcatcaccgatgtgaagaacctgcaactggacaacaaccacatcagctgcattgaagatggagccttccgagcgctgcgcgatttggagatccttaccctcaacaacaacaacatcagtcgcatcctggtcaccagcttcaaccacatgccgaagatccgaactctaaacctcctgtccaaccccttcaactgcaactgccacctggcctggctcggcaagtggttgaggaagaggcggatcgtcagtgggaaccctaggtgccagaagccatttttcctcaaggagattcccatccaggatgtggccatccaggacttcacctgtgatggcaacgaggagagtagctgccagctgagcccgcgctgcccggagcagtgcacctgtatggagacagtggtgcgatgcagcaacaaggggctccgcgccctccccagaggcatgcccaaggatgtgaccgagctgtacctggaaggaaaccacctaacagccgtgcccagagagctgtccgccctccgacacctgacgcttattgacctgagcaacaacagcatcagcatgctgaccaattacaccttcagtaacatgtctcacctctccactctgatcctgagctacaaccggctgaggtgcatccccgtccacgccttcaacgggctgcggtccctgcgagtgctaaccctccatggcaatgacatttccagcgttcctgaaggctccttcaacgacctcacatctctttcccatctggcgctgggaaccaacccactccactgtgactgcagtcttcggtggctgtcggagtgggtgaaggcggggtacaaggagcctggcatcgcccgctgcagtagccctgagcccatggctgacaggctcctgctcaccaccccaacccaccgcttccagtgcaaagggccagtggacatcaacattgtggccaaatgcaatgcctgcctctccagcccgtgcaagaataacgggacatgcacccaggaccctgtggagctgtaccgctgtgcctgcccctacagctacaagggcaaggactgcactgtgcccatcaacacctgcatccagaacccctgtcagcatggaggcacctgccacctgagtgacagccacaaggatgggttcagctgctcctgccctctgggctttgaggggcagcggtgtgagatcaacccagatgactgtgaggacaacgactgcgaaaacaatgccacctgcgtggacgggatcaacaactacgtgtgtatctgtccgcctaactacacaggtgagctatgcgacgaggtgattgaccactgtgtgcctgagctgaacctctgtcagcatgaggccaagtgcatccccctggacaaaggattcagctgcgagtgtgtccctggctacagcgggaagctctgtgagacagacaatgatgactgtgtggcccacaagtgccgccacggggcccagtgcgtggacacaatcaatggctacacatgcacctgcccccagggcttcagtggacccttctgtgaacaccccccacccatggtcctactgcagaccagcccatgcgaccagtacgagtgccagaacggggcccagtgcatcgtggtgcagcaggagcccacctgccgctgcccaccaggcttcgccggccccagatgcgagaagctcatcactgtcaacttcgtgggcaaagactcctacgtggaactggcctccgccaaggtccgaccccaggccaacatctccctgcaggtggccactgacaaggacaacggcatccttctctacaaaggagacaatgaccccctggcactggagctgtaccagggccacgtgcggctggtctatgacagcctgagttcccctccaaccacagtgtacagtgtggagacagtgaatgatgggcagtttcacagtgtggagctggtgacgctaaaccagaccctgaacctagtagtggacaaaggaactccaaagagcctggggaagctccagaagcagccagcagtgggcatcaacagccccctctaccttggaggcatccccacctccaccggcctctccgccttgcgccagggcacggaccggcctctaggcggcttccacggatgcatccatgaggtgcgcatcaacaacgagctgcaggacttcaaggccctcccaccacagtccctgggggtgtcaccaggctgcaagtcctgcaccgtgtgcaagcacggcctgtgccgctccgtggagaaggacagcgtggtgtgcgagtgccgcccaggctggaccggcccactctgcgatcaggaggcccgggacccctgcctcggccacagatgccaccatggaaaatgtgtggcaactgggacctcatacatgtgcaagtgtgccgagggctatggaggggacttgtgtgacaacaagaatgactctgccaatgcctgctcagccttcaagtgtcaccatgggcagtgccacatctcagaccaaggggagccctactgcctgtgccagcccggctttagcggcgagcactgccaacaagagaatccgtgcctgggacaagtagtccgagaggtgatccgccgccagaaaggttatgcatcatgtgccacagcctccaaggtgcccatcatggaatgtcgtgggggctgtgggccccagtgctgccagcccacccgcagcaagcggcggaaatacgtcttccagtgcacggacggctcctcgtttgtagaagaggtggagagacacttagagtgcggctgcctcgcgtgttcctaagcccctgcccgcctgcctgccacctctcggactccagcttgatggagttgggacagccatgtgggaccccctggtgattcagcatgaaggaaatgaagctggagaggaaggtaaagaagaagagaatattaagtatattgtaaaataaacaaaaaatagaacttatttttattatggaaagtgactattttcatcttttattatataaatatattacaccatctgcgtatatgtaccatatagtgagttatttttaccaagttttgtgttgtgtatttgttgtgtttttaaaaatagctgtttaaaaatttaagaaaaaaatagactaataaaaatgctttaaaacaaaaggataagaataaagaatgatagcctgtctgaggaaggaggaagatgttttcatgtttatgaaacggtattatgtcggcagtagaccaagagctgctcattgagatcagaaaaaggaataagaggaagagagagaaggaaaagacctttgtttcttgttttttaactcccttttatttttcctcccctaaaattacccagcttttcggagtcctggatgtcagtgcccaaaatgcccagttcttccaggaaaagctgctgagccctggccttctcagtctcactgccactcaaaaatattgctgtccctgtctgtcccagaccccccttcagggtatctgaacccactgggggacccctcttctccttcctgggtggccctggcttccgtatctgaacccactgggggacccctcttctccttcctggctggccctggcttccaatcgaggactgactattgaagtctgctacaggtgtcatttggaactgtcttaccaaattttaaaacagctgctatttttcctgctcctccccaggagaggggtcttcctagaggaggcgagggaagagaatatcatggtgtctcctcaggacccatgcactggccctctctcctccttccaggtaatttttcattggaatgtatcccagtagagaaggtagtcagcccttcttggaagcggaaggctgggagccaagtcaagtctgcccacagcgctagatgtccaactctggaaggttcttggaggctcttgttgtaagacaggcctctgccacctgatcctccaggtcaccagcatgacgatagagactccttgcccatctgtgacactttccaatgcatatccaaactttaccttattttatctatgcaacccctgcctccctgggaaggataagggagtagagctgggttcactaagaaggaagtttaggccctcacaggctctggaacttgccttaagccacacaccagataagtggaggagccagaccagaagtccagacccaaagcttgagattcttcctctagaatgggtgagcacaggtgattcaggcggcttaaatccatcagagcagccctgccggaaaaggaaataatatgatgttttttcctgctcttgttctgccttgctcactccttctccctccgcagtatctggaaagattctggagaccagggcttatgcatctagggaaagtgaccaagggcagcctatccagcctctgcctccattcctgaaggggacttccctgcccctgtttctttccatgtctctccctccctcactcccatttgcccccttccaccccatcaggttagccacatatcttccagggctcagctgttcacaccaactccctggctcttatcatccatccctccttcccccaggagcttccactgtaggagtttcagggagaagagtttggaattcattggacctttcagccctcaggttccctagaggagcctagttgatctgtgagtaccaatggtgggccaaagacgcagggaataatgaagggagaaagaaaagaaaggaagatggaggaaaacgangcaactggaagaagaaggaagggatggaggggatgaagagaagggagagagggatatagctgaggaatttatctaaaaatgtgcatgtaaatctccattatgttccaggtactgtgccttatgatggctttgttttttgttgtcattagagacaaggtcttgctttgtcacccaggctggagtagagtggttcgatcatagctcaccncagcctcaacctcctaggctcaagccatcttcctgcctcagtctcccaaaatgctgggattacaggtgtgagccactatgctcagcctgtttcaaacattattataatagcagatttatttagtactttattatacatcagataccactctaattgtgaaatagatatatattcatttaattattgaaacaaccatgtagttaaaacactattaactcattttacagttgagtagactgagacacagagaagttaaagaacttgcccaagagtaaatgtctaataaaccgtagagccaggatctgggcccaggctgtctgactccagaacttgctcactcaaccactaaaccatcctgcttctcatgggaaagaaacacatcctgcctttgaggatcctacagcctgtgacaaaaacagtcataaaaatggacaattgccttattacacaaggagctcttaagtggcaatacaagcaatggaagtggctgtccagaggagggaacttctagtcctaggtctttaaggatgaataggagtttgccagagtgagaaagggaattgaactttcctgggagtggccttttaaaaagcaatgagatatggccaggcctggcttgtttggggaagagtcaaaatctagggtggcaagagtatgggaagcacactgaggagcagagagaaatggggtaggtaggaaggtagggttttgaccacaaagagctgtgcatgctaaactgggccacaggtgccagcagggttgtttgaggaagggaagagcaagacaagctctggtttaggaagagagctgtggcagcataaaggcctgaaagaggagacagagctgtcacccaaaatggacttgagagctccctgtggtttactctgtggctagaaaacactgccggccagatggatcacaaatgtctatggtagcttagaagctctgctcttgaagaggatcctgggatctgcccaacacccttcccaacctccatttccccatccccacctccattgccccatcccccctctccccctaggcaggtggatctgagccttatcccaccaccaatgcccctgctagcctctccccacccagcccagagcctactcagcctgccatctcaagagccccaccgagggtcactggcttcctgggaggagtcaccaggctgccagctttccctctgcctccccaaggaacctgagacctccctctgctcatcaccctgggcccaatcctgaatccagcccccatcaaccaagacagcaaaagggccaggtctgtcccttataattttgagccttctccctcaagtttggaagccctgactttaagaaatgccaaatgcaaggaccattaagaaaattctccccgaaatgaggctcctctaacaaatgatgattaaaacgctctctccttgagcagtcacattctagaaacaggacattccatgaggcaggaagagttcagttaatttgctcctgaaaaagtgtggttcagtgtttgtgtggcaatgtacgtgggcagaagaggccgctcaagctgtgtcccccctgagcaggattcaggaaagggaaaagaagttctcttcaactcagccaaggggccgtacgatggccgatgagattatgtatttaaaagttctttgtaaagtgtaaactaaaaaccttaaatgtaagatgctgttgttattattactgttgttgttgctgttatggacatgccaaaaggcccttgttagaagacagttttgccttttcaatctcatagcaaggaactcaagtctgatgcttcaaaaagatgagaagaagggcaagaagagggataactcccaagctcagagggaaaaaaaaggngggggaaaagagccccagggtgaccttcaggaaaggccaggaccaggatgatctaacctttcccttcaccagaaacaaagctattgccagactgaaccctaaagtcaagcagtcacccactgcctttgctgggagcagaagcccatagcaacaagtgacctgcccctcagactcaagatcccagataccagagctggaggagtcatagggcattactggtaggcaggaaaactgagggtcgaacaaatggaagaatgcggtgatcatagaccaaagacacacagataattaaccccatgtgtccacccaggccaaagttcttcctgctaccccacagtggatgtccaggcagatggtccccacatgatggggaagcagagggcatagtgtggttttgtgggacttgttcatgttttgtagtgtgggctcaacagtgccaaaggaaacactagggaaaagttggtgaaacatgccagctagcaggaccagtaaaggcataatcaggcatttggcaaagcttgcttttctaattcaatgataggttctaataggaaatttttgaagattttttaaaacaatgttatagtggcacttccccagtatggaataaataacatgcattcttttttcaatatactgtcatattcagatgtcattaaaataaatggatgagtcacagaggagctatcagatgctctcatgactaccataactcagaaaaaaaca

SEQ ID NO: 342062 - DNA, 7185 bp, Homo sapiens
  misc_feature (4389)..(4389): n is a, c, g, or t
  misc_feature (4597)..(4597): n is a, c, g, or t
  misc_feature (6459)..(6459): n is a, c, g, or t
ttttttttgctcacacccatttatttcccattagctttacacattgtgagtactcatcattggacaggagagagaggtgacgaacaagctggttagaaagccagcctgccacagaacttgagtaaactgaggaaataaagccagtgcgcttcctggattggtgaagaggtttcttgtccctttaggggatgttctgtcaatatatcaacattgaaaagataaaccatttgctttgtttcacaacgtgaacagtgcacctatgcatggtagagaatagaaagacacaacagggcacatgcctccttttccacaggatcctgagctacaaccggctgaggtgcatccccgtccacgccttcaacgggctgcggtccctgcgagtgctaaccctccatggcaatgacatttccagcgttcctgaaggctccttcaacgacctcacatctctttcccatctggcgctgggaaccaacccactccactgtgactgcagtcttcggtggctgtcggagtgggtgaaggcggggtacaaggagcctggcatcgcccgctgcagtagccctgagcccatggctgacaggctcctgctcaccaccccaacccaccgcttccagtgcaaagggccagtggacatcaacattgtggccaaatgcaatgcctgcctctccagcccgtgcaagaataacgggacatgcacccaggaccctgtggagctgtaccgctgtgcctgcccctacagctacaagggcaaggactgcactgtgcccatcaacacctgcatccagaacccctgtcagcatggaggcacctgccacctgagtgacagccacaaggatgggttcagctgctcctgccctctgggctttgaggggcagcggtgtgagatcaacccagatgactgtgaggacaacgactgcgaaaacaatgccacctgcgtggacgggatcaacaactacgtgtgtatctgtccgcctaactacacaggtgagctatgcgacgaggtgattgaccactgtgtgcctgagctgaacctctgtcagcatgaggccaagtgcatccccctggacaaaggattcagctgcgagtgtgtccctggctacagcgggaagctctgtgagacagacaatgatgactgtgtggcccacaagtgccgccacggggcccagtgcgtggacacaatcaatggctacacatgcacctgcccccagggcttcagtggacccttctgtgaacaccccccacccatggtcctactgcagaccagcccatgcgaccagtacgagtgccagaacggggcccagtgcatcgtggtgcagcaggagcccacctgccgctgcccaccaggcttcgccggccccagatgcgagaagctcatcactgtcaacttcgtgggcaaagactcctacgtggaactggcctccgccaaggtccgaccccaggccaacatctccctgcaggtggccactgacaaggacaacggcatccttctctacaaaggagacaatgaccccctggcactggagctgtaccagggccacgtgcggctggtctatgacagcctgagttcccctccaaccacagtgtacagtgtggagacagtgaatgatgggcagtttcacagtgtggagctggtgacgctaaaccagaccctgaacctagtagtggacaaaggaactccaaagagcctggggaagctccagaagcagccagcagtgggcatcaacagccccctctaccttggaggcatccccacctccaccggcctctccgccttgcgccagggcacggaccggcctctaggcggcttccacggatgcatccatgaggtgcgcatcaacaacgagctgcaggacttcaaggccctcccaccacagtccctgggggtgtcaccaggctgcaagtcctgcaccgtgtgcaagcacggcctgtgccgctccgtggagaaggacagcgtggtgtgcgagtgccgcccaggctggaccggcccactctgcgatcaggaggcccgggacccctgcctcggccacagatgccaccatggaaaatgtgtggcaactgggacctcatacatgtgcaagtgtgccgagggctatggaggggacttgtgtgacaacaagaatgactctgccaatgcctgctcagccttcaagtgtcaccatgggcagtgccacatctcagaccaaggggagccctactgcctgtgccagcccggctttagcggcgagcactgccaacaagagaatccgtgcctgggacaagtagtccgagaggtgatccgccgccagaaaggttatgcatcatgtgccacagcctccaaggtgcccatcatggaatgtcgtgggggctgtgggccccagtgctgccagcccacccgcagcaagcggcggaaatacgtcttccagtgcacggacggctcctcgtttgtagaagaggtggagagacacttagagtgcggctgcctcgcgtgttcctaagcccctgcccgcctgcctgccacctctcggactccagcttgatggagttgggacagccatgtgggaccccctggtgattcagcatgaaggaaatgaagctggagaggaaggtaaagaagaagagaatattaagtatattgtaaaataaacaaaaaatagaacttatttttattatggaaagtgactattttcatcttttattatataaatatattacaccatctgcgtatatgtaccatatagtgagttatttttaccaagttttgtgttgtgtatttgttgtgtttttaaaaatagctgtttaaaaatttaagaaaaaaatagactaataaaaatgctttaaaacaaaaggataagaataaagaatgatagcctgtctgaggaaggaggaagatgttttcatgtttatgaaacggtattatgtcggcagtagaccaagagctgctcattgagatcagaaaaaggaataagaggaagagagagaaggaaaagacctttgtttcttgttttttaactcccttttatttttcctcccctaaaattacccagcttttcggagtcctggatgtcagtgcccaaaatgcccagttcttccaggaaaagctgctgagccctggccttctcagtctcactgccactcaaaaatattgctgtccctgtctgtcccagaccccccttcagggtatctgaacccactgggggacccctcttctccttcctgggtggccctggcttccgtatctgaacccactgggggacccctcttctccttcctggctggccctggcttccaatcgaggactgactattgaagtctgctacaggtgtcatttggaactgtcttaccaaattttaaaacagctgctatttttcctgctcctccccaggagaggggtcttcctagaggaggcgagggaagagaatatcatggtgtctcctcaggacccatgcactggccctctctcctccttccaggtaatttttcattggaatgtatcccagtagagaaggtagtcagcccttcttggaagcggaaggctgggagccaagtcaagtctgcccacagcgctagatgtccaactctggaaggttcttggaggctcttgttgtaagacaggcctctgccacctgatcctccaggtcaccagcatgacgatagagactccttgcccatctgtgacactttccaatgcatatccaaactttaccttattttatctatgcaacccctgcctccctgggaaggataagggagtagagctgggttcactaagaaggaagtttaggccctcacaggctctggaacttgccttaagccacacaccagataagtggaggagccagaccagaagtccagacccaaagcttgagattcttcctctagaatgggtgagcacaggtgattcaggcggcttaaatccatcagagcagccctgccggaaaaggaaataatatgatgttttttcctgctcttgttctgccttgctcactccttctccctccgcagtatctggaaagattctggagaccagggcttatgcatctagggaaagtgaccaagggcagcctatccagcctctgcctccattcctgaaggggacttccctgcccctgtttctttccatgtctctccctccctcactcccatttgcccccttccaccccatcaggttagccacatatcttccagggctcagctgttcacaccaactccctggctcttatcatccatccctccttcccccaggagcttccactgtaggagtttcagggagaagagtttggaattcattggacctttcagccctcaggttccctagaggagcctagttgatctgtgagtaccaatggtgggccaaagacgcagggaataatgaagggagaaagaaaagaaaggaagatggaggaaaacgangcaactggaagaagaaggaagggatggaggggatgaagagaagggagagagggatatagctgaggaatttatctaaaaatgtgcatgtaaatctccattatgttccaggtactgtgccttatgatggctttgttttttgttgtcattagagacaaggtcttgctttgtcacccaggctggagtagagtggttcgatcatagctcaccncagcctcaacctcctaggctcaagccatcttcctgcctcagtctcccaaaatgctgggattacaggtgtgagccactatgctcagcctgtttcaaacattattataatagcagatttatttagtactttattatacatcagataccactctaattgtgaaatagatatatattcatttaattattgaaacaaccatgtagttaaaacactattaactcattttacagttgagtagactgagacacagagaagttaaagaacttgcccaagagtaaatgtctaataaaccgtagagccaggatctgggcccaggctgtctgactccagaacttgctcactcaaccactaaaccatcctgcttctcatgggaaagaaacacatcctgcctttgaggatcctacagcctgtgacaaaaacagtcataaaaatggacaattgccttattacacaaggagctcttaagtggcaatacaagcaatggaagtggctgtccagaggagggaacttctagtcctaggtctttaaggatgaataggagtttgccagagtgagaaagggaattgaactttcctgggagtggccttttaaaaagcaatgagatatggccaggcctggcttgtttggggaagagtcaaaatctagggtggcaagagtatgggaagcacactgaggagcagagagaaatggggtaggtaggaaggtagggttttgaccacaaagagctgtgcatgctaaactgggccacaggtgccagcagggttgtttgaggaagggaagagcaagacaagctctggtttaggaagagagctgtggcagcataaaggcctgaaagaggagacagagctgtcacccaaaatggacttgagagctccctgtggtttactctgtggctagaaaacactgccggccagatggatcacaaatgtctatggtagcttagaagctctgctcttgaagaggatcctgggatctgcccaacacccttcccaacctccatttccccatccccacctccattgccccatcccccctctccccctaggcaggtggatctgagccttatcccaccaccaatgcccctgctagcctctccccacccagcccagagcctactcagcctgccatctcaagagccccaccgagggtcactggcttcctgggaggagtcaccaggctgccagctttccctctgcctccccaaggaacctgagacctccctctgctcatcaccctgggcccaatcctgaatccagcccccatcaaccaagacagcaaaagggccaggtctgtcccttataattttgagccttctccctcaagtttggaagccctgactttaagaaatgccaaatgcaaggaccattaagaaaattctccccgaaatgaggctcctctaacaaatgatgattaaaacgctctctccttgagcagtcacattctagaaacaggacattccatgaggcaggaagagttcagttaatttgctcctgaaaaagtgtggttcagtgtttgtgtggcaatgtacgtgggcagaagaggccgctcaagctgtgtcccccctgagcaggattcaggaaagggaaaagaagttctcttcaactcagccaaggggccgtacgatggccgatgagattatgtatttaaaagttctttgtaaagtgtaaactaaaaaccttaaatgtaagatgctgttgttattattactgttgttgttgctgttatggacatgccaaaaggcccttgttagaagacagttttgccttttcaatctcatagcaaggaactcaagtctgatgcttcaaaaagatgagaagaagggcaagaagagggataactcccaagctcagagggaaaaaaaaggngggggaaaagagccccagggtgaccttcaggaaaggccaggaccaggatgatctaacctttcccttcaccagaaacaaagctattgccagactgaaccctaaagtcaagcagtcacccactgcctttgctgggagcagaagcccatagcaacaagtgacctgcccctcagactcaagatcccagataccagagctggaggagtcatagggcattactggtaggcaggaaaactgagggtcgaacaaatggaagaatgcggtgatcatagaccaaagacacacagataattaaccccatgtgtccacccaggccaaagttcttcctgctaccccacagtggatgtccaggcagatggtccccacatgatggggaagcagagggcatagtgtggttttgtgggacttgttcatgttttgtagtgtgggctcaacagtgccaaaggaaacactagggaaaagttggtgaaacatgccagctagcaggaccagtaaaggcataatcaggcatttggcaaagcttgcttttctaattcaatgataggttctaataggaaatttttgaagattttttaaaacaatgttatagtggcacttccccagtatggaataaataacatgcattcttttttcaatatactgtcatattcagatgtcattaaaataaatggatgagtcacagaggagctatcagatgctctcatgactaccataactcagaaaaaaaca

SEQ ID NO: 342063 - DNA, 5301 bp, Homo sapiens
  misc_feature (2505)..(2505): n is a, c, g, or t
  misc_feature (2713)..(2713): n is a, c, g, or t
  misc_feature (4575)..(4575): n is a, c, g, or t
acatgtagggtgatccaaattggtctggggtcaggatttggcccacagtctatcagtttgcgtcatctagttttagttttgactttaggtttcttgaaggaagggaccaagcctgcttttgtcatcattatatcctcacggcttaggtgtaagcctgtcagagagcctggtacaggaaaggcacctgtttgtaaaatagatgggtggatggaggggagggtaggcagatggatgagtgaataaattcttacagtcttcagagcacaagtatttcaaagcagcctacctgggaactgctcatggtcctgctggccacctagaccaccaatgccctgacttctatgccctctgcagagaatccgtgcctgggacaagtagtccgagaggtgatccgccgccagaaaggttatgcatcatgtgccacagcctccaaggtgcccatcatggaatgtcgtgggggctgtgggccccagtgctgccagcccacccgcagcaagcggcggaaatacgtcttccagtgcacggacggctcctcgtttgtagaagaggtggagagacacttagagtgcggctgcctcgcgtgttcctaagcccctgcccgcctgcctgccacctctcggactccagcttgatggagttgggacagccatgtgggaccccctggtgattcagcatgaaggaaatgaagctggagaggaaggtaaagaagaagagaatattaagtatattgtaaaataaacaaaaaatagaacttatttttattatggaaagtgactattttcatcttttattatataaatatattacaccatctgcgtatatgtaccatatagtgagttatttttaccaagttttgtgttgtgtatttgttgtgtttttaaaaatagctgtttaaaaatttaagaaaaaaatagactaataaaaatgctttaaaacaaaaggataagaataaagaatgatagcctgtctgaggaaggaggaagatgttttcatgtttatgaaacggtattatgtcggcagtagaccaagagctgctcattgagatcagaaaaaggaataagaggaagagagagaaggaaaagacctttgtttcttgttttttaactcccttttatttttcctcccctaaaattacccagcttttcggagtcctggatgtcagtgcccaaaatgcccagttcttccaggaaaagctgctgagccctggccttctcagtctcactgccactcaaaaatattgctgtccctgtctgtcccagaccccccttcagggtatctgaacccactgggggacccctcttctccttcctgggtggccctggcttccgtatctgaacccactgggggacccctcttctccttcctggctggccctggcttccaatcgaggactgactattgaagtctgctacaggtgtcatttggaactgtcttaccaaattttaaaacagctgctatttttcctgctcctccccaggagaggggtcttcctagaggaggcgagggaagagaatatcatggtgtctcctcaggacccatgcactggccctctctcctccttccaggtaatttttcattggaatgtatcccagtagagaaggtagtcagcccttcttggaagcggaaggctgggagccaagtcaagtctgcccacagcgctagatgtccaactctggaaggttcttggaggctcttgttgtaagacaggcctctgccacctgatcctccaggtcaccagcatgacgatagagactccttgcccatctgtgacactttccaatgcatatccaaactttaccttattttatctatgcaacccctgcctccctgggaaggataagggagtagagctgggttcactaagaaggaagtttaggccctcacaggctctggaacttgccttaagccacacaccagataagtggaggagccagaccagaagtccagacccaaagcttgagattcttcctctagaatgggtgagcacaggtgattcaggcggcttaaatccatcagagcagccctgccggaaaaggaaataatatgatgttttttcctgctcttgttctgccttgctcactccttctccctccgcagtatctggaaagattctggagaccagggcttatgcatctagggaaagtgaccaagggcagcctatccagcctctgcctccattcctgaaggggacttccctgcccctgtttctttccatgtctctccctccctcactcccatttgcccccttccaccccatcaggttagccacatatcttccagggctcagctgttcacaccaactccctggctcttatcatccatccctccttcccccaggagcttccactgtaggagtttcagggagaagagtttggaattcattggacctttcagccctcaggttccctagaggagcctagttgatctgtgagtaccaatggtgggccaaagacgcagggaataatgaagggagaaagaaaagaaaggaagatggaggaaaacgangcaactggaagaagaaggaagggatggaggggatgaagagaagggagagagggatatagctgaggaatttatctaaaaatgtgcatgtaaatctccattatgttccaggtactgtgccttatgatggctttgttttttgttgtcattagagacaaggtcttgctttgtcacccaggctggagtagagtggttcgatcatagctcaccncagcctcaacctcctaggctcaagccatcttcctgcctcagtctcccaaaatgctgggattacaggtgtgagccactatgctcagcctgtttcaaacattattataatagcagatttatttagtactttattatacatcagataccactctaattgtgaaatagatatatattcatttaattattgaaacaaccatgtagttaaaacactattaactcattttacagttgagtagactgagacacagagaagttaaagaacttgcccaagagtaaatgtctaataaaccgtagagccaggatctgggcccaggctgtctgactccagaacttgctcactcaaccactaaaccatcctgcttctcatgggaaagaaacacatcctgcctttgaggatcctacagcctgtgacaaaaacagtcataaaaatggacaattgccttattacacaaggagctcttaagtggcaatacaagcaatggaagtggctgtccagaggagggaacttctagtcctaggtctttaaggatgaataggagtttgccagagtgagaaagggaattgaactttcctgggagtggccttttaaaaagcaatgagatatggccaggcctggcttgtttggggaagagtcaaaatctagggtggcaagagtatgggaagcacactgaggagcagagagaaatggggtaggtaggaaggtagggttttgaccacaaagagctgtgcatgctaaactgggccacaggtgccagcagggttgtttgaggaagggaagagcaagacaagctctggtttaggaagagagctgtggcagcataaaggcctgaaagaggagacagagctgtcacccaaaatggacttgagagctccctgtggtttactctgtggctagaaaacactgccggccagatggatcacaaatgtctatggtagcttagaagctctgctcttgaagaggatcctgggatctgcccaacacccttcccaacctccatttccccatccccacctccattgccccatcccccctctccccctaggcaggtggatctgagccttatcccaccaccaatgcccctgctagcctctccccacccagcccagagcctactcagcctgccatctcaagagccccaccgagggtcactggcttcctgggaggagtcaccaggctgccagctttccctctgcctccccaaggaacctgagacctccctctgctcatcaccctgggcccaatcctgaatccagcccccatcaaccaagacagcaaaagggccaggtctgtcccttataattttgagccttctccctcaagtttggaagccctgactttaagaaatgccaaatgcaaggaccattaagaaaattctccccgaaatgaggctcctctaacaaatgatgattaaaacgctctctccttgagcagtcacattctagaaacaggacattccatgaggcaggaagagttcagttaatttgctcctgaaaaagtgtggttcagtgtttgtgtggcaatgtacgtgggcagaagaggccgctcaagctgtgtcccccctgagcaggattcaggaaagggaaaagaagttctcttcaactcagccaaggggccgtacgatggccgatgagattatgtatttaaaagttctttgtaaagtgtaaactaaaaaccttaaatgtaagatgctgttgttattattactgttgttgttgctgttatggacatgccaaaaggcccttgttagaagacagttttgccttttcaatctcatagcaaggaactcaagtctgatgcttcaaaaagatgagaagaagggcaagaagagggataactcccaagctcagagggaaaaaaaaggngggggaaaagagccccagggtgaccttcaggaaaggccaggaccaggatgatctaacctttcccttcaccagaaacaaagctattgccagactgaaccctaaagtcaagcagtcacccactgcctttgctgggagcagaagcccatagcaacaagtgacctgcccctcagactcaagatcccagataccagagctggaggagtcatagggcattactggtaggcaggaaaactgagggtcgaacaaatggaagaatgcggtgatcatagaccaaagacacacagataattaaccccatgtgtccacccaggccaaagttcttcctgctaccccacagtggatgtccaggcagatggtccccacatgatggggaagcagagggcatagtgtggttttgtgggacttgttcatgttttgtagtgtgggctcaacagtgccaaaggaaacactagggaaaagttggtgaaacatgccagctagcaggaccagtaaaggcataatcaggcatttggcaaagcttgcttttctaattcaatgataggttctaataggaaatttttgaagattttttaaaacaatgttatagtggcacttccccagtatggaataaataacatgcattcttttttcaatatactgtcatattcagatgtcattaaaataaatggatgagtcacagaggagctatcagatgctctcatgactaccataactcagaaaaaaaca

SEQ ID NO: 342064 - DNA, 3086 bp, Homo sapiens
gcgtctgtgtagttctctcagacagtcagagaggagagacggagcagcgtggcagacaggctggctctgcacgagctcctggcggggaccagcagcgcctgcaagggggtggagggacaggcgctcgggtggcctgggccgccggcccctcacgctgcccccgctcagccttcatgctctcccctgcttttccacaggcaactggacaacaaccacatcagctgcattgaagatggagccttccgagcgctgcgcgatttggagatccttaccctcaacaacaacaacatcagtcgcatcctggtcaccagcttcaaccacatgccgaagatccgaactctgcgcctccactccaaccacctgtactgcgactgccacctggcctggctctcggattggctgcgacagcgacggacagttggccagttcacactctgcatggctcctgtgcatttgaggggcttcaacgtggcggatgtgcagaagaaggagtacgtgtgcccagccccccactcggagcccccatcctgcaatgccaactccatctcctgcccttcgccctgcacgtgcagcaataacatcgtggactgtcgaggaaagggcttgatggagattcctgccaacttgccggagggcatcgtcgaaatacgcctagaacagaactccatcaaagccatccctgcaggagccttcacccagtacaagaaactgaagcgaatagacatcagcaagaatcagatatcggatattgctccagatgccttccagggcctgaaatcactcacatcgctggtcctgtatgggaacaagatcaccgagattgccaagggactgtttgatgggctggtgtccctacagctgctcctcctcaatgccaacaagatcaactgcctgcgggtgaacacgtttcaggacctgcagaacctcaacttgctctccctgtatgacaacaagctgcagaccatcagcaaggggctcttcgcccctctgcagtccatccagacactccacttagcccaaaacccatttgtgtgcgactgccacttgaagtggctggccgactacctccaggacaaccccatcgagacaagcggggcccgctgcagcagcccgcgccgactcgccaacaagcgcatcagccagatcaagagcaagaagttccgctgctcaggctccgaggattaccgcagcaggttcagcagcgagtgcttcatggacctcgtgtgccccgagaagtgtcgctgtgagggcacgattgtggactgctccaaccagaagctggtccgcatcccaagccacctccctgaatatgtcaccgacctgcgactgaatgacaatgaggtatctgttctggaggccactggcatcttcaagaagttgcccaacctgcggaaaataaatctgagtaacaataagatcaaggaggtgcgagagggagctttcgatggagcagccagcgtgcaggagctgatgctgacagggaaccagctggagaccgtgcacgggcgcgtgttccgtggcctcagtggcctcaaaaccttgatgctgaggagtaacttgatcggctgtgtgagtaatgacacctttgccggcctgagttcggtgagactgctgtccctctatgacaatcggatcaccaccatcacccctggggccttcaccacgcttgtctccctgtccaccataaacctcctgtccaaccccttcaactgcaactgccacctggcctggctcggcaagtggttgaggaagaggcggatcgtcagtgggaaccctaggtgccagaagccatttttcctcaaggagattcccatccaggatgtggccatccaggacttcacctgtgatggcaacgaggagagtagctgccagctgagcccgcgctgcccggagcagtgcacctgtatggagacagtggtgcgatgcagcaacaaggggctccgcgccctccccagaggcatgcccaaggatgtgaccgagctgtacctggaaggaaaccacctaacagccgtgcccagagagctgtccgccctccgacacctgacgcttattgacctgagcaacaacagcatcagcatgctgaccaattacaccttcagtaacatgtctcacctctccactctgatcctgagctacaaccggctgaggtgcatccccgtccacgccttcaacgggctgcggtccctgcgagtgctaaccctccatggcaatgacatttccagcgttcctgaaggctccttcaacgacctcacatctctttcccatctggcgctgggaaccaacccactccactgtgactgcagtcttcggtggctgtcggagtgggtgaaggcggggtacaaggagcctggcatcgcccgctgcagtagccctgagcccatggctgacaggctcctgctcaccaccccaacccaccgcttccagtgcaaagggccagtggacatcaacattgtggccaaatgcaatgcctgcctctccagcccgtgcaagaataacgggacatgcacccaggaccctgtggagctgtaccgctgtgcctgcccctacagctacaagggcaaggactgcactgtgcccatcaacacctgcatccagaacccctgtcagcatggaggcacctgccacctgagtgacagccacaaggatgggttcagctgctcctgccctctgggctttgaggggcagcggtgtgagatcaacccagatgactgtgaggacaacgactgcgaaaacaatgccacctgcgtggacgggatcaacaactacgtgtgtatctgtccgcctaactacacaggtgagctatgcgacgaggtgattgaccactgtgtgcctgagctgaacctctgtcagcatgaggccaagtgcatccccctggacaaaggattcagctgcgagtgtgtccctggctacagcgggaagctctgtgagacagacaatgatgactgtgtggcccacaagtgccgccacggggcccagtgcgtggacacaatcaatggctacacatgcacctgcccccagggcttcagtaggaccatgggtggggggtgttcacagaagggtccactgacagccctgggggcagcgtg

SEQ ID NO: 342065 - DNA, 1005 bp, Homo sapiens
agggcttgaaacaatattaggattactacccagggcacttactggtgcatgttgtaacatatctatgataaaagccatagtttacctaaaatggtgatttccagcctttactgctttgaagaaacagaatttgtaaaggtatgcatgtagaacataaaaaatatttcttaattattttttatattgatggtaatatattacgttcaacaatgcttaaagctctacaagcaggtcttttcccacctcttgatatctgtgatactgaaacttgaggatgttgaaatgtattacattttggcttctttctacatgttaactgcactgtagatgtaaaaattcaggttatatataggattgccatcttcagaggtgatgctgaactgtgaggtttcctagtaattgccaaatgagccgtaagtctgcagaattcccttctactttgaagagaaggggataggaatgtatatttggctgggggcatggagatgttcgtatgtatgaggagttagggatggggagtcaagttctagaaagttttgtctgaaaacctttgaatagaatggcatgaagattttaatcaattacttataaacaaagtcttagagacttccttttaggaatcaacttccatgagaagttaaaaataaattattaattttaggtacagacattaaacatggaatttaaggactgttgggggaaattgatcacttcttagcatttccattcagtgaatggagctgatgtttgcctgtcattttaagatgataccataccttctttggttattataggtccagtttgaagcattctgacttctggtttttccaccctgaaaggaaatgtttttctttgcagcagtattagataatgaaaaatgctaattcagtagttattaacttctaaattttattcgccatgactttctagtgaattattaccataaataacaatttcagaaacttagtttttagaataaatattaatttttccacttcagtttta

SEQ ID NO: 342066 - DNA, 348 bp, Homo sapiens
tgtccttgccatattttctcaactctaggatatctaacattggagattaaagattcaataaaaaatgaaaactcagtgcaaaaatccactattatgttgatgtaaaatacttataaaatggtaaaagaaaactaaagcaccactgacaacaaaggagaaaaacagtttgtgttaagcggtgggtgactcattaagtcagtccttggctccttcagctaaatttccaaatataaatgaaacttggttcaggaaaagaaagtcaaaggtttccatccttggggataggtgtaaggcggggggcgcaactcttagaatgacctctaaaaaaaccttccaaattttctaaga

SEQ ID NO: 342067 - DNA, 480 bp, Homo sapiens
agataagaaaacagaagaccagagcccaaggtcacaaagttagtaagtgacaaacctagacttccaatctagcaaattggttaaactctatgcctctcaaaaggccttacaggacaggatgggagagctgtttgtgagtacacaccacagagtacttctccaaacagtcctgctaacaaggccatgccagcccctcgtgaacttcagagctggacttcacagccagcgtgtattactgtttacaagagttggtctcaagtatgtgaggattaaagcaaactgaccccctttctagaaataaaattcaaagcacacattccatcacgagttggtcaacatcatcttcatataaaagtacaacttattactcaacccacattcctaccttctaccctcccaagaatggaaaaaaagtcccatctctctgctatagaaaaataatggggccaggcgcggtggctcacgcctgtaatcccagca

SEQ ID NO: 342068 - DNA, 3205 bp, Homo sapiens
agcatcgagtcggccttgttgacctactggataacgggaggagagcgccaggcggagctggggcgtccctcccgctcgcttcttgactcgcgttgctgccggcctcctcccgcgcctagtgtccgggacgcgcctgaacctgccgcctccgtgcctggggcggcgccgcgcggccccgagcgctccagaaagctgcggcgcgagtccgcggggccgacctcggagacgcagctggggccgggcgcggcttggcgggagggtctgcagcgccgagggaggctgccagtgcgtgaggaagagagctagagactggacaggggagacagagcagcgtcggagccgcgcaggggacgggagtgagagcgggagtgagagcaggaacgacgcagagcggccgtcctcaaggtgctgctgcttctccccactcagacttggagccccgtaggagcaggaaatccacctgactgtgatgctccactggcctctgccttgcctaggtcatccttcagcagctcctcagagctgtccagcagccacggcccggggttttcaaggcttaatcgaagagatggagctggtggctggaccccacttgtgtcaaataaataccaatggctgcaaattgaccttggagagagaatggaggtcactgctgtcgccacccaaggaggatatgggagctctgactgggtgaccagctacctcctgatgttcagtgatggtgggagaaactggaagcagtatcgccgagaagaaagcatctggggttttccaggaaacacaaacgcagacagtgtggtgcactacagactccagcctccctttgaagccaggttcctgcgctttctccctttagcctggaaccccaggggcaggattgggatgcggattgaagtgtacggatgtgcatataaatctgaggtggtttattttgatggacaaagtgctctgctgtatacacttgataaaaaacctttaaaaccactaagagatgttatttctttgaaatttaaagccatgcagagcaatggaattctacttcacagagaaggacaacatggaaatcacattactctggaattaattaaaggaaagcttgtcttttttcttaactcaggcaatgctaagctgccttccactattgctcctgtgaccctcaccctgggcagcctgctggatgaccagcactggcattccgtcctcatcgagctcctcgacacgcaggtcaacttcaccgtggacaaacacactcatcatttccaagcaaagggagattccagtaacttggatcttaattttgagatcagctttgggggaattccgacacccggaagatcgcgggcattcacacgtaaaagctttcatgggtgtttagaaaatctttattataatggagtggatgttaccgaattagccaagaaacacaaaccacagatcctcatgatggagttggctcatgggttgcaggaccaaaacctgaaaatatctctgactgtgtgtcaccagaccacacaatgaatacatcacttaggttagcatgagaaaaggggaaaaacagctgtgaagcccatgaactttccaagaaggtaaaggagaaaaaaaaaaaaagttgggtttgaagtctaagttttactatgaacagcaccctgctgagatcataaaaatgaaaaataccatcaagatacatgaaaaaggaaacaccaaagggaagagtgataacaaggctccacagagcgcagtttcctttgacaagatgaaaaagaaatgaaaagaggaaggagataaatggaacagccctctacctaaagtttctgcccatggagaaactgacatttaagtgctgctcaacaggaaaaagaaaaaagacctggttattgaagttggctttgttggagatgcgttactcagatacagatacaaagatgggtttggccaatgggcatccgtgtcaagaagcctgacctaacacgttctgaatattaagctaccttttatctgccagtccttggtgttcagaagaatccctcctcctcaccctaacttctatggggctatttccaaagacactgtcattgaagtgaggaagagtgagttgggccttatgacacaaagagacaagactatttgaggacaatagacacaggttttcatatacattccatgttattctgaattactgaggggttcactgatggaattattgagtatagccaataaggagaaccacagttaagctggtgtctctgggttctggacatcatcctcaagaaaactatttactaattacattgaatgaggttattaaaatgtgtaagtttcacacaaaaacaaaaagacaattcattccaaattgtgcatatggatatataatgttaattatgggaattccattttaagaattactacaattctatgtgttctgtataaaaacaggaaaatagttgttccaatatataaaaggaaaacatttaaaaatgtattttcttgggaaaatcagttgccagaattcattagtcaactaacaagcactcctctgtggcaagaagccctgcttctctgttgtagcaggcagctacccacctaaatgatgaggtcaagaaatatacagctgataaaaagataaaaaatatgtaatagtccagtgattacatgtgtactacggatcagcgccaattagttgtaagcttttggtatttagctcgttacagcaaatgttttcttttttaaattttcttctgcaaatgttttcttgtcatgaaaactgttttccatttagcagaattacaaaaatagtcaagaagaaatgttctgattgatgtatacagttagaatgtgtattaaagattattataaaatgataactgaattatatccatttctaaagtatgttgggacaaaattttttaaacatgtgattctgttttgaaaattgttttaccactggatcagtgtggttcttaaacttggctttatcttggagtcaccagaggagattcaaaagatacctttacctggctccacctccagagatcgggattttaaatggtctgtatctggattttaagagcccttctggtgattcgactgtttagctaggtttgagagccactaccctagatgagctgtcctgctccagtaacattctttttctaaaatcatttatagtatattagaaataaatccatggaaattccaagtaaaatca

SEQ ID NO: 342069 - DNA, 2852 bp, Homo sapiens
agggcgcctggctgaagagagcatggcttcagtggcctgggccgtcctcaaggtgctgctgcttctccccactcagacttggagccccgtaggagcaggaaatccacctgactgtgatgctccactggcctctgccttgcctaggtcatccttcagcagctcctcagagctgtccagcagccacggcccggggttttcaaggcttaatcgaagagatggagctggtggctggaccccacttgtgtcaaataaataccaatggctgcaaattgaccttggagagagaatggaggtcactgctgtcgccacccaaggaggatatgggagctctgactgggtgaccagctacctcctgatgttcagtgatggtgggagaaactggaagcagtatcgccgagaagaaagcatctggggttttccaggaaacacaaacgcagacagtgtggtgcactacagactccagcctccctttgaagccaggttcctgcgctttctccctttagcctggaaccccaggggcaggattgggatgcggattgaagtgtacggatgtgcatataaatctgaggtggtttattttgatggacaaagtgctctgctgtatacacttgataaaaaacctttaaaaccactaagagatgttatttctttgaaatttaaagccatgcagagcaatggaattctacttcacagagaaggacaacatggaaatcacattactctggaattaattaaaggaaagcttgtcttttttcttaactcaggcaatgctaagctgccttccactattgctcctgtgaccctcaccctgggcagcctgctggatgaccagcactggcattccgtcctcatcgagctcctcgacacgcaggtcaacttcaccgtggacaaacacactcatcatttccaagcaaagggagattccagtaacttggatcttaattttgagatcagctttgggggaattccgacacccggaagatcgcgggcattcacacgtaaaagctttcatgggtgtttagaaaatctttattataatggagtggatgttaccgaattagccaagaaacacaaaccacagatcctcatgatggagttggctcatgggttgcaggaccaaaacctgaaaatatctctgactgtgtgtcaccagaccacacaatgaatacatcacttaggttagcatgagaaaaggggaaaaacagctgtgaagcccatgaactttccaagaaggtaaaggagaaaaaaaaaaaaagttgggtttgaagtctaagttttactatgaacagcaccctgctgagatcataaaaatgaaaaataccatcaagatacatgaaaaaggaaacaccaaagggaagagtgataacaaggctccacagagcgcagtttcctttgacaagatgaaaaagaaatgaaaagaggaaggagataaatggaacagccctctacctaaagtttctgcccatggagaaactgacatttaagtgctgctcaacaggaaaaagaaaaaagacctggttattgaagttggctttgttggagatgcgttactcagatacagatacaaagatgggtttggccaatgggcatccgtgtcaagaagcctgacctaacacgttctgaatattaagctaccttttatctgccagtccttggtgttcagaagaatccctcctcctcaccctaacttctatggggctatttccaaagacactgtcattgaagtgaggaagagtgagttgggccttatgacacaaagagacaagactatttgaggacaatagacacaggttttcatatacattccatgttattctgaattactgaggggttcactgatggaattattgagtatagccaataaggagaaccacagttaagctggtgtctctgggttctggacatcatcctcaagaaaactatttactaattacattgaatgaggttattaaaatgtgtaagtttcacacaaaaacaaaaagacaattcattccaaattgtgcatatggatatataatgttaattatgggaattccattttaagaattactacaattctatgtgttctgtataaaaacaggaaaatagttgttccaatatataaaaggaaaacatttaaaaatgtattttcttgggaaaatcagttgccagaattcattagtcaactaacaagcactcctctgtggcaagaagccctgcttctctgttgtagcaggcagctacccacctaaatgatgaggtcaagaaatatacagctgataaaaagataaaaaatatgtaatagtccagtgattacatgtgtactacggatcagcgccaattagttgtaagcttttggtatttagctcgttacagcaaatgttttcttttttaaattttcttctgcaaatgttttcttgtcatgaaaactgttttccatttagcagaattacaaaaatagtcaagaagaaatgttctgattgatgtatacagttagaatgtgtattaaagattattataaaatgataactgaattatatccatttctaaagtatgttgggacaaaattttttaaacatgtgattctgttttgaaaattgttttaccactggatcagtgtggttcttaaacttggctttatcttggagtcaccagaggagattcaaaagatacctttacctggctccacctccagagatcgggattttaaatggtctgtatctggattttaagagcccttctggtgattcgactgtttagctaggtttgagagccactaccctagatgagctgtcctgctccagtaacattctttttctaaaatcatttatagtatattagaaataaatccatggaaattccaagtaaaatca

SEQ ID NO: 342070 - DNA, 536 bp, Homo sapiens
agagatgttatttctttgaaatttaaagccatgcagagcaatggaattctacttcacagagaaggacaacatggaaatcacattactctggaattaattaaaggaaagcttgtcttttttcttaactcaggtaaaaaaatacttgaactttataccagtagttaaaaaaaatctgtttacatttgttggtactcagtcttttcacagttagataaaatgaccatataattcatcatctaaaccagaacacctttaagaaataaaaaatacacaagtgatagttactctgggacagtaagtgcaaagtagaactgcaatgaacaaatgtaaatgaaagtttaagagcattactaccagatgcatgcaatacatatcctaagtatgatttctgtaaacagcatatattttgacaaactgtgcaagatcaccatatgtgtgtataatatatatgtaatatatgattatccatatcataaagacaatacatcattataaaattatgagataatgctgataatgaggttctaagaaagaaa

SEQ ID NO: 342071 - DNA, 198 bp, Homo sapiens
catttcctgcacagatgatggctattagaatgttcctacttttaagacttaattccactactccaacaattgaaaaatgtgaatactcaacaaccacagagaagtacgttgtcattaagctaaacaatacactccaaaataaagtctagagaggctgggtgcagtggctcatgcctgtaatccaagcactttgggagg

SEQ ID NO: 342072 - DNA, 817 bp, Homo sapiens
ggaatttgttttcccataaaaaataatgttggctaaatttttgagccaacacacagaacctatttcttcacaactgacttaatcaccatttatagcttgttttttgggataaaatgcattgcaccttctaactcttgtaattgtagctgctgctgcttttcttctacttttttaaagagacagggtctcatgccagtcagaatggtgattattaaaaagtcaagaaacaacagatgtggtgaggttacagagaaatatgaacacttttacactgttggtgggaatgaaaattagttcaaccattgtggaagacagtgtggtgattcctccaagatttagaactggaaatacaatttgacccagcaatctcattactgggtatatacccaaaggaatataaatcattctgttataaaaatacgtgcatgtatatgttcattgtagcactattcacaatagcaaagacatagaatcaacccaaatgccaatcaatgataggctggataaagaaaatgtacatatacaccatggaatactgtgcagccgtagaaggaacaagatcatgtcctttgcagggacatggatggagctggaagccattatcctcagcaaactaatgcaggaacagtatcacttgagagatatttgggttgtttccacctcttggcaatggccaattggtttttgacaaaggtgcaaagcaattagtgaagaaagggtattcttttcaacaaatgatgttgaatcaattggatattcatgtgggaaaaaaaaggtgcatcaacctaaacctcacatcttataaaaacatgaatgc

SEQ ID NO: 342073 - DNA, 871 bp, Homo sapiens
ggaatttgttttcccataaaaaataatgttggctaaatttttgagccaacacacagaacctatttcttcacaactgacttaatcaccatttatagcttgttttttgggataaaatgcattgcaccttctaactcttgtaattgtagctgctgctgcttttcttctacttttttaaagagacagggtctcatgccagtcagaatggtgattattaaaaagtcaagaaacaacagatgtggtgaggttacagagaaatatgaacacttttacactgttggtgggaatgaaaattagttcaaccattgtggaagacagtgtggtgattcctccaagatttagaactggaaatacaatttgacccagcaatctcattactgggtatatacccaaaggaatataaatcattctgttataaaaatacgtgcatgtatatgttcattgtagcactattcacaatagcaaagacatagaatcaacccaaatgccaatcaatgataggctggataaagaaaatgtacatatacaccatggaatactgtgcagccgtagaaggaacaagatcatgtcctttgcagggacatggatggagctggaagccattatcctcagcaaactaatgcaggaacagaaaaccaaataccacatgttctcacttacgtataccacattttctttatctctttatcacttgagagatatttgggttgtttccacctcttggcaatggccaattggtttttgacaaaggtgcaaagcaattagtgaagaaagggtattcttttcaacaaatgatgttgaatcaattggatattcatgtgggaaaaaaaaggtgcatcaacctaaacctcacatcttataaaaacatgaatgc

SEQ ID NO: 342074 - DNA, 1825 bp, Homo sapiens
gtcgttcctgagagcacatgcacccccaaatgtgaagtgcactcggacacacacacacacacacacgcacgcacacacaagcactcatgttctaaagagagaggtctgagtccgaagttgctgctgctgggagcttgagctgagatggactggtcttcatgggcgcccaaggcgctgggtgcagctttccccgagacccccagatggaaaggagggaaggaggaaccccacacactcgccttttgcgagaagatcggcgcgcaccccagagtgccccaagcctttggaatctgcctgctgagcggagcgcgcgagcgtggtggacaggtcccgaacttggccagcgggctttcttggcaacttgctttgcgcagttctccatggaaccctggacccactgtgctcccggcgccttgcctttttttttctttttctttctctcactgtctctttttaaatttatgaactcgaaatgaagcggaaagcagatatgcgcgtcagcatactttggcggaccttttaaaaatggaactgtcggctgcggctggaaggcgcaggcaggcgccctggagagaattcacagggaggcacaggacagaacgctcccaggaacgaggaagcacccccagaaaggagcgctctatgggctccaggcagccgaggaaacgcgaacgtgagccccgtgactgcactcccacgtgcaccaacgctgccagtgtgagcagaagcggagcccgcagagcgccaggctgcgccgggagatgcatcacgatgaaaaactgcgccagagcatggcgggaactttccgagagggcgtgttgtttccaggcggttccaccttctaatatgaaacagtcttggttgattttccttgatactactttatgctcggcctggttgttggcaagtagctgcccgcgtctgtacgcgcccttgattagtttccactgcatgtgttttaacacagtcctcctttttccacgtttatttgggccaaccctgtctgcaaagatccagtttaatacagatttgagtctacgtgctatagcctggaaatgtactaaagacactacaacatattgctgaaagaatagaatctttattctgaatgcaaagcggacacctagtaaaaaattctggaataataaaacaagcaaggcttatgtgctcagttttggggacgctccaatttaaaggcttagtcattgtcacggtgtaaggtttacccattgcccccatcacacagatgtgggattgttgagagctgagtgtcctatgacctcttctgctgcccaagaacttggggtgggtggtaactggagaaatcaaagtgatcagctgcaaagaacgcttccattgctggagcttggttgtgcgggattctccacggaggtcttaaggcagagacaaaaacaaggactttgggaggctcctgtgagcagccaaaagggtttagagtcaggcagcctcaggttacaaatccagtcctgcaggctaggagttgtgtaagcttaaaaaagtgactgcacttccaggaacatcatttccctacctgctcctccttctgacgggttttctgaggacaatggaatccacactctgtgtcgaacacttttctaattagcgatgtgcagacactgtttattttacaggaataaaaatgccagaagaacccaagtcatattcatttaaagcagggtgacaagtacaccaaaatctgaaaaatcatcactaaagaacttatccatgtaaccaaaaaccattgaaataaaagtaaactatggaaacaaaatttaaaagtaataaaatttaaaagtccaaaaaa

SEQ ID NO: 342075 - DNA, 453 bp, Homo sapiens
actagtccagtgtggtcacggtggcatcgataaacaccgggtttatcgatgccacatcagtgcagttccttttccctggactgatgtggcaccttcaattcctctcaaatcgattaaatcaagtttgacttttgtgttccattttttttttcaacatttccatgaattaccaagacacagctttctacagagaagcacctttctccagatcttcattgccattttggacacacagctccaaacccaaaatgtgtccactggatcaacccacaatgcaaacaactgctttctaaggaaaagccgagtttctaggaggcagcccacttctgacgtgtccttcagttaacaggctgcagtggacagcgtgtggtgggtggaggaagacggcagatgagaaattcaaggagattcaccacagagcagctttctggctcagctgttctagggtgccat

SEQ ID NO: 342076 - DNA, 1249 bp, Homo sapiens
gtcgttcctgagagcacatgcacccccaaatgtgaagtgcactcggacacacacacacacacacacgcacgcacacacaagcactcatgttctaaagagagaggtctgagtccgaagttgctgctgctgggagcttgagctgagatggactggtcttcatgggcgcccaaggcgctgggtgcagctttccccgagacccccagatggaaaggagggaaggaggaactttccgagagggcgtgttgtttccaggcggttccaccttctaatatgaaacagtcttggttgattttccttgatactactttatgctcggcctggttgttggcaagtagctgcccgcgtctgtacgcgcccttgattagtttccactgcatgtgttttaacacagtcctcctttttccacgtttatttgggccaaccctgtctgcaaagatccagtttaatacagatttgagtctacgtgctatagcctggaaatgtactaaagacactacaacatattgctgaaagaatagaatctttattctgaatgcaaagcggacacctagtaaaaaattctggaataataaaacaagcaaggcttatgtgctcagttttggggacgctccaatttaaaggcttagtcattgtcacggtgtaaggtttacccattgcccccatcacacagatgtgggattgttgagagctgagtgtcctatgacctcttctgctgcccaagaacttggggtgggtggtaactggagaaatcaaagtgatcagctgcaaagaacgcttccattgctggagcttggttgtgcgggattctccacggaggtcttaaggcagagacaaaaacaaggactttgggaggctcctgtgagcagccaaaagggtttagagtcaggcagcctcaggttacaaatccagtcctgcaggctaggagttgtgtaagcttaaaaaagtgactgcacttccaggaacatcatttccctacctgctcctccttctgacgggttttctgaggacaatggaatccacactctgtgtcgaacacttttctaattagcgatgtgcagacactgtttattttacaggaataaaaatgccagaagaacccaagtcatattcatttaaagcagggtgacaagtacaccaaaatctgaaaaatcatcactaaagaacttatccatgtaaccaaaaaccattgaaataaaagtaaactatggaaacaaaatttaaaagtaataaaatttaaaagtccaaaaaa

SEQ ID NO: 342077 - DNA, 918 bp, Homo sapiens
gtcgttcctgagagcacatgcacccccaaatgtgaagtgcactcggacacacacacacacacacacgcacgcacacacaagcactcatgttctaaagagagaggtctgagtccgaagttgctgctgctgggagcttgagctgagatggactggtcttcatgggcgcccaaggcgctgggtgcagctttccccgagacccccagatggaaaggagggaaggaggaaccccacacactcgccttttgcgagaagatcggcgcgcaccccagagtgccccaagcctttggaatctgcctgctgagcggagcgcgcgagcgtggtggacaggtcccgaacttggccagcgggctttcttggcaacttgctttgcgcagttctccatggaaccctggacccactgtgctcccggcgccttgcctttttttttctttttctttctctcactgtctctttttaaatttatgaactcgaaatgaagcggaaagcagatatgcgcgtcagcatactttggcggaccagtcccagtgctgaccagtcccatcgtatctctgacggtgcatatcaggatccgcattgatcagatgccgaaaccatggcttggaatggctgcgatgaagctgagctgcgattcaaacccagacacagctttctacagagaagcacctttctccagatcttcattgccattttggacacacagctccaaacccaaaatgtgtccactggatcaacccacaatgcaaacaactgctttctaaggaaaagccgagtttctaggaggcagcccacttctgacgtgtccttcagttaacaggctgcagtggacagcgtgtggtgggtggaggaagacggcagatgagaaattcaaggagattcaccacagagcagctttctggctcagctgttctagggtgccat

SEQ ID NO: 342078 - DNA, 365 bp, Homo sapiens
ggagaaggtgcaatcagtgttatcttttaacattgcaccaaccacacccctcccccatttcttctgttcagagtcagattcctcgcttcatggaggcccaggtctacgacattaggctgcttctaccccatggtggcttattaacctattttccaactgaggaattctcaggcagcctaatgagagtaagactttttttttttatctcttctaaaaaaaatatgttgataccagactttttcacagtttttcctgttatgtattactaattgtcttcagtcaagaaatgattatttttaactcctgtgacaccaaaatgagttacatctctacaaaaatcagtgtttaacttttattcttggtac

SEQ ID NO: 342079 - DNA, 585 bp, Homo sapiens
cgcagggaatcccctctcccgccgccgccgccgtgtctggtctgtacgtctttagagggtcgaggaagtcacgtcgggacagactggggcgagtaaggttaagaaaggctgacatgttttatgttttagtgacgacgcttaataggctgtatatctgctctatatgcagcacatacatacatagctttttaaaaaactcttattttgtggaatgaaatagctaccttcagtgtacatagctgtaatttatctttgtagctaagttgctttcaacagaagaaatactgttctccgtaccttcaccccctccttgtttcttggaaagagaggcgggaaaggtaaattctcctcataatactggtcctaagcagttaccctgtaaatagttaatgtgagctccacgggtcaccaatataaagtttcctgccttctgatggacaaaggaagcggcgatggccagaatttgcagggacgctaaatgtccaaaacgtatgccttaaggcatttctctccctgatgcgtggattattttggttactagcccttcataggagatactggtaaaataaattcgagttttaaagt

SEQ ID NO: 342080 - DNA, 422 bp, Homo sapiens
atttaaattaatgtttttggaaattttcactaaaaccttggcaggatctcctggaaaactgcttatcctaagtagtacagaatagggcaggtgatggcatgcgctttctaagagaaaacccagcagaggaattgggacccccagctgcgtttcctccgtgtcacagctgagcaagtccctgctctcgagtggagccagggttggctacctcgttgtccgatatcatttaggtctgctgagatgctgagagggccatgagtgggccctggatgccgtcagtgccttccgtagtcggtctccccagcctcctgtgctgtaaagtgagtttattgttaggagatactgaggagtggtgagttgggttttatttaaattacttacattcaggcaaaaatgttcctttctaaccattctttgataat

SEQ ID NO: 342081 - DNA, 7571 bp, Homo sapiens
ggtattaaaactgatcttttgacatttttgacaatgttcttataaattactttcttttttatcatatatggatgggatgaagcacagagtaagatagagtgcacagcaaaggggatctgcccctcctatctgtccaataccccacaggttttggtgataatcttgggcaatgttccagtcaaacctgcctcccacttctcactaaagttagtgaacatgtgacccacattccccaaataagagcctcttataaactccattcttggctttttcattcatagagatagctattttatgagacatagataaagcattttttagtgatgtgcacgatgccttttttcttaattattaacttctcaaaacataaacacattggaggcacttaataaagggagctgtagctaccgccgtccgcgcctccaaggtttcacggcttcctcagcagagactcgggctcgtccgccatgtccgccgcagacgaggttgacgggctgggcgtggcccggccgcactatggctctgtcctggataatgaaagacttactgcagaggagatggatgaaaggagacgtcagaacgtggcttatgagtacctttgtcatttggaagaagcgaagaggtggatggaagcatgcctaggggaagatctgcctcccaccacagaactggaggaggggcttaggaatggggtctaccttgccaaactggggaacttcttctctcccaaagtagtgtccctgaaaaaaatctatgatcgagaacagaccagatacaaggcgactggcctccactttagacacactgataatgtgattcagtggttgaatgccatggatgagattggattgcctaagattttttacccagaaactacagatatctatgatcgaaagaacatgccaagatgtatctactgtatccatgcactcagtttgtacctgttcaagctaggcctggcccctcagattcaagacctatatggaaaggttgacttcacagaagaagaaatcaacaacatgaagactgagttggagaagtatggcatccagatgcctgcctttagcaagattgggggcatcttggctaatgaactgtcagtggatgaagccgcattacatgctgctgttattgctattaatgaagctattgaccgtagaattccagccgacacatttgcagctttgaaaaatccgaatgccatgcttgtaaatcttgaagagcccttggcatccacttaccaggatatactttaccaggctaagcaggacaaaatgacaaatgctaaaaacaggacagaaaactcagagagagaaagagatgtttatgaggagctgctcacgcaagctgaaattcaaggcaatataaacaaagtcaatacattttctgcattagcaaatatcgacctggctttagaacaaggagatgcactggccttgttcagggctctgcagtcaccagccctggggcttcgaggactgcagcaacagaatagcgactggtacttgaagcagctcctgagtgataaacagcagaagagacagagtggtcagactgaccccctgcagaaggaggagctgcagtctggagtggatgctgcaaacagtgctgcccagcaatatcagagaagattggcagcagtagcactgattaatgctgcaatccagaagggtgttgctgagaagactgttttggaactgatgaatcccgaagcccagctgccccaggtgtatccatttgccgccgatctctatcagaaggagctggctaccctgcagcgacaaagtcctgaacataatctcacccacccagagctctctgtcgcagtggagatgttgtcatcggtggccctgatcaacagggcattggaatcaggagatgtgaatacagtgtggaagcaattgagcagttcagttactggtcttaccaatattgaggaagaaaactgtcagaggtatctcgatgagttgatgaaactgaaggctcaggcacatgcagagaataatgaattcattacatggaatgatatccaagcttgcgtggaccatgtgaacctggtggtgcaagaggaacatgagaggattttagccattggtttaattaatgaagccctggatgaaggtgatgcccaaaagactctgcaggccctacagattcctgcagctaaacttgagggagtccttgcagaagtggcccagcattaccaagacacgctgattagagcgaagagagagaaagcccaggaaatccaggatgagtcagctgtgttatggttggatgaaattcaaggtggaatctggcagtccaacaaagacacccaagaagcacagaagtttgccttaggaatctttgccattaatgaggcagtagaaagtggtgatgttggcaaaacactgagtgcccttcgctcccctgatgttggcttgtatggagtcatccctgagtgtggtgaaacttaccacagtgatcttgctgaagccaagaagaaaaaactggcagtaggagataataacagcaagtgggtgaagcactgggtaaaaggtggatattattattaccacaatctggagacccaggaaggaggatgggatgaacctccaaattttgtgcaaaattctatgcagctttctcgggaggagatccagagttctatctctggggtgactgccgcatataaccgagaacagctgtggctggccaatgaaggcctgatcaccaggctgcaggctcgctgccgtggatacttagttcgacaggaattccgatccaggatgaatttcctgaagaaacaaatccctgccatcacctgcattcagtcacagtggagaggatacaagcagaagaaggcatatcaagatcggttagcttacctgcgctcccacaaagatgaagttgtaaagattcagtccctggcaaggatgcaccaagctcgaaagcgctatcgagatcgcctgcagtacttccgggaccatataaatgacattatcaaaatccaggcttttattcgggcaaacaaagctcgggatgactacaagactctcatcaatgctgaggatcctcctatggttgtggtccgaaaatttgtccacctgctggaccaaagtgaccaggattttcaggaggagcttgaccttatgaagatgcgggaagaggttatcaccctcattcgttctaaccagcagctggagaatgacctcaatctcatggatatcaaaattggactgctagtgaaaaataagattacgttgcaggatgtggtttcccacagtaaaaaacttaccaaaaaaaataaggaacagttgtctgatatgatgatgataaataaacagaagggaggtctcaaggctttgagcaaggagaagagagagaagttggaagcttaccagcacctgttttatttattgcaaaccaatcccacctatctggccaagctcatttttcagatgccccagaacaagtccaccaagttcatggactctgtaatcttcacactctacaactacgcgtccaaccagcgagaggagtacctgctcctgcggctctttaagacagcactccaagaggaaatcaagtcgaaggtagatcagattcaagagattgtgacaggaaatcctacggttattaaaatggttgtaagtttcaaccgtggtgcccgtggccagaatgccctgagacagatcttggccccagtcgtgaaggaaattatggatgacaaatctctcaacatcaaaactgaccctgtggatatttacaaatcttgggttaatcagatggagtctcagacaggagaggcaagcaaactgccctatgatgtgacccctgagcaggcgctagctcatgaagaagtgaagacacggctagacagctccatcaggaacatgcgggctgtgacagacaagtttctctcagccattgtcagctctgtggacaaaatcccttatgggatgcgcttcattgccaaagtgctgaaggactcgttgcatgagaagttccctgatgctggtgaggatgagctgctgaagattattggtaacttgctttattatcgatacatgaatccagccattgttgctcctgatgcctttgacatcattgacctgtcagcaggaggccagcttaccacagaccaacgccgaaatctgggctccattgcaaaaatgcttcagcatgctgcttccaataagatgtttctgggagataatgcccacttaagcatcattaatgaatatctttcccagtcctaccagaaattcagacggtttttccaaactgcttgtgatgtcccagagcttcaggataaatttaatgtggatgagtactctgatttagtaaccctcaccaaaccagtaatctacatttccattggtgaaatcatcaacacccacactctcctgttggatcaccaggatgccattgctccggagcacaatgatccaatccacgaactgctggacgacctcggcgaggtgcccaccatcgagtccctgataggggaaagctctggcaatttaaatgacccaaataaggaggcactggctaagacggaagtgtctctcaccctgaccaacaagttcgacgtgcctggagatgagaatgcagaaatggatgctcgaaccatcttactgaatacaaaacgtttaattgtggatgtcatccggttccagccaggagagaccttgactgaaatcctagaaacaccagccaccagtgaacaggaagcagaacatcagagagccatgcagagacgtgctatccgtgatgccaaaacacctgacaagatgaaaaagtcaaaatctgtaaaggaagacagcaacctcactcttcaagagaagaaagagaagatccagacaggtttaaagaagctaacagagcttggaaccgtggacccaaagaacaaataccaggaactgatcaacgacattgccagggatattcggaatcagcggaggtaccgacagaggagaaaggccgaactagtgaaactgcaacagacatacgctgctctgaactctaaggccaccttttatggggagcaggtggattactataaaagctatatcaaaacctgcttggataacttagccagcaagggcaaagtctccaaaaagcctagggaaatgaaaggaaagaaaagcaaaaagatttctctgaaatatacagcagcaagactacatgaaaaaggagttcttctggaaattgaggacctgcaagtgaatcagtttaaaaatgttatatttgaaatcagtccaacagaagaagttggagacttcgaagtgaaagccaaattcatgggagttcaaatggagacttttatgttacattatcaggacctgctgcagctacagtatgaaggagttgcagtcatgaaattatttgatagagctaaagtaaatgtcaacctcctgatcttccttctcaacaaaaagttctacgggaagtaattgatcgtttgctgccagcccagaaggatgaaggaaagaagcacctcacagctcctttctaggtccttctttcctcattggaagcaaagacctagccaacaacagcacctcaatctgatacactcccgatgccacatttttaactcctctcgctctgatgggacatttgttacccttttttcatagtgaaattgtgtttcaggcttagtctgacctttctggtttcttcattttcttccattacttaggaaagagtggaaactccactaaaatttctctgtgttgttacagtcttagaggttgcagtactatattgtaagctttggtgtttgtttaattagcaatagggatggtaggattcaaatgtgtgtcatttagaagtggaagctattagcaccaatgacataaatacatacaagacacagaactaaaatgtcatgttattaacagttattaggttgtcatttaaaaataaagttcctttatatttctgtcccatcaggaaaactgaaggatatggggaatcattggttatcttccattgtgtttttctttatggacaggagctaatggaagtgacagtcatgttcaaaggaagcatttctagaaaaaaggagataatgtttttaaatttcattatcaaacttgggcaattctgtttgtgtaactccccgactagtggatgggagagtcccattgctaaaattcagctactcagataaattcagaatgggtcaaggcacctgcctgtttttgttggtgcacagagattgacttgattcagagagacaattcactccatccctatggcagaggaatgggttagccctaatgtagaatgtcattgtttttaaaactgttttatatcttaagagtgccttattaaagtatagatgtatgtcttaaaatgtgggtgataggaattttaaagatttatataatgcatcaaaagccttagaataagaaaagctttttttaaattgctttatctgtatatctgaactcttgaaacttatagctaaaacactaggatttatctgcagtgttgcagggagataattctgccttaaattgtctaaaacaaaaacaaaaccagccaacctatgttacacgtgagattaaaaccaattttttccccattttttctccttttttctcttgctgcccacattgtgcctttattttatgagccccagttttctgggcttagtttaaaaaaaaaatcaagtctaaacattgcatttagaaagcttttgttcttggataaaaagtcatacactttaaaaaaaaaaaaaactttttccaggaaaatatattgaaatcatgctgctgagcctctattttctttctttgatgttttgattcagtattcttttatcataaatttttagcatttaaaaattcactgatgtacattaagccaataaactgctttaatgaataacaaactatgtagtgtgtccctattataaatgcattggagaagtatttttatgagactctttactcaggtgcatggttacagcccacagggaggcatggagtgccatggaaggattcgccactacccagaccttgttttttgttgtattttggaagacaggttttttaaagaaacattttcctcagattaaaagatgatgctattacaactagcattgcctcaaaaactgggaccaaccaaagtgtgtcaaccctgtttccttaaaagaggctatgaatcccaaaggccacatccaagacaggcaataatgagcagagtttacagctcctttaataaaatgtgtcagtaattttaaggtttatagttccctcaacacaattgctaatgcagaatagtgtaaaatgcgcttcaagaatgttgatgatgatgatatagaattgtggctttagtagcacagaggatgccccaacaaactcatggcgttgaaaccacacagttctcattactgttatttattagctgtagcattctctgtctcctctctctcctcctttgaccttctcctcgaccagccatcatgacatttaccatgaatttacttcctcccaagagtttggactgcccgtcagattgtttctgcacatagttgcctttgtatctctgtatgaaataaaaggtcatttgtt

SEQ ID NO: 342082 - DNA, 350 bp, Homo sapiens
aggaaacagggttgacacactttggttgttccctcaacacaattgctaatgcagaatagtgtaaaatgcgcttcaagaatgttgatgatgatgatatagaattgtggctttagtagcacagaggatgccccaacaaactcatggcgttgaaaccacacagttctcattactgttatttattagctgtagcattctctgtctcctctctctcctcctttgaccttctcctcgaccagccatcatgacatttaccatgaatttacttcctcccaagagtttggactgcccgtcagattgtttctgcacatagttgcctttgtatctctgtatgaaataaaaggtcatttgtt

SEQ ID NO: 342083 - DNA, 842 bp, Homo sapiens
cttagaactttttgaggcttttcatgtaatatgtttaagaatgtactggtatctgtaaagtcactctaccccagctttggcaaaggcatttggctctacctggggctgccgacactctggctgcatgtagcctgagctgtcacttatgactatggctctctctgtccctagtgactgcttttgagagatgagaaccttaaggcctggagtcataggaatgagtaatctttacataattttctttgctttgctcagagtggtcagactgaccccctgcagaaggaggagctgcagtctggagtggatgctgcaaacagtgctgcccagcaatatcagagaagtaagagtccattgaaattgtatgggaggaaagttgtggctttgtgttattgaagggtctgaggttagcttctgtcatcgtcatcacccactctgagcctactagccataaccaactgccaggtacttttggtggcaggagggttcctccagtttgttgttgtggtggttttaattgctgtgtaatagttgtacatattttgagggtacatgtgttttgttttttaaaccaaccaagaagcactgacaccaaccaagaagcactgacgtatgatattttgatacatgcatacaatgtattatgatcaaatcagggtaattggaatatttgtcacctaacgcatttatcttttgttgatgttgggaacattccagttcttctgttttgaactatacattattgttaactatcatcatcctactgtgctatctaacactagacctattccttgtatctaatggtaattttgtacccgttagccaacctctctatgtcctcctcc

SEQ ID NO: 342084 - DNA, 608 bp, Homo sapiens
gttcttccagatggagggatggcccgtgcccttgttcccctgtcactgctggaagtggtccttcctaaaacttcatcatgaaattgcacttggatcatgtatcaagatgaaagtttttttttaacttccattgatgcttgggaagtaatatgtcttctgtaacatttgactgtttcagtcacagtggagaggatacaagcagaagaaggcatatcaagatcggttagcttacctgcgctcccacaaagatgaagttgtaaaggtatggtagcctgaacagggtttctccatgaggggcacaggtataacacgtgttgagatgaaggactcttctaatttccaggatcccttttccacagattcagtccctggcaaggatgcaccaagctcgaaagcgctatcgagatcgcctgcagtacttccgggaccatataaatgacattatcaaaatccaggcttttattcgggcaaacaaagctcgggatgactacaagactctcagtgagtaactggctccgcatgaagagttgaggcagtggctgggagccacacaagttcagggtattctccacagacctcttttgttatcctgaaggcaaggcttgggg

SEQ ID NO: 342085 - DNA, 531 bp, Homo sapiens
ccactttagtccactttttcaagacaatgctatttcctgagacgtagtactttttctgctaactccattctttgatgcatactttctgtcagtcaatgctgaggatcctcctatggttgtggtccgaaaatttgtccacctgctggaccaaagtgaccaggattttcaggaggagcttgaccttatgaagatgcgggaagaggttatcaccctcattcgttctaaccagcagctggagaatgacctcaatctcatggatatcaaaattggactgctagtgaaaaataagattacgttgcaggtatggcccagtgccagcgggggccttggaacggttcatcctgctttgtaacccctgcattcccctttctgactggtggggagggtggaggctgactttctcctcagctactgccataagagctttttttttttcttttgactgagtctcactctgttgcccaggttgcagtgagccgagattgcatgactgcactccggactgggtgacagagtgaaactctatctcca

SEQ ID NO: 342086 - DNA, 7274 bp, Homo sapiens
  misc_feature (8)..(8): n is a, c, g, or t
gacggcanggggcggggcctcggggaccccggcaagcccgcgcacttggcaggagctgtagctaccgccgtccgcgcctccaaggtttcacggcttcctcagcagagactcgggctcgtccgccatgtccgccgcagacgaggttgacgggctgggcgtggcccggccgcactatggctctgtcctggataatgaaagacttactgcagaggagatggatgaaaggagacgtcagaacgtggcttatgagtacctttgtcatttggaagaagcgaagaggtggatggaagcatgcctaggggaagatctgcctcccaccacagaactggaggaggggcttaggaatggggtctaccttgccaaactggggaacttcttctctcccaaagtagtgtccctgaaaaaaatctatgatcgagaacagaccagatacaaggcgactggcctccactttagacacactgataatgtgattcagtggttgaatgccatggatgagattggattgcctaagattttttacccagaaactacagatatctatgatcgaaagaacatgccaagatgtatctactgtatccatgcactcagtttgtacctgttcaagctaggcctggcccctcagattcaagacctatatggaaaggttgacttcacagaagaagaaatcaacaacatgaagactgagttggagaagtatggcatccagatgcctgcctttagcaagattgggggcatcttggctaatgaactgtcagtggatgaagccgcattacatgctgctgttattgctattaatgaagctattgaccgtagaattccagccgacacatttgcagctttgaaaaatccgaatgccatgcttgtaaatcttgaagagcccttggcatccacttaccaggatatactttaccaggctaagcaggacaaaatgacaaatgctaaaaacaggacagaaaactcagagagagaaagagatgtttatgaggagctgctcacgcaagctgaaattcaaggcaatataaacaaagtcaatacattttctgcattagcaaatatcgacctggctttagaacaaggagatgcactggccttgttcagggctctgcagtcaccagccctggggcttcgaggactgcagcaacagaatagcgactggtacttgaagcagctcctgagtgataaacagcagaagagacagagtggtcagactgaccccctgcagaaggaggagctgcagtctggagtggatgctgcaaacagtgctgcccagcaatatcagagaagattggcagcagtagcactgattaatgctgcaatccagaagggtgttgctgagaagactgttttggaactgatgaatcccgaagcccagctgccccaggtgtatccatttgccgccgatctctatcagaaggagctggctaccctgcagcgacaaagtcctgaacataatctcacccacccagagctctctgtcgcagtggagatgttgtcatcggtggccctgatcaacagggcattggaatcaggagatgtgaatacagtgtggaagcaattgagcagttcagttactggtcttaccaatattgaggaagaaaactgtcagaggtatctcgatgagttgatgaaactgaaggctcaggcacatgcagagaataatgaattcattacatggaatgatatccaagcttgcgtggaccatgtgaacctggtggtgcaagaggaacatgagaggattttagccattggtttaattaatgaagccctggatgaaggtgatgcccaaaagactctgcaggccctacagattcctgcagctaaacttgagggagtccttgcagaagtggcccagcattaccaagacacgctgattagagcgaagagagagaaagcccaggaaatccaggatgagtcagctgtgttatggttggatgaaattcaaggtggaatctggcagtccaacaaagacacccaagaagcacagaagtttgccttaggaatctttgccattaatgaggcagtagaaagtggtgatgttggcaaaacactgagtgcccttcgctcccctgatgttggcttgtatggagtcatccctgagtgtggtgaaacttaccacagtgatcttgctgaagccaagaagaaaaaactggcagtaggagataataacagcaagtgggtgaagcactgggtaaaaggtggatattattattaccacaatctggagacccaggaaggaggatgggatgaacctccaaattttgtgcaaaattctatgcagctttctcgggaggagatccagagttctatctctggggtgactgccgcatataaccgagaacagctgtggctggccaatgaaggcctgatcaccaggctgcaggctcgctgccgtggatacttagttcgacaggaattccgatccaggatgaatttcctgaagaaacaaatccctgccatcacctgcattcagtcacagtggagaggatacaagcagaagaaggcatatcaagatcggttagcttacctgcgctcccacaaagatgaagttgtaaagattcagtccctggcaaggatgcaccaagctcgaaagcgctatcgagatcgcctgcagtacttccgggaccatataaatgacattatcaaaatccaggcttttattcgggcaaacaaagctcgggatgactacaagactctcatcaatgctgaggatcctcctatggttgtggtccgaaaatttgtccacctgctggaccaaagtgaccaggattttcaggaggagcttgaccttatgaagatgcgggaagaggttatcaccctcattcgttctaaccagcagctggagaatgacctcaatctcatggatatcaaaattggactgctagtgaaaaataagattacgttgcaggatgtggtttcccacagtaaaaaacttaccaaaaaaaataaggaacagttgtctgatatgatgatgataaataaacagaagggaggtctcaaggctttgagcaaggagaagagagagaagttggaagcttaccagcacctgttttatttattgcaaaccaatcccacctatctggccaagctcatttttcagatgccccagaacaagtccaccaagttcatggactctgtaatcttcacactctacaactacgcgtccaaccagcgagaggagtacctgctcctgcggctctttaagacagcactccaagaggaaatcaagtcgaaggtagatcagattcaagagattgtgacaggaaatcctacggttattaaaatggttgtaagtttcaaccgtggtgcccgtggccagaatgccctgagacagatcttggccccagtcgtgaaggaaattatggatgacaaatctctcaacatcaaaactgaccctgtggatatttacaaatcttgggttaatcagatggagtctcagacaggagaggcaagcaaactgccctatgatgtgacccctgagcaggcgctagctcatgaagaagtgaagacacggctagacagctccatcaggaacatgcgggctgtgacagacaagtttctctcagccattgtcagctctgtggacaaaatcccttatgggatgcgcttcattgccaaagtgctgaaggactcgttgcatgagaagttccctgatgctggtgaggatgagctgctgaagattattggtaacttgctttattatcgatacatgaatccagccattgttgctcctgatgcctttgacatcattgacctgtcagcaggaggccagcttaccacagaccaacgccgaaatctgggctccattgcaaaaatgcttcagcatgctgcttccaataagatgtttctgggagataatgcccacttaagcatcattaatgaatatctttcccagtcctaccagaaattcagacggtttttccaaactgcttgtgatgtcccagagcttcaggataaatttaatgtggatgagtactctgatttagtaaccctcaccaaaccagtaatctacatttccattggtgaaatcatcaacacccacactctcctgttggatcaccaggatgccattgctccggagcacaatgatccaatccacgaactgctggacgacctcggcgaggtgcccaccatcgagtccctgataggggaaagctctggcaatttaaatgacccaaataaggaggcactggctaagacggaagtgtctctcaccctgaccaacaagttcgacgtgcctggagatgagaatgcagaaatggatgctcgaaccatcttactgaatacaaaacgtttaattgtggatgtcatccggttccagccaggagagaccttgactgaaatcctagaaacaccagccaccagtgaacaggaagcagaacatcagagagccatgcagagacgtgctatccgtgatgccaaaacacctgacaagatgaaaaagtcaaaatctgtaaaggaagacagcaacctcactcttcaagagaagaaagagaagatccagacaggtttaaagaagctaacagagcttggaaccgtggacccaaagaacaaataccaggaactgatcaacgacattgccagggatattcggaatcagcggaggtaccgacagaggagaaaggccgaactagtgaaactgcaacagacatacgctgctctgaactctaaggccaccttttatggggagcaggtggattactataaaagctatatcaaaacctgcttggataacttagccagcaagggcaaagtctccaaaaagcctagggaaatgaaaggaaagaaaagcaaaaagatttctctgaaatatacagcagcaagactacatgaaaaaggagttcttctggaaattgaggacctgcaagtgaatcagtttaaaaatgttatatttgaaatcagtccaacagaagaagttggagacttcgaagtgaaagccaaattcatgggagttcaaatggagacttttatgttacattatcaggacctgctgcagctacagtatgaaggagttgcagtcatgaaattatttgatagagctaaagtaaatgtcaacctcctgatcttccttctcaacaaaaagttctacgggaagtaattgatcgtttgctgccagcccagaaggatgaaggaaagaagcacctcacagctcctttctaggtccttctttcctcattggaagcaaagacctagccaacaacagcacctcaatctgatacactcccgatgccacatttttaactcctctcgctctgatgggacatttgttacccttttttcatagtgaaattgtgtttcaggcttagtctgacctttctggtttcttcattttcttccattacttaggaaagagtggaaactccactaaaatttctctgtgttgttacagtcttagaggttgcagtactatattgtaagctttggtgtttgtttaattagcaatagggatggtaggattcaaatgtgtgtcatttagaagtggaagctattagcaccaatgacataaatacatacaagacacagaactaaaatgtcatgttattaacagttattaggttgtcatttaaaaataaagttcctttatatttctgtcccatcaggaaaactgaaggatatggggaatcattggttatcttccattgtgtttttctttatggacaggagctaatggaagtgacagtcatgttcaaaggaagcatttctagaaaaaaggagataatgtttttaaatttcattatcaaacttgggcaattctgtttgtgtaactccccgactagtggatgggagagtcccattgctaaaattcagctactcagataaattcagaatgggtcaaggcacctgcctgtttttgttggtgcacagagattgacttgattcagagagacaattcactccatccctatggcagaggaatgggttagccctaatgtagaatgtcattgtttttaaaactgttttatatcttaagagtgccttattaaagtatagatgtatgtcttaaaatgtgggtgataggaattttaaagatttatataatgcatcaaaagccttagaataagaaaagctttttttaaattgctttatctgtatatctgaactcttgaaacttatagctaaaacactaggatttatctgcagtgttgcagggagataattctgccttaaattgtctaaaacaaaaacaaaaccagccaacctatgttacacgtgagattaaaaccaattttttccccattttttctccttttttctcttgctgcccacattgtgcctttattttatgagccccagttttctgggcttagtttaaaaaaaaaatcaagtctaaacattgcatttagaaagcttttgttcttggataaaaagtcatacactttaaaaaaaaaaaaaactttttccaggaaaatatattgaaatcatgctgctgagcctctattttctttctttgatgttttgattcagtattcttttatcataaatttttagcatttaaaaattcactgatgtacattaagccaataaactgctttaatgaataacaaactatgtagtgtgtccctattataaatgcattggagaagtatttttatgagactctttactcaggtgcatggttacagcccacagggaggcatggagtgccatggaaggattcgccactacccagaccttgttttttgttgtattttggaagacaggttttttaaagaaacattttcctcagattaaaagatgatgctattacaactagcattgcctcaaaaactgggaccaaccaaagtgtgtcaaccctgtttccttaaaagaggctatgaatcccaaaggccacatccaagacaggcaataatgagcagagtttacagctcctttaataaaatgtgtcagtaattttaaggtttatagttccctcaacacaattgctaatgcagaatagtgtaaaatgcgcttcaagaatgttgatgatgatgatatagaattgtggctttagtagcacagaggatgccccaacaaactcatggcgttgaaaccacacagttctcattactgttatttattagctgtagcattctctgtctcctctctctcctcctttgaccttctcctcgaccagccatcatgacatttaccatgaatttacttcctcccaagagtttggactgcccgtcagattgtttctgcacatagttgcctttgtatctctgtatgaaataaaaggtcatttgttaaaaaaaaaaggggggggtaaaaatcctcgagggccaagtaggtcc

SEQ ID NO: 342087 - DNA, 7218 bp, Homo sapiens
  misc_feature (8)..(8): n is a, c, g, or t
gacggcanggggcggggcctcggggaccccggcaagcccgcgcacttggcaggagctgtagctaccgccgtccgcgcctccaaggtttcacggcttcctcagcagagactcgggctcgtccgccatgtccgccgcagacgaggttgacgggctgggcgtggcccggccgcactatggctctgtcctggataatgaaagacttactgcagaggagatggatgaaaggagacgtcagaacgtggcttatgagtacctttgtcatttggaagaagcgaagaggtggatggaagcatgcctaggggaagatctgcctcccaccacagaactggaggaggggcttaggaatggggtctaccttgccaaactggggaacttcttctctcccaaagtagtgtccctgaaaaaaatctatgatcgagaacagaccagatacaaggcgactggcctccactttagacacactgataatgtgattcagtggttgaatgccatggatgagattggattgcctaagattttttacccagaaactacagatatctatgatcgaaagaacatgccaagatgtatctactgtatccatgcactcagtttgtacctgttcaagctaggcctggcccctcagattcaagacctatatggaaaggttgacttcacagaagaagaaatcaacaacatgaagactgagttggagaagtatggcatccagatgcctgcctttagcaagattgggggcatcttggctaatgaactgtcagtggatgaagccgcattacatgctgctgttattgctattaatgaagctattgaccgtagaattccagccgacacatttgcagctttgaaaaatccgaatgccatgcttgtaaatcttgaagagcccttggcatccacttaccaggatatactttaccaggctaagcaggacaaaatgacaaatgctaaaaacaggacagaaaactcagagagagaaagagatgtttatgaggagctgctcacgcaagctgaaattcaaggcaatataaacaaagtcaatacattttctgcattagcaaatatcgacctggctttagaacaaggagatgcactggccttgttcagggctctgcagtcaccagccctggggcttcgaggactgcagcaacagaatagcgactggtacttgaagcagctcctgagtgataaacagcagaagagacagagtggtcagactgaccccctgcagaaggaggagctgcagtctggagtggatgctgcaaacagtgctgcccagcaatatcagagaagattggcagcagtagcactgattaatgctgcaatccagaagggtgttgctgagaagactgttttggaactgatgaatcccgaagcccagctgccccaggtgtatccatttgccgccgatctctatcagaaggagctggctaccctgcagcgacaaagtcctgaacataatctcacccacccagagctctctgtcgcagtggagatgttgtcatcggtggccctgatcaacagggcattggaatcaggagatgtgaatacagtgtggaagcaattgagcagttcagttactggtcttaccaatattgaggaagaaaactgtcagaggtatctcgatgagttgatgaaactgaaggctcaggcacatgcagagaataatgaattcattacatggaatgatatccaagcttgcgtggaccatgtgaacctggtggtgcaagaggaacatgagaggattttagccattggtttaattaatgaagccctggatgaaggtgatgcccaaaagactctgcaggccctacagattcctgcagctaaacttgagggagtccttgcagaagtggcccagcattaccaagacacgctgattagagcgaagagagagaaagcccaggaaatccaggatgagtcagctgtgttatggttggatgaaattcaaggtggaatctggcagtccaacaaagacacccaagaagcacagaagtttgccttaggaatctttgccattaatgaggcagtagaaagtggtgatgttggcaaaacactgagtgcccttcgctcccctgatgttggcttgtatggagtcatccctgagtgtggtgaaacttaccacagtgatcttgctgaagccaagaagaaaaaactggcagtaggagataataacagcaagtgggtgaagcactgggtaaaaggtggatattattattaccacaatctggagacccaggaaggaggatgggatgaacctccaaattttgtgcaaaattctatgcagctttctcgggaggagatccagagttctatctctggggtgactgccgcatataaccgagaacagctgtggctggccaatgaaggcctgatcaccaggctgcaggctcgctgccgtggatacttagttcgacaggaattccgatccaggatgaatttcctgaagaaacaaatccctgccatcacctgcattcagtcacagtggagaggatacaagcagaagaaggcatatcaagatcggttagcttacctgcgctcccacaaagatgaagttgtaaagattcagtccctggcaaggatgcaccaagctcgaaagcgctatcgagatcgcctgcagtacttccgggaccatataaatgacattatcaaaatccaggcttttattcgggcaaacaaagctcgggatgactacaagactctcatcaatgctgaggatcctcctatggttgtggtccgaaaatttgtccacctgctggaccaaagtgaccaggattttcaggaggagcttgaccttatgaagatgcgggaagaggttatcaccctcattcgttctaaccagcagctggagaatgacctcaatctcatggatatcaaaattggactgctagtgaaaaataagattacgttgcaggatgtggtttcccacagtaaaaaacttaccaaaaaaaataaggaacagttgtctgatatgatgatgataaataaacagaagggaggtctcaaggctttgagcaaggagaagagagagaagttggaagcttaccagcacctgttttatttattgcaaaccaatcccacctatctggccaagctcatttttcagatgccccagaacaagtccaccaagttcatggactctgtaatcttcacactctacaactacgcgtccaaccagcgagaggagtacctgctcctgcggctctttaagacagcactccaagaggaaatcaagtcgaaggtagatcagattcaagagattgtgacaggaaatcctacggttattaaaatggttgtaagtttcaaccgtggtgcccgtggccagaatgccctgagacagatcttggccccagtcgtgaaggaaattatggatgacaaatctctcaacatcaaaactgaccctgtggatatttacaaatcttgggttaatcagatggagtctcagacaggagaggcaagcaaactgccctatgatgtgacccctgagcaggcgctagctcatgaagaagtgaagacacggctagacagctccatcaggaacatgcgggctgtgacagacaagtttctctcagccattgtcagctctgtggacaaaatcccttatgggatgcgcttcattgccaaagtgctgaaggactcgttgcatgagaagttccctgatgctggtgaggatgagctgctgaagattattggtaacttgctttattatcgatacatgaatccagccattgttgctcctgatgcctttgacatcattgacctgtcagcaggaggccagcttaccacagaccaacgccgaaatctgggctccattgcaaaaatgcttcagcatgctgcttccaataagatgtttctgggagataatgcccacttaagcatcattaatgaatatctttcccagtcctaccagaaattcagacggtttttccaaactgcttgtgatgtcccagagcttcaggataaatttaatgtggatgagtactctgatttagtaaccctcaccaaaccagtaatctacatttccattggtgaaatcatcaacacccacactctcctgttggatcaccaggatgccattgctccggagcacaatgatccaatccacgaactgctggacgacctcggcgaggtgcccaccatcgagtccctgataggggaaagctctggcaatttaaatgacccaaataaggaggcactggctaagacggaagtgtctctcaccctgaccaacaagttcgacgtgcctggagatgagaatgcagaaatggatgctcgaaccatcttactgaatacaaaacgtttaattgtggatgtcatccggttccagccaggagagaccttgactgaaatcctagaaacaccagccaccagtgaacaggaagcagaacatcagagagccatgcagagacgtgctatccgtgatgccaaaacacctgacaagatgaaaaagtcaaaatctgtaaaggaagacagcaacctcactcttcaagagaagaaagagaagatccagacaggtttaaagaagctaacagagcttggaaccgtggacccaaagaacaaataccaggaactgatcaacgacattgccagggatattcggaatcagcggaggtaccgacagaggagaaaggccgaactagtgaaactgcaacagacatacgctgctctgaactctaaggccaccttttatggggagcaggtggattactataaaagctatatcaaaacctgcttggataacttagccagcaagggcaaagtctccaaaaagcctagggaaatgaaaggaaagaaaagcaaaaagatttctctgaaatatacagcagcaagactacatgaaaaaggagttcttctggaaattgaggacctgcaagtgaatcagtttaaaaatgttatatttgaaatcagtccaacagaagaagttggagacttcgaagtgaaagccaaattcatgggagttcaaatggagacttttatgttacattatcaggacctgctgcagctacagtatgaaggagttgcagtcatgaaattatttgatagagctaaagtaaatgtcaacctcctgatcttccttctcaacaaaaagttctacgggaagtaattgatcgtttgctgccagcccagaaggatgaaggaaagaagcacctcacagctcctttctaggtccttctttcctcattggaagcaaagacctagccaacaacagcacctcaatctgatacactcccgatgccacatttttaactcctctcgctctgatgggacatttgttacccttttttcatagtgaaattgtgtttcaggcttagtctgacctttctggtttcttcattttcttccattacttaggaaagagtggaaactccactaaaatttctctgtgttgttacagtcttagaggttgcagtactatattgtaagctttggtgtttgtttaattagcaatagggatggtaggattcaaatgtgtgtcatttagaagtggaagctattagcaccaatgacataaatacatacaagacacagaactaaaatgtcatgttattaacagttattaggttgtcatttaaaaataaagttcctttatatttctgtcccatcaggaaaactgaaggatatggggaatcattggttatcttccattgtgtttttctttatggacaggagctaatggaagtgacagtcatgttcaaaggaagcatttctagaaaaaaggagataatgtttttaaatttcattatcaaacttgggcaattctgtttgtgtaactccccgactagtggatgggagagtcccattgctaaaattcagctactcagataaattcagaatgggtcaaggcacctgcctgtttttgttggtgcacagagattgacttgattcagagagacaattcactccatccctatggcagaggaatgggttagccctaatgtagaatgtcattgtttttaaaactgttttatatcttaagagtgccttattaaagtatagatgtatgtcttaaaatgtgggtgataggaattttaaagatttatataatgcatcaaaagccttagaataagaaaagctttttttaaattgctttatctgtatatctgaactcttgaaacttatagctaaaacactaggatttatctgcagtgttgcagggagataattctgccttaaattgtctaaaacaaaaacaaaaccagccaacctatgttacacgtgagattaaaaccaattttttccccattttttctccttttttctcttgctgcccacattgtgcctttattttatgagccccagttttctgggcttagtttaaaaaaaaaatcaagtctaaacattgcatttagaaagcttttgttcttggataaaaagtcatacactttaaaaaaaaaaaaaactttttccaggaaaatatattgaaatcatgctgctgagcctctattttctttctttgatgttttgattcagtattcttttatcataaatttttagcatttaaaaattcactgatgtacattaagccaataaactgctttaatgaataacaaactatgtagtgtgtccctattataaatgcattggagaagtatttttatgagactctttactcaggtgcatggttacagcccacagggaggcatggagtgccatggaaggattcgccactacccagaccttgttttttgttgtattttggaagacaggttttttaaagaaacattttcctcagattaaaagatgatgctattacaactagcattgcctcaaaaactgggaccaaccaaagtgtgtcaaccctgtttccttaaaagaggctatgaatcccaaaggccacatccaagacaggcaataatgagcagagtttacagctcctttaataaaatgtgtcagtaattttaaggtttatagttccctcaacacaattgctaatgcagaatagtgtaaaatgcgcttcaagaatgttgatgatgatgatatagaattgtggctttagtagcacagaggatgccccaacaaactcatggcgttgaaaccacacagttctcattactgttatttattagctgtagcattctctgtctcctctctctcctcctttgaccttctcctcgaccagccatcatgacatttaccatgaatttacttcctcccaagagtttggactgcccgtcagattgtttctgcacatagttgcctttcggagaagagggatcctctaga

SEQ ID NO: 342088 - DNA, 5632 bp, Homo sapiens
gtggagtagtctccagtccagcgccaacgctgccttgtcgccgcaggccctggggtgcaggcacgcagttgatagcaggtgtagtgcgcagcgctcagtgctcgttcatctcgtccaagtggagatgcgttttccaatagtgtcaaagggtgtctgtactcagcaaaaggccctggatgaaggtgatgcccaaaagactctgcaggccctacagattcctgcagctaaacttgagggagtccttgcagaagtggcccagcattaccaagacacgctgattagagcgaagagagagaaagcccaggaaatccaggatgagtcagctgtgttatggttggatgaaattcaaggtggaatctggcagtccaacaaagacacccaagaagcacagaagtttgccttaggaatctttgccattaatgaggcagtagaaagtggtgatgttggcaaaacactgagtgcccttcgctcccctgatgttggcttgtatggagtcatccctgagtgtggtgaaacttaccacagtgatcttgctgaagccaagaagaaaaaactggcagtaggagataataacagcaagtgggtgaagcactgggtaaaaggtggatattattattaccacaatctggagacccaggaaggaggatgggatgaacctccaaattttgtgcaaaattctatgcagctttctcgggaggagatccagagttctatctctggggtgactgccgcatataaccgagaacagctgtggctggccaatgaaggcctgatcaccaggctgcaggctcgctgccgtggatacttagttcgacaggaattccgatccaggatgaatttcctgaagaaacaaatccctgccatcacctgcattcagtcacagtggagaggatacaagcagaagaaggcatatcaagatcggttagcttacctgcgctcccacaaagatgaagttgtaaagattcagtccctggcaaggatgcaccaagctcgaaagcgctatcgagatcgcctgcagtacttccgggaccatataaatgacattatcaaaatccaggcttttattcgggcaaacaaagctcgggatgactacaagactctcatcaatgctgaggatcctcctatggttgtggtccgaaaatttgtccacctgctggaccaaagtgaccaggattttcaggaggagcttgaccttatgaagatgcgggaagaggttatcaccctcattcgttctaaccagcagctggagaatgacctcaatctcatggatatcaaaattggactgctagtgaaaaataagattacgttgcaggatgtggtttcccacagtaaaaaacttaccaaaaaaaataaggaacagttgtctgatatgatgatgataaataaacagaagggaggtctcaaggctttgagcaaggagaagagagagaagttggaagcttaccagcacctgttttatttattgcaaaccaatcccacctatctggccaagctcatttttcagatgccccagaacaagtccaccaagttcatggactctgtaatcttcacactctacaactacgcgtccaaccagcgagaggagtacctgctcctgcggctctttaagacagcactccaagaggaaatcaagtcgaaggtagatcagattcaagagattgtgacaggaaatcctacggttattaaaatggttgtaagtttcaaccgtggtgcccgtggccagaatgccctgagacagatcttggccccagtcgtgaaggaaattatggatgacaaatctctcaacatcaaaactgaccctgtggatatttacaaatcttgggttaatcagatggagtctcagacaggagaggcaagcaaactgccctatgatgtgacccctgagcaggcgctagctcatgaagaagtgaagacacggctagacagctccatcaggaacatgcgggctgtgacagacaagtttctctcagccattgtcagctctgtggacaaaatcccttatgggatgcgcttcattgccaaagtgctgaaggactcgttgcatgagaagttccctgatgctggtgaggatgagctgctgaagattattggtaacttgctttattatcgatacatgaatccagccattgttgctcctgatgcctttgacatcattgacctgtcagcaggaggccagcttaccacagaccaacgccgaaatctgggctccattgcaaaaatgcttcagcatgctgcttccaataagatgtttctgggagataatgcccacttaagcatcattaatgaatatctttcccagtcctaccagaaattcagacggtttttccaaactgcttgtgatgtcccagagcttcaggataaatttaatgtggatgagtactctgatttagtaaccctcaccaaaccagtaatctacatttccattggtgaaatcatcaacacccacactctcctgttggatcaccaggatgccattgctccggagcacaatgatccaatccacgaactgctggacgacctcggcgaggtgcccaccatcgagtccctgataggggaaagctctggcaatttaaatgacccaaataaggaggcactggctaagacggaagtgtctctcaccctgaccaacaagttcgacgtgcctggagatgagaatgcagaaatggatgctcgaaccatcttactgaatacaaaacgtttaattgtggatgtcatccggttccagccaggagagaccttgactgaaatcctagaaacaccagccaccagtgaacaggaagcagaacatcagagagccatgcagagacgtgctatccgtgatgccaaaacacctgacaagatgaaaaagtcaaaatctgtaaaggaagacagcaacctcactcttcaagagaagaaagagaagatccagacaggtttaaagaagctaacagagcttggaaccgtggacccaaagaacaaataccaggaactgatcaacgacattgccagggatattcggaatcagcggaggtaccgacagaggagaaaggccgaactagtgaaactgcaacagacatacgctgctctgaactctaaggccaccttttatggggagcaggtggattactataaaagctatatcaaaacctgcttggataacttagccagcaagggcaaagtctccaaaaagcctagggaaatgaaaggaaagaaaagcaaaaagatttctctgaaatatacagcagcaagactacatgaaaaaggagttcttctggaaattgaggacctgcaagtgaatcagtttaaaaatgttatatttgaaatcagtccaacagaagaagttggagacttcgaagtgaaagccaaattcatgggagttcaaatggagacttttatgttacattatcaggacctgctgcagctacagtatgaaggagttgcagtcatgaaattatttgatagagctaaagtaaatgtcaacctcctgatcttccttctcaacaaaaagttctacgggaagtaattgatcgtttgctgccagcccagaaggatgaaggaaagaagcacctcacagctcctttctaggtccttctttcctcattggaagcaaagacctagccaacaacagcacctcaatctgatacactcccgatgccacatttttaactcctctcgctctgatgggacatttgttacccttttttcatagtgaaattgtgtttcaggcttagtctgacctttctggtttcttcattttcttccattacttaggaaagagtggaaactccactaaaatttctctgtgttgttacagtcttagaggttgcagtactatattgtaagctttggtgtttgtttaattagcaatagggatggtaggattcaaatgtgtgtcatttagaagtggaagctattagcaccaatgacataaatacatacaagacacagaactaaaatgtcatgttattaacagttattaggttgtcatttaaaaataaagttcctttatatttctgtcccatcaggaaaactgaaggatatggggaatcattggttatcttccattgtgtttttctttatggacaggagctaatggaagtgacagtcatgttcaaaggaagcatttctagaaaaaaggagataatgtttttaaatttcattatcaaacttgggcaattctgtttgtgtaactccccgactagtggatgggagagtcccattgctaaaattcagctactcagataaattcagaatgggtcaaggcacctgcctgtttttgttggtgcacagagattgacttgattcagagagacaattcactccatccctatggcagaggaatgggttagccctaatgtagaatgtcattgtttttaaaactgttttatatcttaagagtgccttattaaagtatagatgtatgtcttaaaatgtgggtgataggaattttaaagatttatataatgcatcaaaagccttagaataagaaaagctttttttaaattgctttatctgtatatctgaactcttgaaacttatagctaaaacactaggatttatctgcagtgttgcagggagataattctgccttaaattgtctaaaacaaaaacaaaaccagccaacctatgttacacgtgagattaaaaccaattttttccccattttttctccttttttctcttgctgcccacattgtgcctttattttatgagccccagttttctgggcttagtttaaaaaaaaaatcaagtctaaacattgcatttagaaagcttttgttcttggataaaaagtcatacactttaaaaaaaaaaaaaactttttccaggaaaatatattgaaatcatgctgctgagcctctattttctttctttgatgttttgattcagtattcttttatcataaatttttagcatttaaaaattcactgatgtacattaagccaataaactgctttaatgaataacaaactatgtagtgtgtccctattataaatgcattggagaagtatttttatgagactctttactcaggtgcatggttacagcccacagggaggcatggagtgccatggaaggattcgccactacccagaccttgttttttgttgtattttggaagacaggttttttaaagaaacattttcctcagattaaaagatgatgctattacaactagcattgcctcaaaaactgggaccaaccaaagtgtgtcaaccctgtttccttaaaagaggctatgaatcccaaaggccacatccaagacaggcaataatgagcagagtttacagctcctttaataaaatgtgtcagtaattttaaggtttatagttccctcaacacaattgctaatgcagaatagtgtaaaatgcgcttcaagaatgttgatgatgatgatatagaattgtggctttagtagcacagaggatgccccaacaaactcatggcgttgaaaccacacagttctcattactgttatttattagctgtagcattctctgtctcctctctctcctcctttgaccttctcctcgaccagccatcatgacatttaccatgaatttacttcctcccaagagtttggactgcccgtcagattgtttctgcacatagttgcctttgtatctctgtatgaaataaaaggtcatttgtt

SEQ ID NO: 342089 - DNA, 4621 bp, Homo sapiens
ccactttagtccactttttcaagacaatgctatttcctgagacgtagtactttttctgctaactccattctttgatgcatactttctgtcagtcaatgctgaggatcctcctatggttgtggtccgaaaatttgtccacctgctggaccaaagtgaccaggattttcaggaggagcttgaccttatgaagatgcgggaagaggttatcaccctcattcgttctaaccagcagctggagaatgacctcaatctcatggatatcaaaattggactgctagtgaaaaataagattacgttgcaggatgtggtttcccacagtaaaaaacttaccaaaaaaaataaggaacagttgtctgatatgatgatgataaataaacagaagggaggtctcaaggctttgagcaaggagaagagagagaagttggaagcttaccagcacctgttttatttattgcaaaccaatcccacctatctggccaagctcatttttcagatgccccagaacaagtccaccaagttcatggactctgtaatcttcacactctacaactacgcgtccaaccagcgagaggagtacctgctcctgcggctctttaagacagcactccaagaggaaatcaagtcgaaggtagatcagattcaagagattgtgacaggaaatcctacggttattaaaatggttgtaagtttcaaccgtggtgcccgtggccagaatgccctgagacagatcttggccccagtcgtgaaggaaattatggatgacaaatctctcaacatcaaaactgaccctgtggatatttacaaatcttgggttaatcagatggagtctcagacaggagaggcaagcaaactgccctatgatgtgacccctgagcaggcgctagctcatgaagaagtgaagacacggctagacagctccatcaggaacatgcgggctgtgacagacaagtttctctcagccattgtcagctctgtggacaaaatcccttatgggatgcgcttcattgccaaagtgctgaaggactcgttgcatgagaagttccctgatgctggtgaggatgagctgctgaagattattggtaacttgctttattatcgatacatgaatccagccattgttgctcctgatgcctttgacatcattgacctgtcagcaggaggccagcttaccacagaccaacgccgaaatctgggctccattgcaaaaatgcttcagcatgctgcttccaataagatgtttctgggagataatgcccacttaagcatcattaatgaatatctttcccagtcctaccagaaattcagacggtttttccaaactgcttgtgatgtcccagagcttcaggataaatttaatgtggatgagtactctgatttagtaaccctcaccaaaccagtaatctacatttccattggtgaaatcatcaacacccacactctcctgttggatcaccaggatgccattgctccggagcacaatgatccaatccacgaactgctggacgacctcggcgaggtgcccaccatcgagtccctgataggggaaagctctggcaatttaaatgacccaaataaggaggcactggctaagacggaagtgtctctcaccctgaccaacaagttcgacgtgcctggagatgagaatgcagaaatggatgctcgaaccatcttactgaatacaaaacgtttaattgtggatgtcatccggttccagccaggagagaccttgactgaaatcctagaaacaccagccaccagtgaacaggaagcagaacatcagagagccatgcagagacgtgctatccgtgatgccaaaacacctgacaagatgaaaaagtcaaaatctgtaaaggaagacagcaacctcactcttcaagagaagaaagagaagatccagacaggtttaaagaagctaacagagcttggaaccgtggacccaaagaacaaataccaggaactgatcaacgacattgccagggatattcggaatcagcggaggtaccgacagaggagaaaggccgaactagtgaaactgcaacagacatacgctgctctgaactctaaggccaccttttatggggagcaggtggattactataaaagctatatcaaaacctgcttggataacttagccagcaagggcaaagtctccaaaaagcctagggaaatgaaaggaaagaaaagcaaaaagatttctctgaaatatacagcagcaagactacatgaaaaaggagttcttctggaaattgaggacctgcaagtgaatcagtttaaaaatgttatatttgaaatcagtccaacagaagaagttggagacttcgaagtgaaagccaaattcatgggagttcaaatggagacttttatgttacattatcaggacctgctgcagctacagtatgaaggagttgcagtcatgaaattatttgatagagctaaagtaaatgtcaacctcctgatcttccttctcaacaaaaagttctacgggaagtaattgatcgtttgctgccagcccagaaggatgaaggaaagaagcacctcacagctcctttctaggtccttctttcctcattggaagcaaagacctagccaacaacagcacctcaatctgatacactcccgatgccacatttttaactcctctcgctctgatgggacatttgttacccttttttcatagtgaaattgtgtttcaggcttagtctgacctttctggtttcttcattttcttccattacttaggaaagagtggaaactccactaaaatttctctgtgttgttacagtcttagaggttgcagtactatattgtaagctttggtgtttgtttaattagcaatagggatggtaggattcaaatgtgtgtcatttagaagtggaagctattagcaccaatgacataaatacatacaagacacagaactaaaatgtcatgttattaacagttattaggttgtcatttaaaaataaagttcctttatatttctgtcccatcaggaaaactgaaggatatggggaatcattggttatcttccattgtgtttttctttatggacaggagctaatggaagtgacagtcatgttcaaaggaagcatttctagaaaaaaggagataatgtttttaaatttcattatcaaacttgggcaattctgtttgtgtaactccccgactagtggatgggagagtcccattgctaaaattcagctactcagataaattcagaatgggtcaaggcacctgcctgtttttgttggtgcacagagattgacttgattcagagagacaattcactccatccctatggcagaggaatgggttagccctaatgtagaatgtcattgtttttaaaactgttttatatcttaagagtgccttattaaagtatagatgtatgtcttaaaatgtgggtgataggaattttaaagatttatataatgcatcaaaagccttagaataagaaaagctttttttaaattgctttatctgtatatctgaactcttgaaacttatagctaaaacactaggatttatctgcagtgttgcagggagataattctgccttaaattgtctaaaacaaaaacaaaaccagccaacctatgttacacgtgagattaaaaccaattttttccccattttttctccttttttctcttgctgcccacattgtgcctttattttatgagccccagttttctgggcttagtttaaaaaaaaaatcaagtctaaacattgcatttagaaagcttttgttcttggataaaaagtcatacactttaaaaaaaaaaaaaactttttccaggaaaatatattgaaatcatgctgctgagcctctattttctttctttgatgttttgattcagtattcttttatcataaatttttagcatttaaaaattcactgatgtacattaagccaataaactgctttaatgaataacaaactatgtagtgtgtccctattataaatgcattggagaagtatttttatgagactctttactcaggtgcatggttacagcccacagggaggcatggagtgccatggaaggattcgccactacccagaccttgttttttgttgtattttggaagacaggttttttaaagaaacattttcctcagattaaaagatgatgctattacaactagcattgcctcaaaaactgggaccaaccaaagtgtgtcaaccctgtttccttaaaagaggctatgaatcccaaaggccacatccaagacaggcaataatgagcagagtttacagctcctttaataaaatgtgtcagtaattttaaggtttatagttccctcaacacaattgctaatgcagaatagtgtaaaatgcgcttcaagaatgttgatgatgatgatatagaattgtggctttagtagcacagaggatgccccaacaaactcatggcgttgaaaccacacagttctcattactgttatttattagctgtagcattctctgtctcctctctctcctcctttgaccttctcctcgaccagccatcatgacatttaccatgaatttacttcctcccaagagtttggactgcccgtcagattgtttctgcacatagttgcctttgtatctctgtatgaaataaaaggtcatttgtt

SEQ ID NO: 342090 - DNA, 3134 bp, Homo sapiens
gttggaggattactatttgcctcggcgaggtgcccaccatcgagtccctgataggggaaagctctggcaatttaaatgacccaaataaggaggcactggctaagacggaagtgtctctcaccctgaccaacaagttcgacgtgcctggagatgagaatgcagaaatggatgctcgaaccatcttactgaatacaaaacgtttaattgtggatgtcatccggttccagccaggagagaccttgactgaaatcctagaaacaccagccaccagtgaacaggaagcagaacatcagagagccatgcagagacgtgctatccgtgatgccaaaacacctgacaagatgaaaaagtcaaaatctgtaaaggaagacagcaacctcactcttcaagagaagaaagagaagatccagacaggtttaaagaagctaacagagcttggaaccgtggacccaaagaacaaataccaggaactgatcaacgacattgccagggatattcggaatcagcggaggtaccgacagaggagaaaggccgaactagtgaaactgcaacagacatacgctgctctgaactctaaggccaccttttatggggagcaggtggattactataaaagctatatcaaaacctgcttggataacttagccagcaagggcaaagtctccaaaaagcctagggaaatgaaaggaaagaaaagcaaaaagatttctctgaaatatacagcagcaagactacatgaaaaaggagttcttctggaaattgaggacctgcaagtgaatcagtttaaaaatgttatatttgaaatcagtccaacagaagaagttggagacttcgaagtgaaagccaaattcatgggagttcaaatggagacttttatgttacattatcaggacctgctgcagctacagtatgaaggagttgcagtcatgaaattatttgatagagctaaagtaaatgtcaacctcctgatcttccttctcaacaaaaagttctacgggaagtaattgatcgtttgctgccagcccagaaggatgaaggaaagaagcacctcacagctcctttctaggtccttctttcctcattggaagcaaagacctagccaacaacagcacctcaatctgatacactcccgatgccacatttttaactcctctcgctctgatgggacatttgttacccttttttcatagtgaaattgtgtttcaggcttagtctgacctttctggtttcttcattttcttccattacttaggaaagagtggaaactccactaaaatttctctgtgttgttacagtcttagaggttgcagtactatattgtaagctttggtgtttgtttaattagcaatagggatggtaggattcaaatgtgtgtcatttagaagtggaagctattagcaccaatgacataaatacatacaagacacagaactaaaatgtcatgttattaacagttattaggttgtcatttaaaaataaagttcctttatatttctgtcccatcaggaaaactgaaggatatggggaatcattggttatcttccattgtgtttttctttatggacaggagctaatggaagtgacagtcatgttcaaaggaagcatttctagaaaaaaggagataatgtttttaaatttcattatcaaacttgggcaattctgtttgtgtaactccccgactagtggatgggagagtcccattgctaaaattcagctactcagataaattcagaatgggtcaaggcacctgcctgtttttgttggtgcacagagattgacttgattcagagagacaattcactccatccctatggcagaggaatgggttagccctaatgtagaatgtcattgtttttaaaactgttttatatcttaagagtgccttattaaagtatagatgtatgtcttaaaatgtgggtgataggaattttaaagatttatataatgcatcaaaagccttagaataagaaaagctttttttaaattgctttatctgtatatctgaactcttgaaacttatagctaaaacactaggatttatctgcagtgttgcagggagataattctgccttaaattgtctaaaacaaaaacaaaaccagccaacctatgttacacgtgagattaaaaccaattttttccccattttttctccttttttctcttgctgcccacattgtgcctttattttatgagccccagttttctgggcttagtttaaaaaaaaaatcaagtctaaacattgcatttagaaagcttttgttcttggataaaaagtcatacactttaaaaaaaaaaaaaactttttccaggaaaatatattgaaatcatgctgctgagcctctattttctttctttgatgttttgattcagtattcttttatcataaatttttagcatttaaaaattcactgatgtacattaagccaataaactgctttaatgaataacaaactatgtagtgtgtccctattataaatgcattggagaagtatttttatgagactctttactcaggtgcatggttacagcccacagggaggcatggagtgccatggaaggattcgccactacccagaccttgttttttgttgtattttggaagacaggttttttaaagaaacattttcctcagattaaaagatgatgctattacaactagcattgcctcaaaaactgggaccaaccaaagtgtgtcaaccctgtttccttaaaagaggctatgaatcccaaaggccacatccaagacaggcaataatgagcagagtttacagctcctttaataaaatgtgtcagtaattttaaggtttatagttccctcaacacaattgctaatgcagaatagtgtaaaatgcgcttcaagaatgttgatgatgatgatatagaattgtggctttagtagcacagaggatgccccaacaaactcatggcgttgaaaccacacagttctcattactgttatttattagctgtagcattctctgtctcctctctctcctcctttgaccttctcctcgaccagccatcatgacatttaccatgaatttacttcctcccaagagtttggactgcccgtcagattgtttctgcacatagttgcctttgtatctctgtatgaaataaaaggtcatttgtt

SEQ ID NO: 342091 - DNA, 6624 bp, Homo sapiens
  misc_feature (8)..(8): n is a, c, g, or t
gacggcanggggcggggcctcggggaccccggcaagcccgcgcacttggcaggagctgtagctaccgccgtccgcgcctccaaggtttcacggcttcctcagcagagactcgggctcgtccgccatgtccgccgcagacgaggttgacgggctgggcgtggcccggccgcactatggctctgtcctggataatgaaagacttactgcagaggagatggatgaaaggagacgtcagaacgtggcttatgagtacctttgtcatttggaagaagcgaagaggtggatggaagcatgcctaggggaagatctgcctcccaccacagaactggaggaggggcttaggaatggggtctaccttgccaaactggggaacttcttctctcccaaagtagtgtccctgaaaaaaatctatgatcgagaacagaccagatacaaggcgactggcctccactttagacacactgataatgtgattcagtggttgaatgccatggatgagattggattgcctaagattttttacccagaaactacagatatctatgatcgaaagaacatgccaagatgtatctactgtatccatgcactcagtttgtacctgttcaagctaggcctggcccctcagattcaagacctatatggaaaggttgacttcacagaagaagaaatcaacaacatgaagactgagttggagaagtatggcatccagatgcctgcctttagcaagattgggggcatcttggctaatgaactgtcagtggatgaagccgcattacatgctgctgttattgctattaatgaagctattgaccgtagaattccagccgacacatttgcagctttgaaaaatccgaatgccatgcttgtaaatcttgaagagcccttggcatccacttaccaggatatactttaccaggctaagcaggacaaaatgacaaatgctaaaaacaggacagaaaactcagagagagaaagagatgtttatgaggagctgctcacgcaagctgaaattcaaggcaatataaacaaagtcaatacattttctgcattagcaaatatcgacctggctttagaacaaggagatgcactggccttgttcagggctctgcagtcaccagccctggggcttcgaggactgcagcaacagaatagcgactggtacttgaagcagctcctgagtgataaacagcagaagagacagagtggtcagactgaccccctgcagaaggaggagctgcagtctggagtggatgctgcaaacagtgctgcccagcaatatcagagaagattggcagcagtagcactgattaatgctgcaatccagaagggtgttgctgagaagactgttttggaactgatgaatcccgaagcccagctgccccaggtgtatccatttgccgccgatctctatcagaaggagctggctaccctgcagcgacaaagtcctgaacataatctcacccacccagagctctctgtcgcagtggagatgttgtcatcggtggccctgatcaacagggcattggaatcaggagatgtgaatacagtgtggaagcaattgagcagttcagttactggtcttaccaatattgaggaagaaaactgtcagaggtatctcgatgagttgatgaaactgaaggctcaggcacatgcagagaataatgaattcattacatggaatgatatccaagcttgcgtggaccatgtgaacctggtggtgcaagaggaacatgagaggattttagccattggtttaattaatgaagccctggatgaaggtgatgcccaaaagactctgcaggccctacagattcctgcagctaaacttgagggagtccttgcagaagtggcccagcattaccaagacacgctgattagagcgaagagagagaaagcccaggaaatccaggatgagtcagctgtgttatggttggatgaaattcaaggtggaatctggcagtccaacaaagacacccaagaagcacagaagtttgccttaggaatctttgccattaatgaggcagtagaaagtggtgatgttggcaaaacactgagtgcccttcgctcccctgatgttggcttgtatggagtcatccctgagtgtggtgaaacttaccacagtgatcttgctgaagccaagaagaaaaaactggcagtaggagataataacagcaagtgggtgaagcactgggtaaaaggtggatattattattaccacaatctggagacccaggaaggaggatgggatgaacctccaaattttgtgcaaaattctatgcagctttctcgggaggagatccagagttctatctctggggtgactgccgcatataaccgagaacagctgtggctggccaatgaaggcctgatcaccaggctgcaggctcgctgccgtggatacttagttcgacaggaattccgatccaggatgaatttcctgaagaaacaaatccctgccatcacctgcattcagtcacagtggagaggatacaagcagaagaaggcatatcaagatcggttagcttacctgcgctcccacaaagatgaagttgtaaagattcagtccctggcaaggatgcaccaagctcgaaagcgctatcgagatcgcctgcagtacttccgggaccatataaatgacattatcaaaatccaggcttttattcgggcaaacaaagctcgggatgactacaagactctcatcaatgctgaggatcctcctatggttgtggtccgaaaatttgtccacctgctggaccaaagtgaccaggattttcaggaggagcttgaccttatgaagatgcgggaagaggttatcaccctcattcgttctaaccagcagctggagaatgacctcaatctcatggatatcaaaattggactgctagtgaaaaataagattacgttgcaggatgtggtttcccacagtaaaaaacttaccaaaaaaaataaggaacagttgtctgatatgatgatgataaataaacagaagggaggtctcaaggctttgagcaaggagaagagagagaagttggaagcttaccagcacctgttttatttattgcaaaccaatcccacctatctggccaagctcatttttcagatgccccagaacaagtccaccaagttcatggactctgtaatcttcacactctacaactacgcgtccaaccagcgagaggagtacctgctcctgcggctctttaagacagcactccaagaggaaatcaagtcgaaggtagatcagattcaagagattgtgacaggaaatcctacggttattaaaatggttgtaagtttcaaccgtggtgcccgtggccagaatgccctgagacagatcttggccccagtcgtgaaggaaattatggatgacaaatctctcaacatcaaaactgaccctgtggatatttacaaatcttgggttaatcagatggagtctcagacaggagaggcaagcaaactgccctatgatgtgacccctgagcaggcgctagctcatgaagaagtgaagacacggctagacagctccatcaggaacatgcgggctgtgacagacaagtttctctcagccattgtcagctctgtggacaaaatcccttatgggatgcgcttcattgccaaagtgctgaaggactcgttgcatgagaagttccctgatgctggtgaggatgagctgctgaagattattggtaacttgctttattatcgatacatgaatccagccattgttgctcctgatgcctttgacatcattgacctgtcagcaggaggccagcttaccacagaccaacgccgaaatctgggctccattgcaaaaatgcttcagcatgctgcttccaataagatgtttctgggagataatgcccacttaagcatcattaatgaatatctttcccagtcctaccagaaattcagacggtttttccaaactgcttgtgatgtcccagagcttcaggataaatttaatgtggatgagtactctgatttagtaaccctcaccaaaccagtaatctacatttccattggtgaaatcatcaacacccacactctcctgttggatcaccaggatgccattgctccggagcacaatgatccaatccacgaactgctggacgacctcggcgaggtgcccaccatcgagtccctgataggggaaagctctggcaatttaaatgacccaaataaggaggcactggctaagacggaagtgtctctcaccctgaccaacaagttcgacgtgcctggagatgagaatgcagaaatggatgctcgaaccatcttactgaatacaaaacgtttaattgtggatgtcatccggttccagccaggagagaccttgactgaaatcctagaaacaccagccaccagtgaacaggaagcagaacatcagagagccatgcagagacgtgctatccgtgatgccaaaacacctgacaagatgaaaaagtcaaaatctgtaaaggaagacagcaacctcactcttcaagagaagaaagagaagatccagacaggtttaaagaagctaacagagcttggaaccgtggacccaaagaacaaataccaggaactgatcaacgacattgccagggatattcggaatcagcggaggtaccgacagaggagaaaggccgaactagtgaaactgcaacagacatacgctgctctgaactctaaggccaccttttatggggagcaggtggattactataaaagctatatcaaaacctgcttggataacttagccagcaagggcaaagtctccaaaaagcctagggaaatgaaaggaaagaaaagcaaaaagatttctctgaaatatacagcagcaagactacatgaaaaaggagttcttctggaaattgaggacctgcaagtgaatcagtttaaaaatgttatatttgaaatcagtccaacagaagaagttggagacttcgaagtgaaagccaaattcatgggagttcaaatggagacttttatgttacattatcaggacctgctgcagctacagtatgaaggagttgcagtcatgaaattatttgatagagctaaagtaaatgtcaacctcctgatcttccttctcaacaaaaagttctacgggaagtaattgatcgtttgctgccagcccagaaggatgaaggaaagaagcacctcacagctcctttctaggtccttctttcctcattggaagcaaagacctagccaacaacagcacctcaatctgatacactcccgatgccacatttttaactcctctcgctctgatgggacatttgttacccttttttcatagtgaaattgtgtttcaggcttagtctgacctttctggtttcttcattttcttccattacttaggaaagagtggaaactccactaaaatttctctgtgttgttacagtcttagaggttgcagtactatattgtaagctttggtgtttgtttaattagcaatagggatggtaggattcaaatgtgtgtcatttagaagtggaagctattagcaccaatgacataaatacatacaagacacagaactaaaatgtcatgttattaacagttattaggttgtcatttaaaaataaagttcctttatatttctgtcccatcaggaaaactgaaggatatggggaatcattggttatcttccattgtgtttttctttatggacaggagctaatggaagtgacagtcatgttcaaaggaagcatttctagaaaaaaggagataatgtttttaaatttcattatcaaacttgggcaattctgtttgtgtaactccccgactagtggatgggagagtcccattgctaaaattcagctactcagataaattcagaatgggtcaaggcacctgcctgtttttgttggtgcacagagattgacttgattcagagagacaattcactccatccctatggcagaggaatgggttagccctaatgtagaatgtcattgtttttaaaactgttttatatcttaagagtgccttattaaagtatagatgtatgtcttaaaatgtgggtgataggaattttaaagatttatataatgcatcaaaagccttagaataagaaaagctttttttaaattgctttatctgtatatctgaactcttgaaacttatagctaaaacactaggatttatctgcagtgttgcagggagataattctgccttaaattgtctaaaacaaaaacaaaaccagccaacctatgttacacgtgagattaaaaccaattttttccccattttttctccttttttctcttgctgcccacattgtgcctttattttatgagccccagttttctgggcttagtttaaaaaaaaaatcaagtctaaacattgcatttagaaagcttttgttcttggataaaaagtcatacactttaaaaaaaaaaaaaactttttccaggaaaatatattgaaatcatgctgctgagcctctattttctttctttgatgttttgattcagtattcttttatcataaatttttagcatttaaaaattcactgatgtacattaagccaataaactgctttaatgaataatgacatttaagtggtgtgtctggtatgtatatatgtcatgggggctaatagctcccacttctaaaggacaggggggctacgt

SEQ ID NO: 342092 - DNA, 2297 bp, Homo sapiens
ttgcatgttgagatgacttcacaaacatttttaaataaataaaaaatctggaggacctgctgcagctacagtatgaaggagttgcagtcatgaaattatttgatagagctaaagtaaatgtcaacctcctgatcttccttctcaacaaaaagttctacgggaagtaattgatcgtttgctgccagcccagaaggatgaaggaaagaagcacctcacagctcctttctaggtccttctttcctcattggaagcaaagacctagccaacaacagcacctcaatctgatacactcccgatgccacatttttaactcctctcgctctgatgggacatttgttacccttttttcatagtgaaattgtgtttcaggcttagtctgacctttctggtttcttcattttcttccattacttaggaaagagtggaaactccactaaaatttctctgtgttgttacagtcttagaggttgcagtactatattgtaagctttggtgtttgtttaattagcaatagggatggtaggattcaaatgtgtgtcatttagaagtggaagctattagcaccaatgacataaatacatacaagacacagaactaaaatgtcatgttattaacagttattaggttgtcatttaaaaataaagttcctttatatttctgtcccatcaggaaaactgaaggatatggggaatcattggttatcttccattgtgtttttctttatggacaggagctaatggaagtgacagtcatgttcaaaggaagcatttctagaaaaaaggagataatgtttttaaatttcattatcaaacttgggcaattctgtttgtgtaactccccgactagtggatgggagagtcccattgctaaaattcagctactcagataaattcagaatgggtcaaggcacctgcctgtttttgttggtgcacagagattgacttgattcagagagacaattcactccatccctatggcagaggaatgggttagccctaatgtagaatgtcattgtttttaaaactgttttatatcttaagagtgccttattaaagtatagatgtatgtcttaaaatgtgggtgataggaattttaaagatttatataatgcatcaaaagccttagaataagaaaagctttttttaaattgctttatctgtatatctgaactcttgaaacttatagctaaaacactaggatttatctgcagtgttgcagggagataattctgccttaaattgtctaaaacaaaaacaaaaccagccaacctatgttacacgtgagattaaaaccaattttttccccattttttctccttttttctcttgctgcccacattgtgcctttattttatgagccccagttttctgggcttagtttaaaaaaaaaatcaagtctaaacattgcatttagaaagcttttgttcttggataaaaagtcatacactttaaaaaaaaaaaaaactttttccaggaaaatatattgaaatcatgctgctgagcctctattttctttctttgatgttttgattcagtattcttttatcataaatttttagcatttaaaaattcactgatgtacattaagccaataaactgctttaatgaataacaaactatgtagtgtgtccctattataaatgcattggagaagtatttttatgagactctttactcaggtgcatggttacagcccacagggaggcatggagtgccatggaaggattcgccactacccagaccttgttttttgttgtattttggaagacaggttttttaaagaaacattttcctcagattaaaagatgatgctattacaactagcattgcctcaaaaactgggaccaaccaaagtgtgtcaaccctgtttccttaaaagaggctatgaatcccaaaggccacatccaagacaggcaataatgagcagagtttacagctcctttaataaaatgtgtcagtaattttaaggtttatagttccctcaacacaattgctaatgcagaatagtgtaaaatgcgcttcaagaatgttgatgatgatgatatagaattgtggctttagtagcacagaggatgccccaacaaactcatggcgttgaaaccacacagttctcattactgttatttattagctgtagcattctctgtctcctctctctcctcctttgaccttctcctcgaccagccatcatgacatttaccatgaatttacttcctcccaagagtttggactgcccgtcagattgtttctgcacatagttgcctttgtatctctgtatgaaataaaaggtcatttgtt

SEQ ID NO: 342093 - DNA, 2347 bp, Homo sapiens
ggcaggcctcagtccatctggatccctccctacattgtgtcctttttccttgttccacagacttgattaactgtcaaaatgttttgttttgttttgttaataggacctgctgcagctacagtatgaaggagttgcagtcatgaaattatttgatagagctaaagtaaatgtcaacctcctgatcttccttctcaacaaaaagttctacgggaagtaattgatcgtttgctgccagcccagaaggatgaaggaaagaagcacctcacagctcctttctaggtccttctttcctcattggaagcaaagacctagccaacaacagcacctcaatctgatacactcccgatgccacatttttaactcctctcgctctgatgggacatttgttacccttttttcatagtgaaattgtgtttcaggcttagtctgacctttctggtttcttcattttcttccattacttaggaaagagtggaaactccactaaaatttctctgtgttgttacagtcttagaggttgcagtactatattgtaagctttggtgtttgtttaattagcaatagggatggtaggattcaaatgtgtgtcatttagaagtggaagctattagcaccaatgacataaatacatacaagacacagaactaaaatgtcatgttattaacagttattaggttgtcatttaaaaataaagttcctttatatttctgtcccatcaggaaaactgaaggatatggggaatcattggttatcttccattgtgtttttctttatggacaggagctaatggaagtgacagtcatgttcaaaggaagcatttctagaaaaaaggagataatgtttttaaatttcattatcaaacttgggcaattctgtttgtgtaactccccgactagtggatgggagagtcccattgctaaaattcagctactcagataaattcagaatgggtcaaggcacctgcctgtttttgttggtgcacagagattgacttgattcagagagacaattcactccatccctatggcagaggaatgggttagccctaatgtagaatgtcattgtttttaaaactgttttatatcttaagagtgccttattaaagtatagatgtatgtcttaaaatgtgggtgataggaattttaaagatttatataatgcatcaaaagccttagaataagaaaagctttttttaaattgctttatctgtatatctgaactcttgaaacttatagctaaaacactaggatttatctgcagtgttgcagggagataattctgccttaaattgtctaaaacaaaaacaaaaccagccaacctatgttacacgtgagattaaaaccaattttttccccattttttctccttttttctcttgctgcccacattgtgcctttattttatgagccccagttttctgggcttagtttaaaaaaaaaatcaagtctaaacattgcatttagaaagcttttgttcttggataaaaagtcatacactttaaaaaaaaaaaaaactttttccaggaaaatatattgaaatcatgctgctgagcctctattttctttctttgatgttttgattcagtattcttttatcataaatttttagcatttaaaaattcactgatgtacattaagccaataaactgctttaatgaataacaaactatgtagtgtgtccctattataaatgcattggagaagtatttttatgagactctttactcaggtgcatggttacagcccacagggaggcatggagtgccatggaaggattcgccactacccagaccttgttttttgttgtattttggaagacaggttttttaaagaaacattttcctcagattaaaagatgatgctattacaactagcattgcctcaaaaactgggaccaaccaaagtgtgtcaaccctgtttccttaaaagaggctatgaatcccaaaggccacatccaagacaggcaataatgagcagagtttacagctcctttaataaaatgtgtcagtaattttaaggtttatagttccctcaacacaattgctaatgcagaatagtgtaaaatgcgcttcaagaatgttgatgatgatgatatagaattgtggctttagtagcacagaggatgccccaacaaactcatggcgttgaaaccacacagttctcattactgttatttattagctgtagcattctctgtctcctctctctcctcctttgaccttctcctcgaccagccatcatgacatttaccatgaatttacttcctcccaagagtttggactgcccgtcagattgtttctgcacatagttgcctttgtatctctgtatgaaataaaaggtcatttgtt

SEQ ID NO: 342094 - DNA, 2303 bp, Homo sapiens
  misc_feature (19)..(19): n is a, c, g, or t
ccccgggctgcaggaattnggcacgaggttcaaatggagcgtttaatgttacattatcagacctgctgcagctacagtatgaaggagttgcagtcatgaaattatttgatagagctaaagtaaatgtcaacctcctgatcttccttctcaacaaaaagttctacgggaagtaattgatcgtttgctgccagcccagaaggatgaaggaaagaagcacctcacagctcctttctaggtccttctttcctcattggaagcaaagacctagccaacaacagcacctcaatctgatacactcccgatgccacatttttaactcctctcgctctgatgggacatttgttacccttttttcatagtgaaattgtgtttcaggcttagtctgacctttctggtttcttcattttcttccattacttaggaaagagtggaaactccactaaaatttctctgtgttgttacagtcttagaggttgcagtactatattgtaagctttggtgtttgtttaattagcaatagggatggtaggattcaaatgtgtgtcatttagaagtggaagctattagcaccaatgacataaatacatacaagacacagaactaaaatgtcatgttattaacagttattaggttgtcatttaaaaataaagttcctttatatttctgtcccatcaggaaaactgaaggatatggggaatcattggttatcttccattgtgtttttctttatggacaggagctaatggaagtgacagtcatgttcaaaggaagcatttctagaaaaaaggagataatgtttttaaatttcattatcaaacttgggcaattctgtttgtgtaactccccgactagtggatgggagagtcccattgctaaaattcagctactcagataaattcagaatgggtcaaggcacctgcctgtttttgttggtgcacagagattgacttgattcagagagacaattcactccatccctatggcagaggaatgggttagccctaatgtagaatgtcattgtttttaaaactgttttatatcttaagagtgccttattaaagtatagatgtatgtcttaaaatgtgggtgataggaattttaaagatttatataatgcatcaaaagccttagaataagaaaagctttttttaaattgctttatctgtatatctgaactcttgaaacttatagctaaaacactaggatttatctgcagtgttgcagggagataattctgccttaaattgtctaaaacaaaaacaaaaccagccaacctatgttacacgtgagattaaaaccaattttttccccattttttctccttttttctcttgctgcccacattgtgcctttattttatgagccccagttttctgggcttagtttaaaaaaaaaatcaagtctaaacattgcatttagaaagcttttgttcttggataaaaagtcatacactttaaaaaaaaaaaaaactttttccaggaaaatatattgaaatcatgctgctgagcctctattttctttctttgatgttttgattcagtattcttttatcataaatttttagcatttaaaaattcactgatgtacattaagccaataaactgctttaatgaataacaaactatgtagtgtgtccctattataaatgcattggagaagtatttttatgagactctttactcaggtgcatggttacagcccacagggaggcatggagtgccatggaaggattcgccactacccagaccttgttttttgttgtattttggaagacaggttttttaaagaaacattttcctcagattaaaagatgatgctattacaactagcattgcctcaaaaactgggaccaaccaaagtgtgtcaaccctgtttccttaaaagaggctatgaatcccaaaggccacatccaagacaggcaataatgagcagagtttacagctcctttaataaaatgtgtcagtaattttaaggtttatagttccctcaacacaattgctaatgcagaatagtgtaaaatgcgcttcaagaatgttgatgatgatgatatagaattgtggctttagtagcacagaggatgccccaacaaactcatggcgttgaaaccacacagttctcattactgttatttattagctgtagcattctctgtctcctctctctcctcctttgaccttctcctcgaccagccatcatgacatttaccatgaatttacttcctcccaagagtttggactgcccgtcagattgtttctgcacatagttgcctttgtatctctgtatgaaataaaaggtcatttgtt

SEQ ID NO: 342095 - DNA, 1912 bp, Homo sapiens
  misc_feature (19)..(19): n is a, c, g, or t
ccccgggctgcaggaattnggcacgattaggaaagagtggaaactccactaaaatttctctgtgttgttacagtcttagaggttgcagtactatattgtaagctttggtgtttgtttaattagcaatagggatggtaggattcaaatgtgtgtcatttagaagtggaagctattagcaccaatgacataaatacatacaagacacagaactaaaatgtcatgttattaacagttattaggttgtcatttaaaaataaagttcctttatatttctgtcccatcaggaaaactgaaggatatggggaatcattggttatcttccattgtgtttttctttatggacaggagctaatggaagtgacagtcatgttcaaaggaagcatttctagaaaaaaggagataatgtttttaaatttcattatcaaacttgggcaattctgtttgtgtaactccccgactagtggatgggagagtcccattgctaaaattcagctactcagataaattcagaatgggtcaaggcacctgcctgtttttgttggtgcacagagattgacttgattcagagagacaattcactccatccctatggcagaggaatgggttagccctaatgtagaatgtcattgtttttaaaactgttttatatcttaagagtgccttattaaagtatagatgtatgtcttaaaatgtgggtgataggaattttaaagatttatataatgcatcaaaagccttagaataagaaaagctttttttaaattgctttatctgtatatctgaactcttgaaacttatagctaaaacactaggatttatctgcagtgttgcagggagataattctgccttaaattgtctaaaacaaaaacaaaaccagccaacctatgttacacgtgagattaaaaccaattttttccccattttttctccttttttctcttgctgcccacattgtgcctttattttatgagccccagttttctgggcttagtttaaaaaaaaaatcaagtctaaacattgcatttagaaagcttttgttcttggataaaaagtcatacactttaaaaaaaaaaaaaactttttccaggaaaatatattgaaatcatgctgctgagcctctattttctttctttgatgttttgattcagtattcttttatcataaatttttagcatttaaaaattcactgatgtacattaagccaataaactgctttaatgaataacaaactatgtagtgtgtccctattataaatgcattggagaagtatttttatgagactctttactcaggtgcatggttacagcccacagggaggcatggagtgccatggaaggattcgccactacccagaccttgttttttgttgtattttggaagacaggttttttaaagaaacattttcctcagattaaaagatgatgctattacaactagcattgcctcaaaaactgggaccaaccaaagtgtgtcaaccctgtttccttaaaagaggctatgaatcccaaaggccacatccaagacaggcaataatgagcagagtttacagctcctttaataaaatgtgtcagtaattttaaggtttatagttccctcaacacaattgctaatgcagaatagtgtaaaatgcgcttcaagaatgttgatgatgatgatatagaattgtggctttagtagcacagaggatgccccaacaaactcatggcgttgaaaccacacagttctcattactgttatttattagctgtagcattctctgtctcctctctctcctcctttgaccttctcctcgaccagccatcatgacatttaccatgaatttacttcctcccaagagtttggactgcccgtcagattgtttctgcacatagttgcctttgtatctctgtatgaaataaaaggtcatttgtt

SEQ ID NO: 342096 - DNA, 1773 bp, Homo sapiens
accacagtgacagatagaatcgagctggtactattagcaccaatgacataaatacatacaagacacagaactaaaatgtcatgttattaacagttattaggttgtcatttaaaaataaagttcctttatatttctgtcccatcaggaaaactgaaggatatggggaatcattggttatcttccattgtgtttttctttatggacaggagctaatggaagtgacagtcatgttcaaaggaagcatttctagaaaaaaggagataatgtttttaaatttcattatcaaacttgggcaattctgtttgtgtaactccccgactagtggatgggagagtcccattgctaaaattcagctactcagataaattcagaatgggtcaaggcacctgcctgtttttgttggtgcacagagattgacttgattcagagagacaattcactccatccctatggcagaggaatgggttagccctaatgtagaatgtcattgtttttaaaactgttttatatcttaagagtgccttattaaagtatagatgtatgtcttaaaatgtgggtgataggaattttaaagatttatataatgcatcaaaagccttagaataagaaaagctttttttaaattgctttatctgtatatctgaactcttgaaacttatagctaaaacactaggatttatctgcagtgttgcagggagataattctgccttaaattgtctaaaacaaaaacaaaaccagccaacctatgttacacgtgagattaaaaccaattttttccccattttttctccttttttctcttgctgcccacattgtgcctttattttatgagccccagttttctgggcttagtttaaaaaaaaaatcaagtctaaacattgcatttagaaagcttttgttcttggataaaaagtcatacactttaaaaaaaaaaaaaactttttccaggaaaatatattgaaatcatgctgctgagcctctattttctttctttgatgttttgattcagtattcttttatcataaatttttagcatttaaaaattcactgatgtacattaagccaataaactgctttaatgaataacaaactatgtagtgtgtccctattataaatgcattggagaagtatttttatgagactctttactcaggtgcatggttacagcccacagggaggcatggagtgccatggaaggattcgccactacccagaccttgttttttgttgtattttggaagacaggttttttaaagaaacattttcctcagattaaaagatgatgctattacaactagcattgcctcaaaaactgggaccaaccaaagtgtgtcaaccctgtttccttaaaagaggctatgaatcccaaaggccacatccaagacaggcaataatgagcagagtttacagctcctttaataaaatgtgtcagtaattttaaggtttatagttccctcaacacaattgctaatgcagaatagtgtaaaatgcgcttcaagaatgttgatgatgatgatatagaattgtggctttagtagcacagaggatgccccaacaaactcatggcgttgaaaccacacagttctcattactgttatttattagctgtagcattctctgtctcctctctctcctcctttgaccttctcctcgaccagccatcatgacatttaccatgaatttacttcctcccaagagtttggactgcccgtcagattgtttctgcacatagttgcctttgtatctctgtatgaaataaaaggtcatttgtt

SEQ ID NO: 342097 - DNA, 6576 bp, Homo sapiens
  misc_feature (6499)..(6499): n is a, c, g, or t
ggtattaaaactgatcttttgacatttttgacaatgttcttataaattactttcttttttatcatatatggatgggatgaagcacagagtaagatagagtgcacagcaaaggggatctgcccctcctatctgtccaataccccacaggttttggtgataatcttgggcaatgttccagtcaaacctgcctcccacttctcactaaagttagtgaacatgtgacccacattccccaaataagagcctcttataaactccattcttggctttttcattcatagagatagctattttatgagacatagataaagcattttttagtgatgtgcacgatgccttttttcttaattattaacttctcaaaacataaacacattggaggcacttaataaagggagctgtagctaccgccgtccgcgcctccaaggtttcacggcttcctcagcagagactcgggctcgtccgccatgtccgccgcagacgaggttgacgggctgggcgtggcccggccgcactatggctctgtcctggataatgaaagacttactgcagaggagatggatgaaaggagacgtcagaacgtggcttatgagtacctttgtcatttggaagaagcgaagaggtggatggaagcatgcctaggggaagatctgcctcccaccacagaactggaggaggggcttaggaatggggtctaccttgccaaactggggaacttcttctctcccaaagtagtgtccctgaaaaaaatctatgatcgagaacagaccagatacaaggcgactggcctccactttagacacactgataatgtgattcagtggttgaatgccatggatgagattggattgcctaagattttttacccagaaactacagatatctatgatcgaaagaacatgccaagatgtatctactgtatccatgcactcagtttgtacctgttcaagctaggcctggcccctcagattcaagacctatatggaaaggttgacttcacagaagaagaaatcaacaacatgaagactgagttggagaagtatggcatccagatgcctgcctttagcaagattgggggcatcttggctaatgaactgtcagtggatgaagccgcattacatgctgctgttattgctattaatgaagctattgaccgtagaattccagccgacacatttgcagctttgaaaaatccgaatgccatgcttgtaaatcttgaagagcccttggcatccacttaccaggatatactttaccaggctaagcaggacaaaatgacaaatgctaaaaacaggacagaaaactcagagagagaaagagatgtttatgaggagctgctcacgcaagctgaaattcaaggcaatataaacaaagtcaatacattttctgcattagcaaatatcgacctggctttagaacaaggagatgcactggccttgttcagggctctgcagtcaccagccctggggcttcgaggactgcagcaacagaatagcgactggtacttgaagcagctcctgagtgataaacagcagaagagacagagtggtcagactgaccccctgcagaaggaggagctgcagtctggagtggatgctgcaaacagtgctgcccagcaatatcagagaagattggcagcagtagcactgattaatgctgcaatccagaagggtgttgctgagaagactgttttggaactgatgaatcccgaagcccagctgccccaggtgtatccatttgccgccgatctctatcagaaggagctggctaccctgcagcgacaaagtcctgaacataatctcacccacccagagctctctgtcgcagtggagatgttgtcatcggtggccctgatcaacagggcattggaatcaggagatgtgaatacagtgtggaagcaattgagcagttcagttactggtcttaccaatattgaggaagaaaactgtcagaggtatctcgatgagttgatgaaactgaaggctcaggcacatgcagagaataatgaattcattacatggaatgatatccaagcttgcgtggaccatgtgaacctggtggtgcaagaggaacatgagaggattttagccattggtttaattaatgaagccctggatgaaggtgatgcccaaaagactctgcaggccctacagattcctgcagctaaacttgagggagtccttgcagaagtggcccagcattaccaagacacgctgattagagcgaagagagagaaagcccaggaaatccaggatgagtcagctgtgttatggttggatgaaattcaaggtggaatctggcagtccaacaaagacacccaagaagcacagaagtttgccttaggaatctttgccattaatgaggcagtagaaagtggtgatgttggcaaaacactgagtgcccttcgctcccctgatgttggcttgtatggagtcatccctgagtgtggtgaaacttaccacagtgatcttgctgaagccaagaagaaaaaactggcagtaggagataataacagcaagtgggtgaagcactgggtaaaaggtggatattattattaccacaatctggagacccaggaaggaggatgggatgaacctccaaattttgtgcaaaattctatgcagctttctcgggaggagatccagagttctatctctggggtgactgccgcatataaccgagaacagctgtggctggccaatgaaggcctgatcaccaggctgcaggctcgctgccgtggatacttagttcgacaggaattccgatccaggatgaatttcctgaagaaacaaatccctgccatcacctgcattcagtcacagtggagaggatacaagcagaagaaggcatatcaagatcggttagcttacctgcgctcccacaaagatgaagttgtaaagattcagtccctggcaaggatgcaccaagctcgaaagcgctatcgagatcgcctgcagtacttccgggaccatataaatgacattatcaaaatccaggcttttattcgggcaaacaaagctcgggatgactacaagactctcatcaatgctgaggatcctcctatggttgtggtccgaaaatttgtccacctgctggaccaaagtgaccaggattttcaggaggagcttgaccttatgaagatgcgggaagaggttatcaccctcattcgttctaaccagcagctggagaatgacctcaatctcatggatatcaaaattggactgctagtgaaaaataagattacgttgcaggatgtggtttcccacagtaaaaaacttaccaaaaaaaataaggaacagttgtctgatatgatgatgataaataaacagaagggaggtctcaaggctttgagcaaggagaagagagagaagttggaagcttaccagcacctgttttatttattgcaaaccaatcccacctatctggccaagctcatttttcagatgccccagaacaagtccaccaagttcatggactctgtaatcttcacactctacaactacgcgtccaaccagcgagaggagtacctgctcctgcggctctttaagacagcactccaagaggaaatcaagtcgaaggtagatcagattcaagagattgtgacaggaaatcctacggttattaaaatggttgtaagtttcaaccgtggtgcccgtggccagaatgccctgagacagatcttggccccagtcgtgaaggaaattatggatgacaaatctctcaacatcaaaactgaccctgtggatatttacaaatcttgggttaatcagatggagtctcagacaggagaggcaagcaaactgccctatgatgtgacccctgagcaggcgctagctcatgaagaagtgaagacacggctagacagctccatcaggaacatgcgggctgtgacagacaagtttctctcagccattgtcagctctgtggacaaaatcccttatgggatgcgcttcattgccaaagtgctgaaggactcgttgcatgagaagttccctgatgctggtgaggatgagctgctgaagattattggtaacttgctttattatcgatacatgaatccagccattgttgctcctgatgcctttgacatcattgacctgtcagcaggaggccagcttaccacagaccaacgccgaaatctgggctccattgcaaaaatgcttcagcatgctgcttccaataagatgtttctgggagataatgcccacttaagcatcattaatgaatatctttcccagtcctaccagaaattcagacggtttttccaaactgcttgtgatgtcccagagcttcaggataaatttaatgtggatgagtactctgatttagtaaccctcaccaaaccagtaatctacatttccattggtgaaatcatcaacacccacactctcctgttggatcaccaggatgccattgctccggagcacaatgatccaatccacgaactgctggacgacctcggcgaggtgcccaccatcgagtccctgataggggaaagctctggcaatttaaatgacccaaataaggaggcactggctaagacggaagtgtctctcaccctgaccaacaagttcgacgtgcctggagatgagaatgcagaaatggatgctcgaaccatcttactgaatacaaaacgtttaattgtggatgtcatccggttccagccaggagagaccttgactgaaatcctagaaacaccagccaccagtgaacaggaagcagaacatcagagagccatgcagagacgtgctatccgtgatgccaaaacacctgacaagatgaaaaagtcaaaatctgtaaaggaagacagcaacctcactcttcaagagaagaaagagaagatccagacaggtttaaagaagctaacagagcttggaaccgtggacccaaagaacaaataccaggaactgatcaacgacattgccagggatattcggaatcagcggaggtaccgacagaggagaaaggccgaactagtgaaactgcaacagacatacgctgctctgaactctaaggccaccttttatggggagcaggtggattactataaaagctatatcaaaacctgcttggataacttagccagcaagggcaaagtctccaaaaagcctagggaaatgaaaggaaagaaaagcaaaaagatttctctgaaatatacagcagcaagactacatgaaaaaggagttcttctggaaattgaggacctgcaagtgaatcagtttaaaaatgttatatttgaaatcagtccaacagaagaagttggagacttcgaagtgaaagccaaattcatgggagttcaaatggagacttttatgttacattatcaggacctgctgcagctacagtatgaaggagttgcagtcatgaaattatttgatagagctaaagtaaatgtcaacctcctgatcttccttctcaacaaaaagttctacgggaagtaattgatcgtttgctgccagcccagaaggatgaaggaaagaagcacctcacagctcctttctaggtccttctttcctcattggaagcaaagacctagccaacaacagcacctcaatctgatacactcccgatgccacatttttaactcctctcgctctgatgggacatttgttacccttttttcatagtgaaattgtgtttcaggcttagtctgacctttctggtttcttcattttcttccattacttaggaaagagtggaaactccactaaaatttctctgtgttgttacagtcttagaggttgcagtactatattgtaagctttggtgtttgtttaattagcaatagggatggtaggattcaaatgtgtgtcatttagaagtggaagctattagcaccaatgacataaatacatacaagacacagaactaaaatgtcatgttattaacagttattaggttgtcatttaaaaataaagttcctttatatttctgtcccatcaggaaaactgaaggatatggggaatcattggttatcttccattgtgtttttctttatggacaggagctaatggaagtgacagtcatgttcaaaggaagcatttctagaaaaaaggagataatgtttttaaatttcattatcaaacttgggcaattctgtttgtgtaactccccgactagtggatgggagagtcccattgctaaaattcagctactcagataaattcagaatgggtcaaggcacctgcctgtttttgttggtgcacagagattgacttgattcagagagacaattcactccatccctatggcagaggaatgggttagccctaatgtagaatgtcattgtttttaaaactgttttatatcttaagagtgccttattaaagtatagatgtatgtcttaaaatgtgggtgataggaattttaaagatttatataatgcatcaaaagccttagaataggctttttaaatggtaatcggaattcgaactctgaactatgctaaactaggataacgcgggtaggggaatattgcttatgggtaaacaaacacagnccctattcggtgaataacatttgccctgttccttatatgggcacggcttttaaccgtcgggttgaaacactgttgtg

SEQ ID NO: 342098 - DNA, 852 bp, Homo sapiens
cggacgcgtgggtcgacccacgcgtcgggaaaatatattgaaatcatgctgctgagcctctattttctttctttgatgttttgattcagtattcttttatcataaatttttagcatttaaaaattcactgatgtacattaagccaataaactgctttaatgaataacaaactatgtagtgtgtccctattataaatgcattggagaagtatttttatgagactctttactcaggtgcatggttacagcccacagggaggcatggagtgccatggaaggattcgccactacccagaccttgttttttgttgtattttggaagacaggttttttaaagaaacattttcctcagattaaaagatgatgctattacaactagcattgcctcaaaaactgggaccaaccaaagtgtgtcaaccctgtttccttaaaagaggctatgaatcccaaaggccacatccaagacaggcaataatgagcagagtttacagctcctttaataaaatgtgtcagtaattttaaggtttatagttccctcaacacaattgctaatgcagaatagtgtaaaatgcgcttcaagaatgttgatgatgatgatatagaattgtggctttagtagcacagaggatgccccaacaaactcatggcgttgaaaccacacagttctcattactgttatttattagctgtagcattctctgtctcctctctctcctcctttgaccttctcctcgaccagccatcatgacatttaccatgaatttacttcctcccaagagtttggactgcccgtcagattgtttctgcacatagttgcctttgtatctctgtatgaaataaaaggtcatttgtt

SEQ ID NO: 342099 - DNA, 5687 bp, Homo sapiens
ggtattaaaactgatcttttgacatttttgacaatgttcttataaattactttcttttttatcatatatggatgggatgaagcacagagtaagatagagtgcacagcaaaggggatctgcccctcctatctgtccaataccccacaggttttggtgataatcttgggcaatgttccagtcaaacctgcctcccacttctcactaaagttagtgaacatgtgacccacattccccaaataagagcctcttataaactccattcttggctttttcattcatagagatagctattttatgagacatagataaagcattttttagtgatgtgcacgatgccttttttcttaattattaacttctcaaaacataaacacattggaggcacttaataaagggagctgtagctaccgccgtccgcgcctccaaggtttcacggcttcctcagcagagactcgggctcgtccgccatgtccgccgcagacgaggttgacgggctgggcgtggcccggccgcactatggctctgtcctggataatgaaagacttactgcagaggagatggatgaaaggagacgtcagaacgtggcttatgagtacctttgtcatttggaagaagcgaagaggtggatggaagcatgcctaggggaagatctgcctcccaccacagaactggaggaggggcttaggaatggggtctaccttgccaaactggggaacttcttctctcccaaagtagtgtccctgaaaaaaatctatgatcgagaacagaccagatacaaggcgactggcctccactttagacacactgataatgtgattcagtggttgaatgccatggatgagattggattgcctaagattttttacccagaaactacagatatctatgatcgaaagaacatgccaagatgtatctactgtatccatgcactcagtttgtacctgttcaagctaggcctggcccctcagattcaagacctatatggaaaggttgacttcacagaagaagaaatcaacaacatgaagactgagttggagaagtatggcatccagatgcctgcctttagcaagattgggggcatcttggctaatgaactgtcagtggatgaagccgcattacatgctgctgttattgctattaatgaagctattgaccgtagaattccagccgacacatttgcagctttgaaaaatccgaatgccatgcttgtaaatcttgaagagcccttggcatccacttaccaggatatactttaccaggctaagcaggacaaaatgacaaatgctaaaaacaggacagaaaactcagagagagaaagagatgtttatgaggagctgctcacgcaagctgaaattcaaggcaatataaacaaagtcaatacattttctgcattagcaaatatcgacctggctttagaacaaggagatgcactggccttgttcagggctctgcagtcaccagccctggggcttcgaggactgcagcaacagaatagcgactggtacttgaagcagctcctgagtgataaacagcagaagagacagagtggtcagactgaccccctgcagaaggaggagctgcagtctggagtggatgctgcaaacagtgctgcccagcaatatcagagaagattggcagcagtagcactgattaatgctgcaatccagaagggtgttgctgagaagactgttttggaactgatgaatcccgaagcccagctgccccaggtgtatccatttgccgccgatctctatcagaaggagctggctaccctgcagcgacaaagtcctgaacataatctcacccacccagagctctctgtcgcagtggagatgttgtcatcggtggccctgatcaacagggcattggaatcaggagatgtgaatacagtgtggaagcaattgagcagttcagttactggtcttaccaatattgaggaagaaaactgtcagaggtatctcgatgagttgatgaaactgaaggctcaggcacatgcagagaataatgaattcattacatggaatgatatccaagcttgcgtggaccatgtgaacctggtggtgcaagaggaacatgagaggattttagccattggtttaattaatgaagccctggatgaaggtgatgcccaaaagactctgcaggccctacagattcctgcagctaaacttgagggagtccttgcagaagtggcccagcattaccaagacacgctgattagagcgaagagagagaaagcccaggaaatccaggatgagtcagctgtgttatggttggatgaaattcaaggtggaatctggcagtccaacaaagacacccaagaagcacagaagtttgccttaggaatctttgccattaatgaggcagtagaaagtggtgatgttggcaaaacactgagtgcccttcgctcccctgatgttggcttgtatggagtcatccctgagtgtggtgaaacttaccacagtgatcttgctgaagccaagaagaaaaaactggcagtaggagataataacagcaagtgggtgaagcactgggtaaaaggtggatattattattaccacaatctggagacccaggaaggaggatgggatgaacctccaaattttgtgcaaaattctatgcagctttctcgggaggagatccagagttctatctctggggtgactgccgcatataaccgagaacagctgtggctggccaatgaaggcctgatcaccaggctgcaggctcgctgccgtggatacttagttcgacaggaattccgatccaggatgaatttcctgaagaaacaaatccctgccatcacctgcattcagtcacagtggagaggatacaagcagaagaaggcatatcaagatcggttagcttacctgcgctcccacaaagatgaagttgtaaagattcagtccctggcaaggatgcaccaagctcgaaagcgctatcgagatcgcctgcagtacttccgggaccatataaatgacattatcaaaatccaggcttttattcgggcaaacaaagctcgggatgactacaagactctcatcaatgctgaggatcctcctatggttgtggtccgaaaatttgtccacctgctggaccaaagtgaccaggattttcaggaggagcttgaccttatgaagatgcgggaagaggttatcaccctcattcgttctaaccagcagctggagaatgacctcaatctcatggatatcaaaattggactgctagtgaaaaataagattacgttgcaggatgtggtttcccacagtaaaaaacttaccaaaaaaaataaggaacagttgtctgatatgatgatgataaataaacagaagggaggtctcaaggctttgagcaaggagaagagagagaagttggaagcttaccagcacctgttttatttattgcaaaccaatcccacctatctggccaagctcatttttcagatgccccagaacaagtccaccaagttcatggactctgtaatcttcacactctacaactacgcgtccaaccagcgagaggagtacctgctcctgcggctctttaagacagcactccaagaggaaatcaagtcgaaggtagatcagattcaagagattgtgacaggaaatcctacggttattaaaatggttgtaagtttcaaccgtggtgcccgtggccagaatgccctgagacagatcttggccccagtcgtgaaggaaattatggatgacaaatctctcaacatcaaaactgaccctgtggatatttacaaatcttgggttaatcagatggagtctcagacaggagaggcaagcaaactgccctatgatgtgacccctgagcaggcgctagctcatgaagaagtgaagacacggctagacagctccatcaggaacatgcgggctgtgacagacaagtttctctcagccattgtcagctctgtggacaaaatcccttatgggatgcgcttcattgccaaagtgctgaaggactcgttgcatgagaagttccctgatgctggtgaggatgagctgctgaagattattggtaacttgctttattatcgatacatgaatccagccattgttgctcctgatgcctttgacatcattgacctgtcagcaggaggccagcttaccacagaccaacgccgaaatctgggctccattgcaaaaatgcttcagcatgctgcttccaataagatgtttctgggagataatgcccacttaagcatcattaatgaatatctttcccagtcctaccagaaattcagacggtttttccaaactgcttgtgatgtcccagagcttcaggataaatttaatgtggatgagtactctgatttagtaaccctcaccaaaccagtaatctacatttccattggtgaaatcatcaacacccacactctcctgttggatcaccaggatgccattgctccggagcacaatgatccaatccacgaactgctggacgacctcggcgaggtgcccaccatcgagtccctgataggggaaagctctggcaatttaaatgacccaaataaggaggcactggctaagacggaagtgtctctcaccctgaccaacaagttcgacgtgcctggagatgagaatgcagaaatggatgctcgaaccatcttactgaatacaaaacgtttaattgtggatgtcatccggttccagccaggagagaccttgactgaaatcctagaaacaccagccaccagtgaacaggaagcagaacatcagagagccatgcagagacgtgctatccgtgatgccaaaacacctgacaagatgaaaaagtcaaaatctgtaaaggaagacagcaacctcactcttcaagagaagaaagagaagatccagacaggtttaaagaagctaacagagcttggaaccgtggacccaaagaacaaataccaggaactgatcaacgacattgccagggatattcggaatcagcggaggtaccgacagaggagaaaggccgaactagtgaaactgcaacagacatacgctgctctgaactctaaggccaccttttatggggagcaggtggattactataaaagctatatcaaaacctgcttggataacttagccagcaagggcaaagtctccaaaaagcctagggaaatgaaaggaaagaaaagcaaaaagatttctctgaaatatacagcagcaagactacatgaaaaaggagttcttctggaaattgaggacctgcaagtgaatcagtttaaaaatgttatatttgaaatcagtccaacagaagaagttggagacttcgaagtgaaagccaaattcatgggagttcaaatggagacttttatgttacattatcaggacctgctgcagctacagtatgaaggagttgcagtcatgaaattatttgatagagctaaagtaaatgtcaacctcctgatcttccttctcaacaaaaagttctacgggaagtaattgatcgtttgctgccagcccagaaggatgaaggaaagaagcacctcacagctcctttctaggtccttctttcctcattggaagtactctatggacattgtaccttcttatatgaattggttcagctatctacctcctgctcgtatttcttcatactataacaatgaaactcctaaattctttgtgtacacttaaagttcagcttattgaactatactcgtaatacctaactcgagatcaattcct

SEQ ID NO: 342100 - DNA, 5073 bp, Homo sapiens
ggtattaaaactgatcttttgacatttttgacaatgttcttataaattactttcttttttatcatatatggatgggatgaagcacagagtaagatagagtgcacagcaaaggggatctgcccctcctatctgtccaataccccacaggttttggtgataatcttgggcaatgttccagtcaaacctgcctcccacttctcactaaagttagtgaacatgtgacccacattccccaaataagagcctcttataaactccattcttggctttttcattcatagagatagctattttatgagacatagataaagcattttttagtgatgtgcacgatgccttttttcttaattattaacttctcaaaacataaacacattggaggcacttaataaagggagctgtagctaccgccgtccgcgcctccaaggtttcacggcttcctcagcagagactcgggctcgtccgccatgtccgccgcagacgaggttgacgggctgggcgtggcccggccgcactatggctctgtcctggataatgaaagacttactgcagaggagatggatgaaaggagacgtcagaacgtggcttatgagtacctttgtcatttggaagaagcgaagaggtggatggaagcatgcctaggggaagatctgcctcccaccacagaactggaggaggggcttaggaatggggtctaccttgccaaactggggaacttcttctctcccaaagtagtgtccctgaaaaaaatctatgatcgagaacagaccagatacaaggcgactggcctccactttagacacactgataatgtgattcagtggttgaatgccatggatgagattggattgcctaagattttttacccagaaactacagatatctatgatcgaaagaacatgccaagatgtatctactgtatccatgcactcagtttgtacctgttcaagctaggcctggcccctcagattcaagacctatatggaaaggttgacttcacagaagaagaaatcaacaacatgaagactgagttggagaagtatggcatccagatgcctgcctttagcaagattgggggcatcttggctaatgaactgtcagtggatgaagccgcattacatgctgctgttattgctattaatgaagctattgaccgtagaattccagccgacacatttgcagctttgaaaaatccgaatgccatgcttgtaaatcttgaagagcccttggcatccacttaccaggatatactttaccaggctaagcaggacaaaatgacaaatgctaaaaacaggacagaaaactcagagagagaaagagatgtttatgaggagctgctcacgcaagctgaaattcaaggcaatataaacaaagtcaatacattttctgcattagcaaatatcgacctggctttagaacaaggagatgcactggccttgttcagggctctgcagtcaccagccctggggcttcgaggactgcagcaacagaatagcgactggtacttgaagcagctcctgagtgataaacagcagaagagacagagtggtcagactgaccccctgcagaaggaggagctgcagtctggagtggatgctgcaaacagtgctgcccagcaatatcagagaagattggcagcagtagcactgattaatgctgcaatccagaagggtgttgctgagaagactgttttggaactgatgaatcccgaagcccagctgccccaggtgtatccatttgccgccgatctctatcagaaggagctggctaccctgcagcgacaaagtcctgaacataatctcacccacccagagctctctgtcgcagtggagatgttgtcatcggtggccctgatcaacagggcattggaatcaggagatgtgaatacagtgtggaagcaattgagcagttcagttactggtcttaccaatattgaggaagaaaactgtcagaggtatctcgatgagttgatgaaactgaaggctcaggcacatgcagagaataatgaattcattacatggaatgatatccaagcttgcgtggaccatgtgaacctggtggtgcaagaggaacatgagaggattttagccattggtttaattaatgaagccctggatgaaggtgatgcccaaaagactctgcaggccctacagattcctgcagctaaacttgagggagtccttgcagaagtggcccagcattaccaagacacgctgattagagcgaagagagagaaagcccaggaaatccaggatgagtcagctgtgttatggttggatgaaattcaaggtggaatctggcagtccaacaaagacacccaagaagcacagaagtttgccttaggaatctttgccattaatgaggcagtagaaagtggtgatgttggcaaaacactgagtgcccttcgctcccctgatgttggcttgtatggagtcatccctgagtgtggtgaaacttaccacagtgatcttgctgaagccaagaagaaaaaactggcagtaggagataataacagcaagtgggtgaagcactgggtaaaaggtggatattattattaccacaatctggagacccaggaaggaggatgggatgaacctccaaattttgtgcaaaattctatgcagctttctcgggaggagatccagagttctatctctggggtgactgccgcatataaccgagaacagctgtggctggccaatgaaggcctgatcaccaggctgcaggctcgctgccgtggatacttagttcgacaggaattccgatccaggatgaatttcctgaagaaacaaatccctgccatcacctgcattcagtcacagtggagaggatacaagcagaagaaggcatatcaagatcggttagcttacctgcgctcccacaaagatgaagttgtaaagattcagtccctggcaaggatgcaccaagctcgaaagcgctatcgagatcgcctgcagtacttccgggaccatataaatgacattatcaaaatccaggcttttattcgggcaaacaaagctcgggatgactacaagactctcatcaatgctgaggatcctcctatggttgtggtccgaaaatttgtccacctgctggaccaaagtgaccaggattttcaggaggagcttgaccttatgaagatgcgggaagaggttatcaccctcattcgttctaaccagcagctggagaatgacctcaatctcatggatatcaaaattggactgctagtgaaaaataagattacgttgcaggatgtggtttcccacagtaaaaaacttaccaaaaaaaataaggaacagttgtctgatatgatgatgataaataaacagaagggaggtctcaaggctttgagcaaggagaagagagagaagttggaagcttaccagcacctgttttatttattgcaaaccaatcccacctatctggccaagctcatttttcagatgccccagaacaagtccaccaagttcatggactctgtaatcttcacactctacaactacgcgtccaaccagcgagaggagtacctgctcctgcggctctttaagacagcactccaagaggaaatcaagtcgaaggtagatcagattcaagagattgtgacaggaaatcctacggttattaaaatggttgtaagtttcaaccgtggtgcccgtggccagaatgccctgagacagatcttggccccagtcgtgaaggaaattatggatgacaaatctctcaacatcaaaactgaccctgtggatatttacaaatcttgggttaatcagatggagtctcagacaggagaggcaagcaaactgccctatgatgtgacccctgagcaggcgctagctcatgaagaagtgaagacacggctagacagctccatcaggaacatgcgggctgtgacagacaagtttctctcagccattgtcagctctgtggacaaaatcccttatgggatgcgcttcattgccaaagtgctgaaggactcgttgcatgagaagttccctgatgctggtgaggatgagctgctgaagattattggtaacttgctttattatcgatacatgaatccagccattgttgctcctgatgcctttgacatcattgacctgtcagcaggaggccagcttaccacagaccaacgccgaaatctgggctccattgcaaaaatgcttcagcatgctgcttccaataagatgtttctgggagataatgcccacttaagcatcattaatgaatatctttcccagtcctaccagaaattcagacggtttttccaaactgcttgtgatgtcccagagcttcaggataaatttaatgtggatgagtactctgatttagtaaccctcaccaaaccagtaatctacatttccattggtgaaatcatcaacacccacactctcctgttggatcaccaggatgccattgctccggagcacaatgatccaatccacgaactgctggacgacctcggcgaggtgcccaccatcgagtccctgataggggaaagctctggcaatttaaatgacccaaataaggaggcactggctaagacggaagtgtctctcaccctgaccaacaagttcgacgtgcctggagatgagaatgcagaaatggatgctcgaaccatcttactgaatacaaaacgtttaattgtggatgtcatccggttccagccaggagagaccttgactgaaatcctagaaacaccagccaccagtgaacaggaagcagaacatcagagagccatgcagagacgtgctatccgtgatgccaaaacacctgacaagatgaaaaagtcaaaatctgtaaaggaagacagcaacctcactcttcaagagaagaaagagaagatccagacaggtttaaagaagctaacagagcttggaaccgtggacccaaagaacaaataccaggaactgatcaacgacattgccagggtactgcattcgggggacagaggggacccggccttgttcaaagctgagaggctcgagagacagtagctgttcacataacagcatagcttcagttcatgggcaaattagtgccctcctctatgagaaaccatatctgactctccag

SEQ ID NO: 342101 - DNA, 3746 bp, Homo sapiens
ggtattaaaactgatcttttgacatttttgacaatgttcttataaattactttcttttttatcatatatggatgggatgaagcacagagtaagatagagtgcacagcaaaggggatctgcccctcctatctgtccaataccccacaggttttggtgataatcttgggcaatgttccagtcaaacctgcctcccacttctcactaaagttagtgaacatgtgacccacattccccaaataagagcctcttataaactccattcttggctttttcattcatagagatagctattttatgagacatagataaagcattttttagtgatgtgcacgatgccttttttcttaattattaacttctcaaaacataaacacattggaggcacttaataaagggagctgtagctaccgccgtccgcgcctccaaggtttcacggcttcctcagcagagactcgggctcgtccgccatgtccgccgcagacgaggttgacgggctgggcgtggcccggccgcactatggctctgtcctggataatgaaagacttactgcagaggagatggatgaaaggagacgtcagaacgtggcttatgagtacctttgtcatttggaagaagcgaagaggtggatggaagcatgcctaggggaagatctgcctcccaccacagaactggaggaggggcttaggaatggggtctaccttgccaaactggggaacttcttctctcccaaagtagtgtccctgaaaaaaatctatgatcgagaacagaccagatacaaggcgactggcctccactttagacacactgataatgtgattcagtggttgaatgccatggatgagattggattgcctaagattttttacccagaaactacagatatctatgatcgaaagaacatgccaagatgtatctactgtatccatgcactcagtttgtacctgttcaagctaggcctggcccctcagattcaagacctatatggaaaggttgacttcacagaagaagaaatcaacaacatgaagactgagttggagaagtatggcatccagatgcctgcctttagcaagattgggggcatcttggctaatgaactgtcagtggatgaagccgcattacatgctgctgttattgctattaatgaagctattgaccgtagaattccagccgacacatttgcagctttgaaaaatccgaatgccatgcttgtaaatcttgaagagcccttggcatccacttaccaggatatactttaccaggctaagcaggacaaaatgacaaatgctaaaaacaggacagaaaactcagagagagaaagagatgtttatgaggagctgctcacgcaagctgaaattcaaggcaatataaacaaagtcaatacattttctgcattagcaaatatcgacctggctttagaacaaggagatgcactggccttgttcagggctctgcagtcaccagccctggggcttcgaggactgcagcaacagaatagcgactggtacttgaagcagctcctgagtgataaacagcagaagagacagagtggtcagactgaccccctgcagaaggaggagctgcagtctggagtggatgctgcaaacagtgctgcccagcaatatcagagaagattggcagcagtagcactgattaatgctgcaatccagaagggtgttgctgagaagactgttttggaactgatgaatcccgaagcccagctgccccaggtgtatccatttgccgccgatctctatcagaaggagctggctaccctgcagcgacaaagtcctgaacataatctcacccacccagagctctctgtcgcagtggagatgttgtcatcggtggccctgatcaacagggcattggaatcaggagatgtgaatacagtgtggaagcaattgagcagttcagttactggtcttaccaatattgaggaagaaaactgtcagaggtatctcgatgagttgatgaaactgaaggctcaggcacatgcagagaataatgaattcattacatggaatgatatccaagcttgcgtggaccatgtgaacctggtggtgcaagaggaacatgagaggattttagccattggtttaattaatgaagccctggatgaaggtgatgcccaaaagactctgcaggccctacagattcctgcagctaaacttgagggagtccttgcagaagtggcccagcattaccaagacacgctgattagagcgaagagagagaaagcccaggaaatccaggatgagtcagctgtgttatggttggatgaaattcaaggtggaatctggcagtccaacaaagacacccaagaagcacagaagtttgccttaggaatctttgccattaatgaggcagtagaaagtggtgatgttggcaaaacactgagtgcccttcgctcccctgatgttggcttgtatggagtcatccctgagtgtggtgaaacttaccacagtgatcttgctgaagccaagaagaaaaaactggcagtaggagataataacagcaagtgggtgaagcactgggtaaaaggtggatattattattaccacaatctggagacccaggaaggaggatgggatgaacctccaaattttgtgcaaaattctatgcagctttctcgggaggagatccagagttctatctctggggtgactgccgcatataaccgagaacagctgtggctggccaatgaaggcctgatcaccaggctgcaggctcgctgccgtggatacttagttcgacaggaattccgatccaggatgaatttcctgaagaaacaaatccctgccatcacctgcattcagtcacagtggagaggatacaagcagaagaaggcatatcaagatcggttagcttacctgcgctcccacaaagatgaagttgtaaagattcagtccctggcaaggatgcaccaagctcgaaagcgctatcgagatcgcctgcagtacttccgggaccatataaatgacattatcaaaatccaggcttttattcgggcaaacaaagctcgggatgactacaagactctcatcaatgctgaggatcctcctatggttgtggtccgaaaatttgtccacctgctggaccaaagtgaccaggattttcaggaggagcttgaccttatgaagatgcgggaagaggttatcaccctcattcgttctaaccagcagctggagaatgacctcaatctcatggatatcaaaattggactgctagtgaaaaataagattacgttgcaggatgtggtttcccacagtaaaaaacttaccaaaaaaaataaggaacagttgtctgatatgatgatgataaataaacagaagggaggtctcaaggctttgagcaaggagaagagagagaagttggaagcttaccagcacctgttttatttattgcaaaccaatcccacctatctggccaagctcatttttcagatgccccagaacaagtccaccaagttcatggactctgtaatcttcacactctacaactacgcgtccaaccagcgagaggagtacctgctcctgcggctctttaagacagcactccaagaggaaatcaagtcgaaggtagatcagattcaagagattgtgacaggaaatcctacggttattaaaatggttgtaagtttcaaccgtggtgcccgtggccagaatgccctgagacagatcttggccccagtcgtggttacacattctagaatgtgtaacaacgacaacaacaaaaaacaagtgata

SEQ ID NO: 342102 - DNA, 3481 bp, Homo sapiens
ggtattaaaactgatcttttgacatttttgacaatgttcttataaattactttcttttttatcatatatggatgggatgaagcacagagtaagatagagtgcacagcaaaggggatctgcccctcctatctgtccaataccccacaggttttggtgataatcttgggcaatgttccagtcaaacctgcctcccacttctcactaaagttagtgaacatgtgacccacattccccaaataagagcctcttataaactccattcttggctttttcattcatagagatagctattttatgagacatagataaagcattttttagtgatgtgcacgatgccttttttcttaattattaacttctcaaaacataaacacattggaggcacttaataaagggagctgtagctaccgccgtccgcgcctccaaggtttcacggcttcctcagcagagactcgggctcgtccgccatgtccgccgcagacgaggttgacgggctgggcgtggcccggccgcactatggctctgtcctggataatgaaagacttactgcagaggagatggatgaaaggagacgtcagaacgtggcttatgagtacctttgtcatttggaagaagcgaagaggtggatggaagcatgcctaggggaagatctgcctcccaccacagaactggaggaggggcttaggaatggggtctaccttgccaaactggggaacttcttctctcccaaagtagtgtccctgaaaaaaatctatgatcgagaacagaccagatacaaggcgactggcctccactttagacacactgataatgtgattcagtggttgaatgccatggatgagattggattgcctaagattttttacccagaaactacagatatctatgatcgaaagaacatgccaagatgtatctactgtatccatgcactcagtttgtacctgttcaagctaggcctggcccctcagattcaagacctatatggaaaggttgacttcacagaagaagaaatcaacaacatgaagactgagttggagaagtatggcatccagatgcctgcctttagcaagattgggggcatcttggctaatgaactgtcagtggatgaagccgcattacatgctgctgttattgctattaatgaagctattgaccgtagaattccagccgacacatttgcagctttgaaaaatccgaatgccatgcttgtaaatcttgaagagcccttggcatccacttaccaggatatactttaccaggctaagcaggacaaaatgacaaatgctaaaaacaggacagaaaactcagagagagaaagagatgtttatgaggagctgctcacgcaagctgaaattcaaggcaatataaacaaagtcaatacattttctgcattagcaaatatcgacctggctttagaacaaggagatgcactggccttgttcagggctctgcagtcaccagccctggggcttcgaggactgcagcaacagaatagcgactggtacttgaagcagctcctgagtgataaacagcagaagagacagagtggtcagactgaccccctgcagaaggaggagctgcagtctggagtggatgctgcaaacagtgctgcccagcaatatcagagaagattggcagcagtagcactgattaatgctgcaatccagaagggtgttgctgagaagactgttttggaactgatgaatcccgaagcccagctgccccaggtgtatccatttgccgccgatctctatcagaaggagctggctaccctgcagcgacaaagtcctgaacataatctcacccacccagagctctctgtcgcagtggagatgttgtcatcggtggccctgatcaacagggcattggaatcaggagatgtgaatacagtgtggaagcaattgagcagttcagttactggtcttaccaatattgaggaagaaaactgtcagaggtatctcgatgagttgatgaaactgaaggctcaggcacatgcagagaataatgaattcattacatggaatgatatccaagcttgcgtggaccatgtgaacctggtggtgcaagaggaacatgagaggattttagccattggtttaattaatgaagccctggatgaaggtgatgcccaaaagactctgcaggccctacagattcctgcagctaaacttgagggagtccttgcagaagtggcccagcattaccaagacacgctgattagagcgaagagagagaaagcccaggaaatccaggatgagtcagctgtgttatggttggatgaaattcaaggtggaatctggcagtccaacaaagacacccaagaagcacagaagtttgccttaggaatctttgccattaatgaggcagtagaaagtggtgatgttggcaaaacactgagtgcccttcgctcccctgatgttggcttgtatggagtcatccctgagtgtggtgaaacttaccacagtgatcttgctgaagccaagaagaaaaaactggcagtaggagataataacagcaagtgggtgaagcactgggtaaaaggtggatattattattaccacaatctggagacccaggaaggaggatgggatgaacctccaaattttgtgcaaaattctatgcagctttctcgggaggagatccagagttctatctctggggtgactgccgcatataaccgagaacagctgtggctggccaatgaaggcctgatcaccaggctgcaggctcgctgccgtggatacttagttcgacaggaattccgatccaggatgaatttcctgaagaaacaaatccctgccatcacctgcattcagtcacagtggagaggatacaagcagaagaaggcatatcaagatcggttagcttacctgcgctcccacaaagatgaagttgtaaagattcagtccctggcaaggatgcaccaagctcgaaagcgctatcgagatcgcctgcagtacttccgggaccatataaatgacattatcaaaatccaggcttttattcgggcaaacaaagctcgggatgactacaagactctcatcaatgctgaggatcctcctatggttgtggtccgaaaatttgtccacctgctggaccaaagtgaccaggattttcaggaggagcttgaccttatgaagatgcgggaagaggttatcaccctcattcgttctaaccagcagctggagaatgacctcaatctcatggatatcaaaattggactgctagtgaaaaataagattacgttgcaggtatggcccagtgccagcgggggccttggaacggttcatcctgctttgtaacccctgcattcccctttctgactggtggggagggtggaggctgactttctcctcagctactgccataagagctttttttttttcttttgactgagtctcactctgttgcccaggttgcagtgagccgagattgcatgactgcactccggactgggtgacagagtgaaactctatctcca

SEQ ID NO: 342103 - DNA, 3600 bp, Homo sapiens
ggtattaaaactgatcttttgacatttttgacaatgttcttataaattactttcttttttatcatatatggatgggatgaagcacagagtaagatagagtgcacagcaaaggggatctgcccctcctatctgtccaataccccacaggttttggtgataatcttgggcaatgttccagtcaaacctgcctcccacttctcactaaagttagtgaacatgtgacccacattccccaaataagagcctcttataaactccattcttggctttttcattcatagagatagctattttatgagacatagataaagcattttttagtgatgtgcacgatgccttttttcttaattattaacttctcaaaacataaacacattggaggcacttaataaagggagctgtagctaccgccgtccgcgcctccaaggtttcacggcttcctcagcagagactcgggctcgtccgccatgtccgccgcagacgaggttgacgggctgggcgtggcccggccgcactatggctctgtcctggataatgaaagacttactgcagaggagatggatgaaaggagacgtcagaacgtggcttatgagtacctttgtcatttggaagaagcgaagaggtggatggaagcatgcctaggggaagatctgcctcccaccacagaactggaggaggggcttaggaatggggtctaccttgccaaactggggaacttcttctctcccaaagtagtgtccctgaaaaaaatctatgatcgagaacagaccagatacaaggcgactggcctccactttagacacactgataatgtgattcagtggttgaatgccatggatgagattggattgcctaagattttttacccagaaactacagatatctatgatcgaaagaacatgccaagatgtatctactgtatccatgcactcagtttgtacctgttcaagctaggcctggcccctcagattcaagacctatatggaaaggttgacttcacagaagaagaaatcaacaacatgaagactgagttggagaagtatggcatccagatgcctgcctttagcaagattgggggcatcttggctaatgaactgtcagtggatgaagccgcattacatgctgctgttattgctattaatgaagctattgaccgtagaattccagccgacacatttgcagctttgaaaaatccgaatgccatgcttgtaaatcttgaagagcccttggcatccacttaccaggatatactttaccaggctaagcaggacaaaatgacaaatgctaaaaacaggacagaaaactcagagagagaaagagatgtttatgaggagctgctcacgcaagctgaaattcaaggcaatataaacaaagtcaatacattttctgcattagcaaatatcgacctggctttagaacaaggagatgcactggccttgttcagggctctgcagtcaccagccctggggcttcgaggactgcagcaacagaatagcgactggtacttgaagcagctcctgagtgataaacagcagaagagacagagtggtcagactgaccccctgcagaaggaggagctgcagtctggagtggatgctgcaaacagtgctgcccagcaatatcagagaagattggcagcagtagcactgattaatgctgcaatccagaagggtgttgctgagaagactgttttggaactgatgaatcccgaagcccagctgccccaggtgtatccatttgccgccgatctctatcagaaggagctggctaccctgcagcgacaaagtcctgaacataatctcacccacccagagctctctgtcgcagtggagatgttgtcatcggtggccctgatcaacagggcattggaatcaggagatgtgaatacagtgtggaagcaattgagcagttcagttactggtcttaccaatattgaggaagaaaactgtcagaggtatctcgatgagttgatgaaactgaaggctcaggcacatgcagagaataatgaattcattacatggaatgatatccaagcttgcgtggaccatgtgaacctggtggtgcaagaggaacatgagaggattttagccattggtttaattaatgaagccctggatgaaggtgatgcccaaaagactctgcaggccctacagattcctgcagctaaacttgagggagtccttgcagaagtggcccagcattaccaagacacgctgattagagcgaagagagagaaagcccaggaaatccaggatgagtcagctgtgttatggttggatgaaattcaaggtggaatctggcagtccaacaaagacacccaagaagcacagaagtttgccttaggaatctttgccattaatgaggcagtagaaagtggtgatgttggcaaaacactgagtgcccttcgctcccctgatgttggcttgtatggagtcatccctgagtgtggtgaaacttaccacagtgatcttgctgaagccaagaagaaaaaactggcagtaggagataataacagcaagtgggtgaagcactgggtaaaaggtggatattattattaccacaatctggagacccaggaaggaggatgggatgaacctccaaattttgtgcaaaattctatgcagctttctcgggaggagatccagagttctatctctggggtgactgccgcatataaccgagaacagctgtggctggccaatgaaggcctgatcaccaggctgcaggctcgctgccgtggatacttagttcgacaggaattccgatccaggatgaatttcctgaagaaacaaatccctgccatcacctgcattcagtcacagtggagaggatacaagcagaagaaggcatatcaagatcggttagcttacctgcgctcccacaaagatgaagttgtaaagattcagtccctggcaaggatgcaccaagctcgaaagcgctatcgagatcgcctgcagtacttccgggaccatataaatgacattatcaaaatccaggcttttattcgggcaaacaaagctcgggatgactacaagactctcatcaatgctgaggatcctcctatggttgtggtccgaaaatttgtccacctgctggaccaaagtgaccaggattttcaggaggagcttgaccttatgaagatgcgggaagaggttatcaccctcattcgttctaaccagcagctggagaatgacctcaatctcatggatatcaaaattggactgctagtgaaaaataagattacgttgcaggtatggcccagtgccagcgggggccttggaacggttcatcctgctttgtaacccctgcattcccctttctgactggtggggagggtggaggctgactttctcctcagctactgccataagagctttttttttttcttttgactgagtctcactctgttgcccaggttgtagtgcgatgtgatctcagctcactgcaacctctgcctcccaggttcaagcaattctcctccctcaacctcctgtagtcccaggtactcggggctgaggcaggaagatcacttgagcccaggagttcaaggctgcagtgagccgtgatggcaccactgcatggaaaagaccaaatatcaaa

SEQ ID NO: 342104 - DNA, 2886 bp, Homo sapiens
ggtattaaaactgatcttttgacatttttgacaatgttcttataaattactttcttttttatcatatatggatgggatgaagcacagagtaagatagagtgcacagcaaaggggatctgcccctcctatctgtccaataccccacaggttttggtgataatcttgggcaatgttccagtcaaacctgcctcccacttctcactaaagttagtgaacatgtgacccacattccccaaataagagcctcttataaactccattcttggctttttcattcatagagatagctattttatgagacatagataaagcattttttagtgatgtgcacgatgccttttttcttaattattaacttctcaaaacataaacacattggaggcacttaataaagggagctgtagctaccgccgtccgcgcctccaaggtttcacggcttcctcagcagagactcgggctcgtccgccatgtccgccgcagacgaggttgacgggctgggcgtggcccggccgcactatggctctgtcctggataatgaaagacttactgcagaggagatggatgaaaggagacgtcagaacgtggcttatgagtacctttgtcatttggaagaagcgaagaggtggatggaagcatgcctaggggaagatctgcctcccaccacagaactggaggaggggcttaggaatggggtctaccttgccaaactggggaacttcttctctcccaaagtagtgtccctgaaaaaaatctatgatcgagaacagaccagatacaaggcgactggcctccactttagacacactgataatgtgattcagtggttgaatgccatggatgagattggattgcctaagattttttacccagaaactacagatatctatgatcgaaagaacatgccaagatgtatctactgtatccatgcactcagtttgtacctgttcaagctaggcctggcccctcagattcaagacctatatggaaaggttgacttcacagaagaagaaatcaacaacatgaagactgagttggagaagtatggcatccagatgcctgcctttagcaagattgggggcatcttggctaatgaactgtcagtggatgaagccgcattacatgctgctgttattgctattaatgaagctattgaccgtagaattccagccgacacatttgcagctttgaaaaatccgaatgccatgcttgtaaatcttgaagagcccttggcatccacttaccaggatatactttaccaggctaagcaggacaaaatgacaaatgctaaaaacaggacagaaaactcagagagagaaagagatgtttatgaggagctgctcacgcaagctgaaattcaaggcaatataaacaaagtcaatacattttctgcattagcaaatatcgacctggctttagaacaaggagatgcactggccttgttcagggctctgcagtcaccagccctggggcttcgaggactgcagcaacagaatagcgactggtacttgaagcagctcctgagtgataaacagcagaagagacagagtggtcagactgaccccctgcagaaggaggagctgcagtctggagtggatgctgcaaacagtgctgcccagcaatatcagagaagattggcagcagtagcactgattaatgctgcaatccagaagggtgttgctgagaagactgttttggaactgatgaatcccgaagcccagctgccccaggtgtatccatttgccgccgatctctatcagaaggagctggctaccctgcagcgacaaagtcctgaacataatctcacccacccagagctctctgtcgcagtggagatgttgtcatcggtggccctgatcaacagggcattggaatcaggagatgtgaatacagtgtggaagcaattgagcagttcagttactggtcttaccaatattgaggaagaaaactgtcagaggtatctcgatgagttgatgaaactgaaggctcaggcacatgcagagaataatgaattcattacatggaatgatatccaagcttgcgtggaccatgtgaacctggtggtgcaagaggaacatgagaggattttagccattggtttaattaatgaagccctggatgaaggtgatgcccaaaagactctgcaggccctacagattcctgcagctaaacttgagggagtccttgcagaagtggcccagcattaccaagacacgctgattagagcgaagagagagaaagcccaggaaatccaggatgagtcagctgtgttatggttggatgaaattcaaggtggaatctggcagtccaacaaagacacccaagaagcacagaagtttgccttaggaatctttgccattaatgaggcagtagaaagtggtgatgttggcaaaacactgagtgcccttcgctcccctgatgttggcttgtatggagtcatccctgagtgtggtgaaacttaccacagtgatcttgctgaagccaagaagaaaaaactggcagtaggagataataacagcaagtgggtgaagcactgggtaaaaggtggatattattattaccacaatctggagacccaggaaggaggatgggatgaacctccaaattttgtgcaaaattctatgcagctttctcgggaggagatccagagttctatctctggggtgactgccgcatataaccgagaacagctgtggctggccaatgaaggcctgatcaccaggctgcaggctcgctgccgtggatacttagttcgacaggaattccgatccaggatgaatttcctgaagaaacaaatccctgccatcacctgcattcaggtatttcagaacctatcacacagacagcaagcgggcatctagagcaggggtaataaacggtcagctgtca

SEQ ID NO: 342105 - DNA, 2131 bp, Homo sapiens
ggtattaaaactgatcttttgacatttttgacaatgttcttataaattactttcttttttatcatatatggatgggatgaagcacagagtaagatagagtgcacagcaaaggggatctgcccctcctatctgtccaataccccacaggttttggtgataatcttgggcaatgttccagtcaaacctgcctcccacttctcactaaagttagtgaacatgtgacccacattccccaaataagagcctcttataaactccattcttggctttttcattcatagagatagctattttatgagacatagataaagcattttttagtgatgtgcacgatgccttttttcttaattattaacttctcaaaacataaacacattggaggcacttaataaagggagctgtagctaccgccgtccgcgcctccaaggtttcacggcttcctcagcagagactcgggctcgtccgccatgtccgccgcagacgaggttgacgggctgggcgtggcccggccgcactatggctctgtcctggataatgaaagacttactgcagaggagatggatgaaaggagacgtcagaacgtggcttatgagtacctttgtcatttggaagaagcgaagaggtggatggaagcatgcctaggggaagatctgcctcccaccacagaactggaggaggggcttaggaatggggtctaccttgccaaactggggaacttcttctctcccaaagtagtgtccctgaaaaaaatctatgatcgagaacagaccagatacaaggcgactggcctccactttagacacactgataatgtgattcagtggttgaatgccatggatgagattggattgcctaagattttttacccagaaactacagatatctatgatcgaaagaacatgccaagatgtatctactgtatccatgcactcagtttgtacctgttcaagctaggcctggcccctcagattcaagacctatatggaaaggttgacttcacagaagaagaaatcaacaacatgaagactgagttggagaagtatggcatccagatgcctgcctttagcaagattgggggcatcttggctaatgaactgtcagtggatgaagccgcattacatgctgctgttattgctattaatgaagctattgaccgtagaattccagccgacacatttgcagctttgaaaaatccgaatgccatgcttgtaaatcttgaagagcccttggcatccacttaccaggatatactttaccaggctaagcaggacaaaatgacaaatgctaaaaacaggacagaaaactcagagagagaaagagatgtttatgaggagctgctcacgcaagctgaaattcaaggcaatataaacaaagtcaatacattttctgcattagcaaatatcgacctggctttagaacaaggagatgcactggccttgttcagggctctgcagtcaccagccctggggcttcgaggactgcagcaacagaatagcgactggtacttgaagcagctcctgagtgataaacagcagaagagacagagtggtcagactgaccccctgcagaaggaggagctgcagtctggagtggatgctgcaaacagtgctgcccagcaatatcagagaagtaagagtccattgaaattgtatgggaggaaagttgtggctttgtgttattgaagggtctgaggttagcttctgtcatcgtcatcacccactctgagcctactagccataaccaactgccaggtacttttggtggcaggagggttcctccagtttgttgttgtggtggttttaattgctgtgtaatagttgtacatattttgagggtacatgtgttttgttttttaaaccaaccaagaagcactgacaccaaccaagaagcactgacgtatgatattttgatacatgcatacaatgtattatgatcaaatcagggtaattggaatatttgtcacctaacgcatttatcttttgttgatgttgggaacattccagttcttctgttttgaactatacattattgttaactatcatcatcctactgtgctatctaacactagacctattccttgtatctaatggtaattttgtacccgttagccaacctctctatgtcctcctcc

SEQ ID NO: 342106 - DNA, 2149 bp, Homo sapiens
ggtattaaaactgatcttttgacatttttgacaatgttcttataaattactttcttttttatcatatatggatgggatgaagcacagagtaagatagagtgcacagcaaaggggatctgcccctcctatctgtccaataccccacaggttttggtgataatcttgggcaatgttccagtcaaacctgcctcccacttctcactaaagttagtgaacatgtgacccacattccccaaataagagcctcttataaactccattcttggctttttcattcatagagatagctattttatgagacatagataaagcattttttagtgatgtgcacgatgccttttttcttaattattaacttctcaaaacataaacacattggaggcacttaataaagggagctgtagctaccgccgtccgcgcctccaaggtttcacggcttcctcagcagagactcgggctcgtccgccatgtccgccgcagacgaggttgacgggctgggcgtggcccggccgcactatggctctgtcctggataatgaaagacttactgcagaggagatggatgaaaggagacgtcagaacgtggcttatgagtacctttgtcatttggaagaagcgaagaggtggatggaagcatgcctaggggaagatctgcctcccaccacagaactggaggaggggcttaggaatggggtctaccttgccaaactggggaacttcttctctcccaaagtagtgtccctgaaaaaaatctatgatcgagaacagaccagatacaaggcgactggcctccactttagacacactgataatgtgattcagtggttgaatgccatggatgagattggattgcctaagattttttacccagaaactacagatatctatgatcgaaagaacatgccaagatgtatctactgtatccatgcactcagtttgtacctgttcaagctaggcctggcccctcagattcaagacctatatggaaaggttgacttcacagaagaagaaatcaacaacatgaagactgagttggagaagtatggcatccagatgcctgcctttagcaagattgggggcatcttggctaatgaactgtcagtggatgaagccgcattacatgctgctgttattgctattaatgaagctattgaccgtagaattccagccgacacatttgcagctttgaaaaatccgaatgccatgcttgtaaatcttgaagagcccttggcatccacttaccaggatatactttaccaggctaagcaggacaaaatgacaaatgctaaaaacaggacagaaaactcagagagagaaagagatgtttatgaggagctgctcacgcaagctgaaattcaaggcaatataaacaaagtcaataatgccgacaaaaggatcaaggtggcgattgcccgtggtggagatggcatggtgatgagatgacccgtattatctggcagttcatcaaggagaagctacatcctgcacccacgtggacatccagctaaagtattatcgaccctcgagagacatcccaaaccgtgaccagactgatgaccaggtcaccattgactctgacactggccacccagaagtacacgtgtggctgtcaacgtgtgccaacaataaacacctgatgaggcccgtgtggaagagtacaagctgaagaagatgtggaaaagtcccacataggaactaatccggaaacatacctgggggagggacaagatcaataaccgcgagaaacacaaatacaataatagaaacaaaacaatcaccaacagaccattagttacccactggatagacaacaaaagacacaatcagcacatgagagagacaaagcacaataggaaaacaaatacaaaacgacccacaaacctttagaggaaagaaccagaacccggacacatatccaaaaatggataattaaaccccaaaccagatcggcagcaggctgtcacacaggagatggtaaaggtggacaaaaagtccgccggagttgcaagacagagagacaggaacaaatgaacaaagagacaagaaaagaacagactacagagtatagagcacaaggagcagaacagctaggcgacacagaatgaaaagacacgctgcacactacgcagaaatgaaacccgagagaaaac

SEQ ID NO: 342107 - DNA, 1000 bp, Homo sapiens
ggtattaaaactgatcttttgacatttttgacaatgttcttataaattactttcttttttatcatatatggatgggatgaagcacagagtaagatagagtgcacagcaaaggggatctgcccctcctatctgtccaataccccacaggttttggtgataatcttgggcaatgttccagtcaaacctgcctcccacttctcactaaagttagtgaacatgtgacccacattccccaaataagagcctcttataaactccattcttggctttttcattcatagagatagctattttatgagacatagataaagcattttttagtgatgtgcacgatgccttttttcttaattattaacttctcaaaacataaacacattggaggcacttaataaagggagctgtagctaccgccgtccgcgcctccaaggtttcacggcttcctcagcagagactcgggctcgtccgccatgtccgccgcagacgaggttgacgggctgggcgtggcccggccgcactatggctctgtcctggataatgaaagacttactgcagaggagatggatgaaaggagacgtcagaacgtggcttatgagtacctttgtcatttggaagaagcgaagaggtaaagattggctggctggagagaagattaagagaagggaactgataatagtgtgaatacaaataaagattgctttgaggctgaacacagtggtccatgcctgtaatcccaacacgttgggaggccgaggtgggggggaatcacttgaacccagctgtttgagaccagattgggcaacatagtgacaccccatctctacaaaaaaattttaaaaattagccaggcatggtggtgcatgccagtagtcctagctactcgggagcctgaggagggaggatcacttgagtccgggaggtcgaggcagcagtgagccgtgctctcaccactgtgctctagcctgggtgacaaaactcctgtttttggtggggggaaaaaaaa

SEQ ID NO: 342108 - DNA, 478 bp, Homo sapiens
gtccaacaaagacacccaagaagcacagaagtgtatgtatcacctgttttatttctgttttggtggaggctggggtgacaaggtgctccgtacagcttgaccaagataggtatgggggaacaatttgccagtagatatagttaggtgaagcagtatgtgaatttagacactctctaaactattctggtaacagttctttcccgaaatagttgccttaggaatctttgccattaatgaggcagtagaaagtggtgatgttggcaaaacactgagtgcccttcgctcccctgatgttggcttgtatggagtcatccctgagtgtggtgaaacttaccacagtgatcttgctgaagccaagaagaaaaaactggcagtaggtgagttctgggataatacatatgtgccctgaagctaacccttgagtatatgaggggacagatgtagaggaaagggataagctatagggaaagacctttta

SEQ ID NO: 342109 - DNA, 497 bp, Homo sapiens
agtgtctaaaaaaaaaaaaaaaaaaaaaagtaggtagtcatatttaaggcagagttaagcattgctgggttgtagtgtgaaatgataatgataactgtcgttatttttctaactttaataattatgtctcaggatattcggaatcagcggaggtaccgacagaggagaaaggccgaactagtgaaactgcaacagacatacgctgctctgaactctaaggccaccttttatggggagcaggtggattactataaaagctatatcaaaacctgcttggataacttagccagcaagggcaagtgagtattttttctttttaaagaatcaatgtcagaattagagtgaggaaaaagcagaggcaactgaaatgacactggaaatttttacttaaaatacactggatctatttattgcattagtcttttattttacctctaatcatttgtgtaattgcctaattccatttgtaagtgtatgatgtgaatagtgggtggggg

SEQ ID NO: 342110 - DNA, 7228 bp, Homo sapiens
  misc_feature (8)..(8): n is a, c, g, or t
gacggcanggggcggggcctcggggaccccggcaagcccgcgcacttggcaggagctgtagctaccgccgtccgcgcctccaaggtttcacggcttcctcagcagagactcgggctcgtccgccatgtccgccgcagacgaggttgacgggctgggcgtggcccggccgcactatggctctgtcctggataatgaaagacttactgcagaggagatggatgaaaggagacgtcagaacgtggcttatgagtacctttgtcatttggaagaagcgaagaggtggatggaagcatgcctaggggaagatctgcctcccaccacagaactggaggaggggcttaggaatggggtctaccttgccaaactggggaacttcttctctcccaaagtagtgtccctgaaaaaaatctatgatcgagaacagaccagatacaaggcgactggcctccactttagacacactgataatgtgattcagtggttgaatgccatggatgagattggattgcctaagattttttacccagaaactacagatatctatgatcgaaagaacatgccaagatgtatctactgtatccatgcactcagtttgtacctgttcaagctaggcctggcccctcagattcaagacctatatggaaaggttgacttcacagaagaagaaatcaacaacatgaagactgagttggagaagtatggcatccagatgcctgcctttagcaagattgggggcatcttggctaatgaactgtcagtggatgaagccgcattacatgctgctgttattgctattaatgaagctattgaccgtagaattccagccgacacatttgcagctttgaaaaatccgaatgccatgcttgtaaatcttgaagagcccttggcatccacttaccaggatatactttaccaggctaagcaggacaaaatgacaaatgctaaaaacaggacagaaaactcagagagagaaagagatgtttatgaggagctgctcacgcaagctgaaattcaaggcaatataaacaaagtcaatacattttctgcattagcaaatatcgacctggctttagaacaaggagatgcactggccttgttcagggctctgcagtcaccagccctggggcttcgaggactgcagcaacagaatagcgactggtacttgaagcagctcctgagtgataaacagcagaagagacagagtggtcagactgaccccctgcagaaggaggagctgcagtctggagtggatgctgcaaacagtgctgcccagcaatatcagagaagattggcagcagtagcactgattaatgctgcaatccagaagggtgttgctgagaagactgttttggaactgatgaatcccgaagcccagctgccccaggtgtatccatttgccgccgatctctatcagaaggagctggctaccctgcagcgacaaagtcctgaacataatctcacccacccagagctctctgtcgcagtggagatgttgtcatcggtggccctgatcaacagggcattggaatcaggagatgtgaatacagtgtggaagcaattgagcagttcagttactggtcttaccaatattgaggaagaaaactgtcagaggtatctcgatgagttgatgaaactgaaggctcaggcacatgcagagaataatgaattcattacatggaatgatatccaagcttgcgtggaccatgtgaacctggtggtgcaagaggaacatgagaggattttagccattggtttaattaatgaagccctggatgaaggtgatgcccaaaagactctgcaggccctacagattcctgcagctaaacttgagggagtccttgcagaagtggcccagcattaccaagacacgctgattagagcgaagagagagaaagcccaggaaatccaggatgagtcagctgtgttatggttggatgaaattcaaggtggaatctggcagtccaacaaagacacccaagaagcacagaagtttgccttaggaatctttgccattaatgaggcagtagaaagtggtgatgttggcaaaacactgagtgcccttcgctcccctgatgttggcttgtatggagtcatccctgagtgtggtgaaacttaccacagtgatcttgctgaagccaagaagaaaaaactggcagtaggagataataacagcaagtgggtgaagcactgggtaaaaggtggatattattattaccacaatctggagacccaggaaggaggatgggatgaacctccaaattttgtgcaaaattctatgcagctttctcgggaggagatccagagttctatctctggggtgactgccgcatataaccgagaacagctgtggctggccaatgaaggcctgatcaccaggctgcaggctcgctgccgtggatacttagttcgacaggaattccgatccaggatgaatttcctgaagaaacaaatccctgccatcacctgcattcagtcacagtggagaggatacaagcagaagaaggcatatcaagatcggttagcttacctgcgctcccacaaagatgaagttgtaaagattcagtccctggcaaggatgcaccaagctcgaaagcgctatcgagatcgcctgcagtacttccgggaccatataaatgacattatcaaaatccaggcttttattcgggcaaacaaagctcgggatgactacaagactctcatcaatgctgaggatcctcctatggttgtggtccgaaaatttgtccacctgctggaccaaagtgaccaggattttcaggaggagcttgaccttatgaagatgcgggaagaggttatcaccctcattcgttctaaccagcagctggagaatgacctcaatctcatggatatcaaaattggactgctagtgaaaaataagattacgttgcaggatgtggtttcccacagtaaaaaacttaccaaaaaaaataaggaacagttgtctgatatgatgatgataaataaacagaagggaggtctcaaggctttgagcaaggagaagagagagaagttggaagcttaccagcacctgttttatttattgcaaaccaatcccacctatctggccaagctcatttttcagatgccccagaacaagtccaccaagttcatggactctgtaatcttcacactctacaactacgcgtccaaccagcgagaggagtacctgctcctgcggctctttaagacagcactccaagaggaaatcaagtcgaaggtagatcagattcaagagattgtgacaggaaatcctacggttattaaaatggttgtaagtttcaaccgtggtgcccgtggccagaatgccctgagacagatcttggccccagtcgtgaaggaaattatggatgacaaatctctcaacatcaaaactgaccctgtggatatttacaaatcttgggttaatcagatggagtctcagacaggagaggcaagcaaactgccctatgatgtgacccctgagcaggcgctagctcatgaagaagtgaagacacggctagacagctccatcaggaacatgcgggctgtgacagacaagtttctctcagccattgtcagctctgtggacaaaatcccttatgggatgcgcttcattgccaaagtgctgaaggactcgttgcatgagaagttccctgatgctggtgaggatgagctgctgaagattattggtaacttgctttattatcgatacatgaatccagccattgttgctcctgatgcctttgacatcattgacctgtcagcaggaggccagcttaccacagaccaacgccgaaatctgggctccattgcaaaaatgcttcagcatgctgcttccaataagatgtttctgggagataatgcccacttaagcatcattaatgaatatctttcccagtcctaccagaaattcagacggtttttccaaactgcttgtgatgtcccagagcttcaggataaatttaatgtggatgagtactctgatttagtaaccctcaccaaaccagtaatctacatttccattggtgaaatcatcaacacccacactctcctgttggatcaccaggatgccattgctccggagcacaatgatccaatccacgaactgctggacgacctcggcgaggtgcccaccatcgagtccctgataggggaaagctctggcaatttaaatgacccaaataaggaggcactggctaagacggaagtgtctctcaccctgaccaacaagttcgacgtgcctggagatgagaatgcagaaatggatgctcgaaccatcttactgaatacaaaacgtttaattgtggatgtcatccggttccagccaggagagaccttgactgaaatcctagaaacaccagccaccagtgaacaggaagcagaacatcagagagccatgcagagacgtgctatccgtgatgccaaaacacctgacaagatgaaaaagtcaaaatctgtaaaggaagacagcaacctcactcttcaagagaagaaagagaagatccagacaggtttaaagaagctaacagagcttggaaccgtggacccaaagaacaaataccaggaactgatcaacgacattgccagggatattcggaatcagcggaggtaccgacagaggagaaaggccgaactagtgaaactgcaacagacatacgctgctctgaactctaaggccaccttttatggggagcaggtggattactataaaagctatatcaaaacctgcttggataacttagccagcaagggcaaagtctccaaaaagcctagggaaatgaaaggaaagaaaagcaaaaagatttctctgaaatatacagcagcaagactacatgaaaaaggagttcttctggaaattgaggacctgcaagtgaatcagtttaaaaatgttatatttgaaatcagtccaacagaagaagttggagacttcgaagtgaaagccaaattcatgggagttcaaatggagacttttatgttacattatcaggacctgctgcagctacagtatgaaggagttgcagtcatgaaattatttgatagagctaaagtaaatgtcaacctcctgatcttccttctcaacaaaaagttctacgggaagtaattgatcgtttgctgccagcccagaaggatgaaggaaagaagcacctcacagctcctttctaggtccttctttcctcattggaagcaaagacctagccaacaacagcacctcaatctgatacactcccgatgccacatttttaactcctctcgctctgatgggacatttgttacccttttttcatagtgaaattgtgtttcaggcttagtctgacctttctggtttcttcattttcttccattacttaggaaagagtggaaactccactaaaatttctctgtgttgttacagtcttagaggttgcagtactatattgtaagctttggtgtttgtttaattagcaatagggatggtaggattcaaatgtgtgtcatttagaagtggaagctattagcaccaatgacataaatacatacaagacacagaactaaaatgtcatgttattaacagttattaggttgtcatttaaaaataaagttcctttatatttctgtcccatcaggaaaactgaaggatatggggaatcattggttatcttccattgtgtttttctttatggacaggagctaatggaagtgacagtcatgttcaaaggaagcatttctagaaaaaaggagataatgtttttaaatttcattatcaaacttgggcaattctgtttgtgtaactccccgactagtggatgggagagtcccattgctaaaattcagctactcagataaattcagaatgggtcaaggcacctgcctgtttttgttggtgcacagagattgacttgattcagagagacaattcactccatccctatggcagaggaatgggttagccctaatgtagaatgtcattgtttttaaaactgttttatatcttaagagtgccttattaaagtatagatgtatgtcttaaaatgtgggtgataggaattttaaagatttatataatgcatcaaaagccttagaataagaaaagctttttttaaattgctttatctgtatatctgaactcttgaaacttatagctaaaacactaggatttatctgcagtgttgcagggagataattctgccttaaattgtctaaaacaaaaacaaaaccagccaacctatgttacacgtgagattaaaaccaattttttccccattttttctccttttttctcttgctgcccacattgtgcctttattttatgagccccagttttctgggcttagtttaaaaaaaaaatcaagtctaaacattgcatttagaaagcttttgttcttggataaaaagtcatacactttaaaaaaaaaaaaaactttttccaggaaaatatattgaaatcatgctgctgagcctctattttctttctttgatgttttgattcagtattcttttatcataaatttttagcatttaaaaattcactgatgtacattaagccaataaactgctttaatgaataacaaactatgtagtgtgtccctattataaatgcattggagaagtatttttatgagactctttactcaggtgcatggttacagcccacagggaggcatggagtgccatggaaggattcgccactacccagaccttgttttttgttgtattttggaagacaggttttttaaagaaacattttcctcagattaaaagatgatgctattacaactagcattgcctcaaaaactgggaccaaccaaagtgtgtcaaccctgtttccttaaaagaggctatgaatcccaaaggccacatccaagacaggcaataatgagcagagtttacagctcctttaataaaatgtgtcagtaattttaaggtttatagttccctcaacacaattgctaatgcagaatagtgtaaaatgcgcttcaagaatgttgatgatgatgatatagaattgtggctttagtagcacagaggatgccccaacaaactcatggcgttgaaaccacacagttctcattactgttatttattagctgtagcattctctgtctcctctctctcctcctttgaccttctcctcgaccagccatcatgacatttaccatgaatttacttcctcccaagagtttggactgcccgtcagattgtttctgcacatagttgcctttgtatctctgtatgaaataaaaggtcatttgtt

SEQ ID NO: 342111 - DNA, 7331 bp, Homo sapiens
  misc_feature (8)..(8): n is a, c, g, or t
gacggcanggggcggggcctcggggaccccggcaagcccgcgcacttggcaggagctgtagctaccgccgtccgcgcctccaaggtttcacggcttcctcagcagagactcgggctcgtccgccatgtccgccgcagacgaggttgacgggctgggcgtggcccggccgcactatggctctgtcctggataatgaaagacttactgcagaggagatggatgaaaggagacgtcagaacgtggcttatgagtacctttgtcatttggaagaagcgaagaggtggatggaagcatgcctaggggaagatctgcctcccaccacagaactggaggaggggcttaggaatggggtctaccttgccaaactggggaacttcttctctcccaaagtagtgtccctgaaaaaaatctatgatcgagaacagaccagatacaaggcgactggcctccactttagacacactgataatgtgattcagtggttgaatgccatggatgagattggattgcctaagattttttacccagaaactacagatatctatgatcgaaagaacatgccaagatgtatctactgtatccatgcactcagtttgtacctgttcaagctaggcctggcccctcagattcaagacctatatggaaaggttgacttcacagaagaagaaatcaacaacatgaagactgagttggagaagtatggcatccagatgcctgcctttagcaagattgggggcatcttggctaatgaactgtcagtggatgaagccgcattacatgctgctgttattgctattaatgaagctattgaccgtagaattccagccgacacatttgcagctttgaaaaatccgaatgccatgcttgtaaatcttgaagagcccttggcatccacttaccaggatatactttaccaggctaagcaggacaaaatgacaaatgctaaaaacaggacagaaaactcagagagagaaagagatgtttatgaggagctgctcacgcaagctgaaattcaaggcaatataaacaaagtcaatacattttctgcattagcaaatatcgacctggctttagaacaaggagatgcactggccttgttcagggctctgcagtcaccagccctggggcttcgaggactgcagcaacagaatagcgactggtacttgaagcagctcctgagtgataaacagcagaagagacagagtggtcagactgaccccctgcagaaggaggagctgcagtctggagtggatgctgcaaacagtgctgcccagcaatatcagagaagattggcagcagtagcactgattaatgctgcaatccagaagggtgttgctgagaagactgttttggaactgatgaatcccgaagcccagctgccccaggtgtatccatttgccgccgatctctatcagaaggagctggctaccctgcagcgacaaagtcctgaacataatctcacccacccagagctctctgtcgcagtggagatgttgtcatcggtggccctgatcaacagggcattggaatcaggagatgtgaatacagtgtggaagcaattgagcagttcagttactggtcttaccaatattgaggaagaaaactgtcagaggtatctcgatgagttgatgaaactgaaggctcaggcacatgcagagaataatgaattcattacatggaatgatatccaagcttgcgtggaccatgtgaacctggtggtgcaagaggaacatgagaggattttagccattggtttaattaatgaagccctggatgaaggtgatgcccaaaagactctgcaggccctacagattcctgcagctaaacttgagggagtccttgcagaagtggcccagcattaccaagacacgctgattagagcgaagagagagaaagcccaggaaatccaggatgagtcagctgtgttatggttggatgaaattcaaggtggaatctggcagtccaacaaagacacccaagaagcacagaagtttgccttaggaatctttgccattaatgaggcagtagaaagtggtgatgttggcaaaacactgagtgcccttcgctcccctgatgttggcttgtatggagtcatccctgagtgtggtgaaacttaccacagtgatcttgctgaagccaagaagaaaaaactggcagtaggagataataacagcaagtgggtgaagcactgggtaaaaggtggatattattattaccacaatctggagacccaggaaggaggatgggatgaacctccaaattttgtgcaaaattctatgcagctttctcgggaggagatccagagttctatctctggggtgactgccgcatataaccgagaacagctgtggctggccaatgaaggcctgatcaccaggctgcaggctcgctgccgtggatacttagttcgacaggaattccgatccaggatgaatttcctgaagaaacaaatccctgccatcacctgcattcagtcacagtggagaggatacaagcagaagaaggcatatcaagatcggttagcttacctgcgctcccacaaagatgaagttgtaaagattcagtccctggcaaggatgcaccaagctcgaaagcgctatcgagatcgcctgcagtacttccgggaccatataaatgacattatcaaaatccaggcttttattcgggcaaacaaagctcgggatgactacaagactctcatcaatgctgaggatcctcctatggttgtggtccgaaaatttgtccacctgctggaccaaagtgaccaggattttcaggaggagcttgaccttatgaagatgcgggaagaggttatcaccctcattcgttctaaccagcagctggagaatgacctcaatctcatggatatcaaaattggactgctagtgaaaaataagattacgttgcaggatgtggtttcccacagtaaaaaacttaccaaaaaaaataaggaacagttgtctgatatgatgatgataaataaacagaagggaggtctcaaggctttgagcaaggagaagagagagaagttggaagcttaccagcacctgttttatttattgcaaaccaatcccacctatctggccaagctcatttttcagatgccccagaacaagtccaccaagttcatggactctgtaatcttcacactctacaactacgcgtccaaccagcgagaggagtacctgctcctgcggctctttaagacagcactccaagaggaaatcaagtcgaaggtagatcagattcaagagattgtgacaggaaatcctacggttattaaaatggttgtaagtttcaaccgtggtgcccgtggccagaatgccctgagacagatcttggccccagtcgtgaaggaaattatggatgacaaatctctcaacatcaaaactgaccctgtggatatttacaaatcttgggttaatcagatggagtctcagacaggagaggcaagcaaactgccctatgatgtgacccctgagcaggcgctagctcatgaagaagtgaagacacggctagacagctccatcaggaacatgcgggctgtgacagacaagtttctctcagccattgtcagctctgtggacaaaatcccttatgggatgcgcttcattgccaaagtgctgaaggactcgttgcatgagaagttccctgatgctggtgaggatgagctgctgaagattattggtaacttgctttattatcgatacatgaatccagccattgttgctcctgatgcctttgacatcattgacctgtcagcaggaggccagcttaccacagaccaacgccgaaatctgggctccattgcaaaaatgcttcagcatgctgcttccaataagatgtttctgggagataatgcccacttaagcatcattaatgaatatctttcccagtcctaccagaaattcagacggtttttccaaactgcttgtgatgtcccagagcttcaggataaatttaatgtggatgagtactctgatttagtaaccctcaccaaaccagtaatctacatttccattggtgaaatcatcaacacccacactctcctgttggatcaccaggatgccattgctccggagcacaatgatccaatccacgaactgctggacgacctcggcgaggtgcccaccatcgagtccctgataggggaaagctctggcaatttaaatgacccaaataaggaggcactggctaagacggaagtgtctctcaccctgaccaacaagttcgacgtgcctggagatgagaatgcagaaatggatgctcgaaccatcttactgaatacaaaacgtttaattgtggatgtcatccggttccagccaggagagaccttgactgaaatcctagaaacaccagccaccagtgaacaggaagcagaacatcagagagccatgcagagacgtgctatccgtgatgccaaaacacctgacaagatgaaaaagtcaaaatctgtaaaggaagacagcaacctcactcttcaagagaagaaagagaagatccagacaggtttaaagaagctaacagagcttggaaccgtggacccaaagaacaaataccaggaactgatcaacgacattgccagggatattcggaatcagcggaggtaccgacagaggagaaaggccgaactagtgaaactgcaacagacatacgctgctctgaactctaaggccaccttttatggggagcaggtggattactataaaagctatatcaaaacctgcttggataacttagccagcaagggcaaagtctccaaaaagcctagggaaatgaaaggaaagaaaagcaaaaagatttctctgaaatatacagcagcaagactacatgaaaaaggagttcttctggaaattgaggacctgcaagtgaatcagtttaaaaatgttatatttgaaatcagtccaacagaagaagttggagacttcgaagtgaaagccaaattcatgggagttcaaatggagacttttatgttacattatcaggacctgctgcagctacagtatgaaggagttgcagtcatgaaattatttgatagagctaaagtaaatgtcaacctcctgatcttccttctcaacaaaaagttctacgggaagtaattgatcgtttgctgccagcccagaaggatgaaggaaagaagcacctcacagctcctttctaggtccttctttcctcattggaagcaaagacctagccaacaacagcacctcaatctgatacactcccgatgccacatttttaactcctctcgctctgatgggacatttgttacccttttttcatagtgaaattgtgtttcaggcttagtctgacctttctggtttcttcattttcttccattacttaggaaagagtggaaactccactaaaatttctctgtgttgttacagtcttagaggttgcagtactatattgtaagctttggtgtttgtttaattagcaatagggatggtaggattcaaatgtgtgtcatttagaagtggaagctattagcaccaatgacataaatacatacaagacacagaactaaaatgtcatgttattaacagttattaggttgtcatttaaaaataaagttcctttatatttctgtcccatcaggaaaactgaaggatatggggaatcattggttatcttccattgtgtttttctttatggacaggagctaatggaagtgacagtcatgttcaaaggaagcatttctagaaaaaaggagataatgtttttaaatttcattatcaaacttgggcaattctgtttgtgtaactccccgactagtggatgggagagtcccattgctaaaattcagctactcagataaattcagaatgggtcaaggcacctgcctgtttttgttggtgcacagagattgacttgattcagagagacaattcactccatccctatggcagaggaatgggttagccctaatgtagaatgtcattgtttttaaaactgttttatatcttaagagtgccttattaaagtatagatgtatgtcttaaaatgtgggtgataggaattttaaagatttatataatgcatcaaaagccttagaataagaaaagctttttttaaattgctttatctgtatatctgaactcttgaaacttatagctaaaacactaggatttatctgcagtgttgcagggagataattctgccttaaattgtctaaaacaaaaacaaaaccagccaacctatgttacacgtgagattaaaaccaattttttccccattttttctccttttttctcttgctgcccacattgtgcctttattttatgagccccagttttctgggcttagtttaaaaaaaaaatcaagtctaaacattgcatttagaaagcttttgttcttggataaaaagtcatacactttaaaaaaaaaaaaaactttttccaggaaaatatattgaaatcatgctgctgagcctctattttctttctttgatgttttgattcagtattcttttatcataaatttttagcatttaaaaattcactgatgtacattaagccaataaactgctttaatgaataacaaactatgtagtgtgtccctattataaatgcattggagaagtatttttatgagactctttactcaggtgcatggttacagcccacagggaggcatggagtgccatggaaggattcgccactacccagaccttgttttttgttgtattttggaagacaggttttttaaagaaacattttcctcagattaaaagatgatgctattacaactagcattgcctcaaaaactgggaccaaccaaagtgtgtcaaccctgtttccttaaaagaggctatgaatcccaaaggccacatccaagacaggcaataatgagcagagtttacagctcctttaataaaatgtgtcagtaattttaaggtttatagttccctcaacacaattgctaatgcagaatagtgtaaaatgcgcttcaagaatgttgatgatgatgatatagaattgtggctttagtagcacagaggatgccccaacaaactcatggcgttgaaaccacacagttctcattactgttatttattagctgtagcattctctgtctcctctctctcctcctttgaccttctcctcgaccagtcgaagtgtgcacacttcgatcgcggagaatcacagtggtgttcaagaaccttttgaggccatccaagtttttgtccttcagtaccttgaaatctgataatctcaacatccagaaatagcctttgatttgttctttctctgatgtcttgtgtccttgggatcaaagcctctttcactggcaccaaataatgcccagtgaggagttctggccatataa

SEQ ID NO: 342112 - DNA, 4662 bp, Homo sapiens
gggtcggaagtcgcaggcgatctcgatagcgctttcgagcttggtgcatcctgccaggaccatataaatgacattatcaaaatccaggcttttattcgggcaaacaaagctcgggatgactacaagactctcatcaatgctgaggatcctcctatggttgtggtccgaaaatttgtccacctgctggaccaaagtgaccaggattttcaggaggagcttgaccttatgaagatgcgggaagaggttatcaccctcattcgttctaaccagcagctggagaatgacctcaatctcatggatatcaaaattggactgctagtgaaaaataagattacgttgcaggatgtggtttcccacagtaaaaaacttaccaaaaaaaataaggaacagttgtctgatatgatgatgataaataaacagaagggaggtctcaaggctttgagcaaggagaagagagagaagttggaagcttaccagcacctgttttatttattgcaaaccaatcccacctatctggccaagctcatttttcagatgccccagaacaagtccaccaagttcatggactctgtaatcttcacactctacaactacgcgtccaaccagcgagaggagtacctgctcctgcggctctttaagacagcactccaagaggaaatcaagtcgaaggtagatcagattcaagagattgtgacaggaaatcctacggttattaaaatggttgtaagtttcaaccgtggtgcccgtggccagaatgccctgagacagatcttggccccagtcgtgaaggaaattatggatgacaaatctctcaacatcaaaactgaccctgtggatatttacaaatcttgggttaatcagatggagtctcagacaggagaggcaagcaaactgccctatgatgtgacccctgagcaggcgctagctcatgaagaagtgaagacacggctagacagctccatcaggaacatgcgggctgtgacagacaagtttctctcagccattgtcagctctgtggacaaaatcccttatgggatgcgcttcattgccaaagtgctgaaggactcgttgcatgagaagttccctgatgctggtgaggatgagctgctgaagattattggtaacttgctttattatcgatacatgaatccagccattgttgctcctgatgcctttgacatcattgacctgtcagcaggaggccagcttaccacagaccaacgccgaaatctgggctccattgcaaaaatgcttcagcatgctgcttccaataagatgtttctgggagataatgcccacttaagcatcattaatgaatatctttcccagtcctaccagaaattcagacggtttttccaaactgcttgtgatgtcccagagcttcaggataaatttaatgtggatgagtactctgatttagtaaccctcaccaaaccagtaatctacatttccattggtgaaatcatcaacacccacactctcctgttggatcaccaggatgccattgctccggagcacaatgatccaatccacgaactgctggacgacctcggcgaggtgcccaccatcgagtccctgataggggaaagctctggcaatttaaatgacccaaataaggaggcactggctaagacggaagtgtctctcaccctgaccaacaagttcgacgtgcctggagatgagaatgcagaaatggatgctcgaaccatcttactgaatacaaaacgtttaattgtggatgtcatccggttccagccaggagagaccttgactgaaatcctagaaacaccagccaccagtgaacaggaagcagaacatcagagagccatgcagagacgtgctatccgtgatgccaaaacacctgacaagatgaaaaagtcaaaatctgtaaaggaagacagcaacctcactcttcaagagaagaaagagaagatccagacaggtttaaagaagctaacagagcttggaaccgtggacccaaagaacaaataccaggaactgatcaacgacattgccagggatattcggaatcagcggaggtaccgacagaggagaaaggccgaactagtgaaactgcaacagacatacgctgctctgaactctaaggccaccttttatggggagcaggtggattactataaaagctatatcaaaacctgcttggataacttagccagcaagggcaaagtctccaaaaagcctagggaaatgaaaggaaagaaaagcaaaaagatttctctgaaatatacagcagcaagactacatgaaaaaggagttcttctggaaattgaggacctgcaagtgaatcagtttaaaaatgttatatttgaaatcagtccaacagaagaagttggagacttcgaagtgaaagccaaattcatgggagttcaaatggagacttttatgttacattatcaggacctgctgcagctacagtatgaaggagttgcagtcatgaaattatttgatagagctaaagtaaatgtcaacctcctgatcttccttctcaacaaaaagttctacgggaagtaattgatcgtttgctgccagcccagaaggatgaaggaaagaagcacctcacagctcctttctaggtccttctttcctcattggaagcaaagacctagccaacaacagcacctcaatctgatacactcccgatgccacatttttaactcctctcgctctgatgggacatttgttacccttttttcatagtgaaattgtgtttcaggcttagtctgacctttctggtttcttcattttcttccattacttaggaaagagtggaaactccactaaaatttctctgtgttgttacagtcttagaggttgcagtactatattgtaagctttggtgtttgtttaattagcaatagggatggtaggattcaaatgtgtgtcatttagaagtggaagctattagcaccaatgacataaatacatacaagacacagaactaaaatgtcatgttattaacagttattaggttgtcatttaaaaataaagttcctttatatttctgtcccatcaggaaaactgaaggatatggggaatcattggttatcttccattgtgtttttctttatggacaggagctaatggaagtgacagtcatgttcaaaggaagcatttctagaaaaaaggagataatgtttttaaatttcattatcaaacttgggcaattctgtttgtgtaactccccgactagtggatgggagagtcccattgctaaaattcagctactcagataaattcagaatgggtcaaggcacctgcctgtttttgttggtgcacagagattgacttgattcagagagacaattcactccatccctatggcagaggaatgggttagccctaatgtagaatgtcattgtttttaaaactgttttatatcttaagagtgccttattaaagtatagatgtatgtcttaaaatgtgggtgataggaattttaaagatttatataatgcatcaaaagccttagaataagaaaagctttttttaaattgctttatctgtatatctgaactcttgaaacttatagctaaaacactaggatttatctgcagtgttgcagggagataattctgccttaaattgtctaaaacaaaaacaaaaccagccaacctatgttacacgtgagattaaaaccaattttttccccattttttctccttttttctcttgctgcccacattgtgcctttattttatgagccccagttttctgggcttagtttaaaaaaaaaatcaagtctaaacattgcatttagaaagcttttgttcttggataaaaagtcatacactttaaaaaaaaaaaaaactttttccaggaaaatatattgaaatcatgctgctgagcctctattttctttctttgatgttttgattcagtattcttttatcataaatttttagcatttaaaaattcactgatgtacattaagccaataaactgctttaatgaataacaaactatgtagtgtgtccctattataaatgcattggagaagtatttttatgagactctttactcaggtgcatggttacagcccacagggaggcatggagtgccatggaaggattcgccactacccagaccttgttttttgttgtattttggaagacaggttttttaaagaaacattttcctcagattaaaagatgatgctattacaactagcattgcctcaaaaactgggaccaaccaaagtgtgtcaaccctgtttccttaaaagaggctatgaatcccaaaggccacatccaagacaggcaataatgagcagagtttacagctcctttaataaaatgtgtcagtaattttaaggtttatagttccctcaacacaattgctaatgcagaatagtgtaaaatgcgcttcaagaatgttgatgatgatgatatagaattgtggctttagtagcacagaggatgccccaacaaactcatggcgttgaaaccacacagttctcattactgttatttattagctgtagcattctctgtctcctctctctcctcctttgaccttctcctcgaccagccatcatgacatttaccatgaatttacttcctcccaagagtttggactgcccgtcagattgtttctgcacatagttgcctttgtatctctgtatgaaataaaaggtcatttgtt

SEQ ID NO: 342113 - DNA, 3595 bp, Homo sapiens
tctagaggatcccggaaagactcgtggtggtgatgagctgctgaagattattggtaacttgctttattatcgatacatgaatccagccattgttgctcctgatgcctttgacatcattgacctgtcagcaggaggccagcttaccacagaccaacgccgaaatctgggctccattgcaaaaatgcttcagcatgctgcttccaataagatgtttctgggagataatgcccacttaagcatcattaatgaatatctttcccagtcctaccagaaattcagacggtttttccaaactgcttgtgatgtcccagagcttcaggataaatttaatgtggatgagtactctgatttagtaaccctcaccaaaccagtaatctacatttccattggtgaaatcatcaacacccacactctcctgttggatcaccaggatgccattgctccggagcacaatgatccaatccacgaactgctggacgacctcggcgaggtgcccaccatcgagtccctgataggggaaagctctggcaatttaaatgacccaaataaggaggcactggctaagacggaagtgtctctcaccctgaccaacaagttcgacgtgcctggagatgagaatgcagaaatggatgctcgaaccatcttactgaatacaaaacgtttaattgtggatgtcatccggttccagccaggagagaccttgactgaaatcctagaaacaccagccaccagtgaacaggaagcagaacatcagagagccatgcagagacgtgctatccgtgatgccaaaacacctgacaagatgaaaaagtcaaaatctgtaaaggaagacagcaacctcactcttcaagagaagaaagagaagatccagacaggtttaaagaagctaacagagcttggaaccgtggacccaaagaacaaataccaggaactgatcaacgacattgccagggatattcggaatcagcggaggtaccgacagaggagaaaggccgaactagtgaaactgcaacagacatacgctgctctgaactctaaggccaccttttatggggagcaggtggattactataaaagctatatcaaaacctgcttggataacttagccagcaagggcaaagtctccaaaaagcctagggaaatgaaaggaaagaaaagcaaaaagatttctctgaaatatacagcagcaagactacatgaaaaaggagttcttctggaaattgaggacctgcaagtgaatcagtttaaaaatgttatatttgaaatcagtccaacagaagaagttggagacttcgaagtgaaagccaaattcatgggagttcaaatggagacttttatgttacattatcaggacctgctgcagctacagtatgaaggagttgcagtcatgaaattatttgatagagctaaagtaaatgtcaacctcctgatcttccttctcaacaaaaagttctacgggaagtaattgatcgtttgctgccagcccagaaggatgaaggaaagaagcacctcacagctcctttctaggtccttctttcctcattggaagcaaagacctagccaacaacagcacctcaatctgatacactcccgatgccacatttttaactcctctcgctctgatgggacatttgttacccttttttcatagtgaaattgtgtttcaggcttagtctgacctttctggtttcttcattttcttccattacttaggaaagagtggaaactccactaaaatttctctgtgttgttacagtcttagaggttgcagtactatattgtaagctttggtgtttgtttaattagcaatagggatggtaggattcaaatgtgtgtcatttagaagtggaagctattagcaccaatgacataaatacatacaagacacagaactaaaatgtcatgttattaacagttattaggttgtcatttaaaaataaagttcctttatatttctgtcccatcaggaaaactgaaggatatggggaatcattggttatcttccattgtgtttttctttatggacaggagctaatggaagtgacagtcatgttcaaaggaagcatttctagaaaaaaggagataatgtttttaaatttcattatcaaacttgggcaattctgtttgtgtaactccccgactagtggatgggagagtcccattgctaaaattcagctactcagataaattcagaatgggtcaaggcacctgcctgtttttgttggtgcacagagattgacttgattcagagagacaattcactccatccctatggcagaggaatgggttagccctaatgtagaatgtcattgtttttaaaactgttttatatcttaagagtgccttattaaagtatagatgtatgtcttaaaatgtgggtgataggaattttaaagatttatataatgcatcaaaagccttagaataagaaaagctttttttaaattgctttatctgtatatctgaactcttgaaacttatagctaaaacactaggatttatctgcagtgttgcagggagataattctgccttaaattgtctaaaacaaaaacaaaaccagccaacctatgttacacgtgagattaaaaccaattttttccccattttttctccttttttctcttgctgcccacattgtgcctttattttatgagccccagttttctgggcttagtttaaaaaaaaaatcaagtctaaacattgcatttagaaagcttttgttcttggataaaaagtcatacactttaaaaaaaaaaaaaactttttccaggaaaatatattgaaatcatgctgctgagcctctattttctttctttgatgttttgattcagtattcttttatcataaatttttagcatttaaaaattcactgatgtacattaagccaataaactgctttaatgaataacaaactatgtagtgtgtccctattataaatgcattggagaagtatttttatgagactctttactcaggtgcatggttacagcccacagggaggcatggagtgccatggaaggattcgccactacccagaccttgttttttgttgtattttggaagacaggttttttaaagaaacattttcctcagattaaaagatgatgctattacaactagcattgcctcaaaaactgggaccaaccaaagtgtgtcaaccctgtttccttaaaagaggctatgaatcccaaaggccacatccaagacaggcaataatgagcagagtttacagctcctttaataaaatgtgtcagtaattttaaggtttatagttccctcaacacaattgctaatgcagaatagtgtaaaatgcgcttcaagaatgttgatgatgatgatatagaattgtggctttagtagcacagaggatgccccaacaaactcatggcgttgaaaccacacagttctcattactgttatttattagctgtagcattctctgtctcctctctctcctcctttgaccttctcctcgaccagccatcatgacatttaccatgaatttacttcctcccaagagtttggactgcccgtcagattgtttctgcacatagttgcctttgtatctctgtatgaaataaaaggtcatttgtt

SEQ ID NO: 342114 - DNA, 3259 bp, Homo sapiens
atcagcaaaatattccttagcttctttagctgtgctagaacccaatcctttatagtactttattttccaggctttctggttttctatatggtggctccattcgacaaattcaggaatactgtagaaggagaagtatagaagatagaaaaatataaagccaaaaattggataaaatagcactgatgggagcaagatgcgcgcatcttgctcccatcaggcactggctaagacggaagtgtctctcaccctgaccaacaagttcgacgtgcctggagatgagaatgcagaaatggatgctcgaaccatcttactgaatacaaaacgtttaattgtggatgtcatccggttccagccaggagagaccttgactgaaatcctagaaacaccagccaccagtgaacaggaagcagaacatcagagagccatgcagagacgtgctatccgtgatgccaaaacacctgacaagatgaaaaagtcaaaatctgtaaaggaagacagcaacctcactcttcaagagaagaaagagaagatccagacaggtttaaagaagctaacagagcttggaaccgtggacccaaagaacaaataccaggaactgatcaacgacattgccagggatattcggaatcagcggaggtaccgacagaggagaaaggccgaactagtgaaactgcaacagacatacgctgctctgaactctaaggccaccttttatggggagcaggtggattactataaaagctatatcaaaacctgcttggataacttagccagcaagggcaaagtctccaaaaagcctagggaaatgaaaggaaagaaaagcaaaaagatttctctgaaatatacagcagcaagactacatgaaaaaggagttcttctggaaattgaggacctgcaagtgaatcagtttaaaaatgttatatttgaaatcagtccaacagaagaagttggagacttcgaagtgaaagccaaattcatgggagttcaaatggagacttttatgttacattatcaggacctgctgcagctacagtatgaaggagttgcagtcatgaaattatttgatagagctaaagtaaatgtcaacctcctgatcttccttctcaacaaaaagttctacgggaagtaattgatcgtttgctgccagcccagaaggatgaaggaaagaagcacctcacagctcctttctaggtccttctttcctcattggaagcaaagacctagccaacaacagcacctcaatctgatacactcccgatgccacatttttaactcctctcgctctgatgggacatttgttacccttttttcatagtgaaattgtgtttcaggcttagtctgacctttctggtttcttcattttcttccattacttaggaaagagtggaaactccactaaaatttctctgtgttgttacagtcttagaggttgcagtactatattgtaagctttggtgtttgtttaattagcaatagggatggtaggattcaaatgtgtgtcatttagaagtggaagctattagcaccaatgacataaatacatacaagacacagaactaaaatgtcatgttattaacagttattaggttgtcatttaaaaataaagttcctttatatttctgtcccatcaggaaaactgaaggatatggggaatcattggttatcttccattgtgtttttctttatggacaggagctaatggaagtgacagtcatgttcaaaggaagcatttctagaaaaaaggagataatgtttttaaatttcattatcaaacttgggcaattctgtttgtgtaactccccgactagtggatgggagagtcccattgctaaaattcagctactcagataaattcagaatgggtcaaggcacctgcctgtttttgttggtgcacagagattgacttgattcagagagacaattcactccatccctatggcagaggaatgggttagccctaatgtagaatgtcattgtttttaaaactgttttatatcttaagagtgccttattaaagtatagatgtatgtcttaaaatgtgggtgataggaattttaaagatttatataatgcatcaaaagccttagaataagaaaagctttttttaaattgctttatctgtatatctgaactcttgaaacttatagctaaaacactaggatttatctgcagtgttgcagggagataattctgccttaaattgtctaaaacaaaaacaaaaccagccaacctatgttacacgtgagattaaaaccaattttttccccattttttctccttttttctcttgctgcccacattgtgcctttattttatgagccccagttttctgggcttagtttaaaaaaaaaatcaagtctaaacattgcatttagaaagcttttgttcttggataaaaagtcatacactttaaaaaaaaaaaaaactttttccaggaaaatatattgaaatcatgctgctgagcctctattttctttctttgatgttttgattcagtattcttttatcataaatttttagcatttaaaaattcactgatgtacattaagccaataaactgctttaatgaataacaaactatgtagtgtgtccctattataaatgcattggagaagtatttttatgagactctttactcaggtgcatggttacagcccacagggaggcatggagtgccatggaaggattcgccactacccagaccttgttttttgttgtattttggaagacaggttttttaaagaaacattttcctcagattaaaagatgatgctattacaactagcattgcctcaaaaactgggaccaaccaaagtgtgtcaaccctgtttccttaaaagaggctatgaatcccaaaggccacatccaagacaggcaataatgagcagagtttacagctcctttaataaaatgtgtcagtaattttaaggtttatagttccctcaacacaattgctaatgcagaatagtgtaaaatgcgcttcaagaatgttgatgatgatgatatagaattgtggctttagtagcacagaggatgccccaacaaactcatggcgttgaaaccacacagttctcattactgttatttattagctgtagcattctctgtctcctctctctcctcctttgaccttctcctcgaccagccatcatgacatttaccatgaatttacttcctcccaagagtttggactgcccgtcagattgtttctgcacatagttgcctttgtatctctgtatgaaataaaaggtcatttgtt

SEQ ID NO: 342115 - DNA, 6192 bp, Homo sapiens
ggtattaaaactgatcttttgacatttttgacaatgttcttataaattactttcttttttatcatatatggatgggatgaagcacagagtaagatagagtgcacagcaaaggggatctgcccctcctatctgtccaataccccacaggttttggtgataatcttgggcaatgttccagtcaaacctgcctcccacttctcactaaagttagtgaacatgtgacccacattccccaaataagagcctcttataaactccattcttggctttttcattcatagagatagctattttatgagacatagataaagcattttttagtgatgtgcacgatgccttttttcttaattattaacttctcaaaacataaacacattggaggcacttaataaagggagctgtagctaccgccgtccgcgcctccaaggtttcacggcttcctcagcagagactcgggctcgtccgccatgtccgccgcagacgaggttgacgggctgggcgtggcccggccgcactatggctctgtcctggataatgaaagacttactgcagaggagatggatgaaaggagacgtcagaacgtggcttatgagtacctttgtcatttggaagaagcgaagaggtggatggaagcatgcctaggggaagatctgcctcccaccacagaactggaggaggggcttaggaatggggtctaccttgccaaactggggaacttcttctctcccaaagtagtgtccctgaaaaaaatctatgatcgagaacagaccagatacaaggcgactggcctccactttagacacactgataatgtgattcagtggttgaatgccatggatgagattggattgcctaagattttttacccagaaactacagatatctatgatcgaaagaacatgccaagatgtatctactgtatccatgcactcagtttgtacctgttcaagctaggcctggcccctcagattcaagacctatatggaaaggttgacttcacagaagaagaaatcaacaacatgaagactgagttggagaagtatggcatccagatgcctgcctttagcaagattgggggcatcttggctaatgaactgtcagtggatgaagccgcattacatgctgctgttattgctattaatgaagctattgaccgtagaattccagccgacacatttgcagctttgaaaaatccgaatgccatgcttgtaaatcttgaagagcccttggcatccacttaccaggatatactttaccaggctaagcaggacaaaatgacaaatgctaaaaacaggacagaaaactcagagagagaaagagatgtttatgaggagctgctcacgcaagctgaaattcaaggcaatataaacaaagtcaatacattttctgcattagcaaatatcgacctggctttagaacaaggagatgcactggccttgttcagggctctgcagtcaccagccctggggcttcgaggactgcagcaacagaatagcgactggtacttgaagcagctcctgagtgataaacagcagaagagacagagtggtcagactgaccccctgcagaaggaggagctgcagtctggagtggatgctgcaaacagtgctgcccagcaatatcagagaagattggcagcagtagcactgattaatgctgcaatccagaagggtgttgctgagaagactgttttggaactgatgaatcccgaagcccagctgccccaggtgtatccatttgccgccgatctctatcagaaggagctggctaccctgcagcgacaaagtcctgaacataatctcacccacccagagctctctgtcgcagtggagatgttgtcatcggtggccctgatcaacagggcattggaatcaggagatgtgaatacagtgtggaagcaattgagcagttcagttactggtcttaccaatattgaggaagaaaactgtcagaggtatctcgatgagttgatgaaactgaaggctcaggcacatgcagagaataatgaattcattacatggaatgatatccaagcttgcgtggaccatgtgaacctggtggtgcaagaggaacatgagaggattttagccattggtttaattaatgaagccctggatgaaggtgatgcccaaaagactctgcaggccctacagattcctgcagctaaacttgagggagtccttgcagaagtggcccagcattaccaagacacgctgattagagcgaagagagagaaagcccaggaaatccaggatgagtcagctgtgttatggttggatgaaattcaaggtggaatctggcagtccaacaaagacacccaagaagcacagaagtttgccttaggaatctttgccattaatgaggcagtagaaagtggtgatgttggcaaaacactgagtgcccttcgctcccctgatgttggcttgtatggagtcatccctgagtgtggtgaaacttaccacagtgatcttgctgaagccaagaagaaaaaactggcagtaggagataataacagcaagtgggtgaagcactgggtaaaaggtggatattattattaccacaatctggagacccaggaaggaggatgggatgaacctccaaattttgtgcaaaattctatgcagctttctcgggaggagatccagagttctatctctggggtgactgccgcatataaccgagaacagctgtggctggccaatgaaggcctgatcaccaggctgcaggctcgctgccgtggatacttagttcgacaggaattccgatccaggatgaatttcctgaagaaacaaatccctgccatcacctgcattcagtcacagtggagaggatacaagcagaagaaggcatatcaagatcggttagcttacctgcgctcccacaaagatgaagttgtaaagattcagtccctggcaaggatgcaccaagctcgaaagcgctatcgagatcgcctgcagtacttccgggaccatataaatgacattatcaaaatccaggcttttattcgggcaaacaaagctcgggatgactacaagactctcatcaatgctgaggatcctcctatggttgtggtccgaaaatttgtccacctgctggaccaaagtgaccaggattttcaggaggagcttgaccttatgaagatgcgggaagaggttatcaccctcattcgttctaaccagcagctggagaatgacctcaatctcatggatatcaaaattggactgctagtgaaaaataagattacgttgcaggatgtggtttcccacagtaaaaaacttaccaaaaaaaataaggaacagttgtctgatatgatgatgataaataaacagaagggaggtctcaaggctttgagcaaggagaagagagagaagttggaagcttaccagcacctgttttatttattgcaaaccaatcccacctatctggccaagctcatttttcagatgccccagaacaagtccaccaagttcatggactctgtaatcttcacactctacaactacgcgtccaaccagcgagaggagtacctgctcctgcggctctttaagacagcactccaagaggaaatcaagtcgaaggtagatcagattcaagagattgtgacaggaaatcctacggttattaaaatggttgtaagtttcaaccgtggtgcccgtggccagaatgccctgagacagatcttggccccagtcgtgaaggaaattatggatgacaaatctctcaacatcaaaactgaccctgtggatatttacaaatcttgggttaatcagatggagtctcagacaggagaggcaagcaaactgccctatgatgtgacccctgagcaggcgctagctcatgaagaagtgaagacacggctagacagctccatcaggaacatgcgggctgtgacagacaagtttctctcagccattgtcagctctgtggacaaaatcccttatgggatgcgcttcattgccaaagtgctgaaggactcgttgcatgagaagttccctgatgctggtgaggatgagctgctgaagattattggtaacttgctttattatcgatacatgaatccagccattgttgctcctgatgcctttgacatcattgacctgtcagcaggaggccagcttaccacagaccaacgccgaaatctgggctccattgcaaaaatgcttcagcatgctgcttccaataagatgtttctgggagataatgcccacttaagcatcattaatgaatatctttcccagtcctaccagaaattcagacggtttttccaaactgcttgtgatgtcccagagcttcaggataaatttaatgtggatgagtactctgatttagtaaccctcaccaaaccagtaatctacatttccattggtgaaatcatcaacacccacactctcctgttggatcaccaggatgccattgctccggagcacaatgatccaatccacgaactgctggacgacctcggcgaggtgcccaccatcgagtccctgataggggaaagctctggcaatttaaatgacccaaataaggaggcactggctaagacggaagtgtctctcaccctgaccaacaagttcgacgtgcctggagatgagaatgcagaaatggatgctcgaaccatcttactgaatacaaaacgtttaattgtggatgtcatccggttccagccaggagagaccttgactgaaatcctagaaacaccagccaccagtgaacaggaagcagaacatcagagagccatgcagagacgtgctatccgtgatgccaaaacacctgacaagatgaaaaagtcaaaatctgtaaaggaagacagcaacctcactcttcaagagaagaaagagaagatccagacaggtttaaagaagctaacagagcttggaaccgtggacccaaagaacaaataccaggaactgatcaacgacattgccagggatattcggaatcagcggaggtaccgacagaggagaaaggccgaactagtgaaactgcaacagacatacgctgctctgaactctaaggccaccttttatggggagcaggtggattactataaaagctatatcaaaacctgcttggataacttagccagcaagggcaaagtctccaaaaagcctagggaaatgaaaggaaagaaaagcaaaaagatttctctgaaatatacagcagcaagactacatgaaaaaggagttcttctggaaattgaggacctgcaagtgaatcagtttaaaaatgttatatttgaaatcagtccaacagaagaagttggagacttcgaagtgaaagccaaattcatgggagttcaaatggagacttttatgttacattatcaggacctgctgcagctacagtatgaaggagttgcagtcatgaaattatttgatagagctaaagtaaatgtcaacctcctgatcttccttctcaacaaaaagttctacgggaagtaattgatcgtttgctgccagcccagaaggatgaaggaaagaagcacctcacagctcctttctaggtccttctttcctcattggaagcaaagacctagccaacaacagcacctcaatctgatacactcccgatgccacatttttaactcctctcgctctgatgggacatttgttacccttttttcatagtgaaattgtgtttcaggcttagtctgacctttctggtttcttcattttcttccattacttaggaaagagtggaaactccactaaaatttctctgtgttgttacagtcttagaggttgcagtactatattgtaagctttggtgtttgtttaattagcaatagggatggtaggattcaaatgtgtgtcatttagaagtggaagctattagcaccaatgacataaatacatacaagacacagaactaaaatgtcatgttattaacagttattaggttgtcatttaaaaataaagttcctttatatttctgtcccatcaggaaaactgaaggatatggggaatcattggttatcttccattgtgtttttctttatggacaggagctaatggaagtgacagtcatgttcaaaggaagcatttctagaaaaaaggagataatgtttttaaatttcattatcaaacttgggcaattctgtttgtgtaactccccgactagtggatgggagagtcccatagggttttttcagtacgacagtgcaatacacagtgagtgatcgagctcgcatga

SEQ ID NO: 342116 - DNA, 4383 bp, Homo sapiens
ggtattaaaactgatcttttgacatttttgacaatgttcttataaattactttcttttttatcatatatggatgggatgaagcacagagtaagatagagtgcacagcaaaggggatctgcccctcctatctgtccaataccccacaggttttggtgataatcttgggcaatgttccagtcaaacctgcctcccacttctcactaaagttagtgaacatgtgacccacattccccaaataagagcctcttataaactccattcttggctttttcattcatagagatagctattttatgagacatagataaagcattttttagtgatgtgcacgatgccttttttcttaattattaacttctcaaaacataaacacattggaggcacttaataaagggagctgtagctaccgccgtccgcgcctccaaggtttcacggcttcctcagcagagactcgggctcgtccgccatgtccgccgcagacgaggttgacgggctgggcgtggcccggccgcactatggctctgtcctggataatgaaagacttactgcagaggagatggatgaaaggagacgtcagaacgtggcttatgagtacctttgtcatttggaagaagcgaagaggtggatggaagcatgcctaggggaagatctgcctcccaccacagaactggaggaggggcttaggaatggggtctaccttgccaaactggggaacttcttctctcccaaagtagtgtccctgaaaaaaatctatgatcgagaacagaccagatacaaggcgactggcctccactttagacacactgataatgtgattcagtggttgaatgccatggatgagattggattgcctaagattttttacccagaaactacagatatctatgatcgaaagaacatgccaagatgtatctactgtatccatgcactcagtttgtacctgttcaagctaggcctggcccctcagattcaagacctatatggaaaggttgacttcacagaagaagaaatcaacaacatgaagactgagttggagaagtatggcatccagatgcctgcctttagcaagattgggggcatcttggctaatgaactgtcagtggatgaagccgcattacatgctgctgttattgctattaatgaagctattgaccgtagaattccagccgacacatttgcagctttgaaaaatccgaatgccatgcttgtaaatcttgaagagcccttggcatccacttaccaggatatactttaccaggctaagcaggacaaaatgacaaatgctaaaaacaggacagaaaactcagagagagaaagagatgtttatgaggagctgctcacgcaagctgaaattcaaggcaatataaacaaagtcaatacattttctgcattagcaaatatcgacctggctttagaacaaggagatgcactggccttgttcagggctctgcagtcaccagccctggggcttcgaggactgcagcaacagaatagcgactggtacttgaagcagctcctgagtgataaacagcagaagagacagagtggtcagactgaccccctgcagaaggaggagctgcagtctggagtggatgctgcaaacagtgctgcccagcaatatcagagaagattggcagcagtagcactgattaatgctgcaatccagaagggtgttgctgagaagactgttttggaactgatgaatcccgaagcccagctgccccaggtgtatccatttgccgccgatctctatcagaaggagctggctaccctgcagcgacaaagtcctgaacataatctcacccacccagagctctctgtcgcagtggagatgttgtcatcggtggccctgatcaacagggcattggaatcaggagatgtgaatacagtgtggaagcaattgagcagttcagttactggtcttaccaatattgaggaagaaaactgtcagaggtatctcgatgagttgatgaaactgaaggctcaggcacatgcagagaataatgaattcattacatggaatgatatccaagcttgcgtggaccatgtgaacctggtggtgcaagaggaacatgagaggattttagccattggtttaattaatgaagccctggatgaaggtgatgcccaaaagactctgcaggccctacagattcctgcagctaaacttgagggagtccttgcagaagtggcccagcattaccaagacacgctgattagagcgaagagagagaaagcccaggaaatccaggatgagtcagctgtgttatggttggatgaaattcaaggtggaatctggcagtccaacaaagacacccaagaagcacagaagtttgccttaggaatctttgccattaatgaggcagtagaaagtggtgatgttggcaaaacactgagtgcccttcgctcccctgatgttggcttgtatggagtcatccctgagtgtggtgaaacttaccacagtgatcttgctgaagccaagaagaaaaaactggcagtaggagataataacagcaagtgggtgaagcactgggtaaaaggtggatattattattaccacaatctggagacccaggaaggaggatgggatgaacctccaaattttgtgcaaaattctatgcagctttctcgggaggagatccagagttctatctctggggtgactgccgcatataaccgagaacagctgtggctggccaatgaaggcctgatcaccaggctgcaggctcgctgccgtggatacttagttcgacaggaattccgatccaggatgaatttcctgaagaaacaaatccctgccatcacctgcattcagtcacagtggagaggatacaagcagaagaaggcatatcaagatcggttagcttacctgcgctcccacaaagatgaagttgtaaagattcagtccctggcaaggatgcaccaagctcgaaagcgctatcgagatcgcctgcagtacttccgggaccatataaatgacattatcaaaatccaggcttttattcgggcaaacaaagctcgggatgactacaagactctcatcaatgctgaggatcctcctatggttgtggtccgaaaatttgtccacctgctggaccaaagtgaccaggattttcaggaggagcttgaccttatgaagatgcgggaagaggttatcaccctcattcgttctaaccagcagctggagaatgacctcaatctcatggatatcaaaattggactgctagtgaaaaataagattacgttgcaggatgtggtttcccacagtaaaaaacttaccaaaaaaaataaggaacagttgtctgatatgatgatgataaataaacagaagggaggtctcaaggctttgagcaaggagaagagagagaagttggaagcttaccagcacctgttttatttattgcaaaccaatcccacctatctggccaagctcatttttcagatgccccagaacaagtccaccaagttcatggactctgtaatcttcacactctacaactacgcgtccaaccagcgagaggagtacctgctcctgcggctctttaagacagcactccaagaggaaatcaagtcgaaggtagatcagattcaagagattgtgacaggaaatcctacggttattaaaatggttgtaagtttcaaccgtggtgcccgtggccagaatgccctgagacagatcttggccccagtcgtgaaggaaattatggatgacaaatctctcaacatcaaaactgaccctgtggatatttacaaatcttgggttaatcagatggagtctcagacaggagaggcaagcaaactgccctatgatgtgacccctgagcaggcgctagctcatgaagaagtgaagacacggctagacagctccatcaggaacatgcgggctgtgacagacaagtttctctcagccattgtcagctctgtggacaaaatcccttatgggatgcgcttcattgccaaagtgctgaaggactcgttgcatgagaagttccctgatgctggtgaggatgagctgctgaagattattggtaacttgctttattatcgatacatgaatccagccattgttgctcctgatgcctttgacatcattgacctgtcagcaggaggccagcttaccacagaccaacgccgaaatctgggctccattgcaaaaatgcttcagcatgctgcttccaataagatgtttctgggagataatgcccacttaagcatcattaatgaatatctttcccagtcctaccagaaattcagacggtttttccaaactgcttgtgatgtcccagagcttcaggataaatttaatgtggatgagtactctgatttagtaaccctcaccaaacctgacccaggcaaatagtattcctacccggtgccggctc

SEQ ID NO: 342117 - DNA, 3282 bp, Homo sapiens
ggtattaaaactgatcttttgacatttttgacaatgttcttataaattactttcttttttatcatatatggatgggatgaagcacagagtaagatagagtgcacagcaaaggggatctgcccctcctatctgtccaataccccacaggttttggtgataatcttgggcaatgttccagtcaaacctgcctcccacttctcactaaagttagtgaacatgtgacccacattccccaaataagagcctcttataaactccattcttggctttttcattcatagagatagctattttatgagacatagataaagcattttttagtgatgtgcacgatgccttttttcttaattattaacttctcaaaacataaacacattggaggcacttaataaagggagctgtagctaccgccgtccgcgcctccaaggtttcacggcttcctcagcagagactcgggctcgtccgccatgtccgccgcagacgaggttgacgggctgggcgtggcccggccgcactatggctctgtcctggataatgaaagacttactgcagaggagatggatgaaaggagacgtcagaacgtggcttatgagtacctttgtcatttggaagaagcgaagaggtggatggaagcatgcctaggggaagatctgcctcccaccacagaactggaggaggggcttaggaatggggtctaccttgccaaactggggaacttcttctctcccaaagtagtgtccctgaaaaaaatctatgatcgagaacagaccagatacaaggcgactggcctccactttagacacactgataatgtgattcagtggttgaatgccatggatgagattggattgcctaagattttttacccagaaactacagatatctatgatcgaaagaacatgccaagatgtatctactgtatccatgcactcagtttgtacctgttcaagctaggcctggcccctcagattcaagacctatatggaaaggttgacttcacagaagaagaaatcaacaacatgaagactgagttggagaagtatggcatccagatgcctgcctttagcaagattgggggcatcttggctaatgaactgtcagtggatgaagccgcattacatgctgctgttattgctattaatgaagctattgaccgtagaattccagccgacacatttgcagctttgaaaaatccgaatgccatgcttgtaaatcttgaagagcccttggcatccacttaccaggatatactttaccaggctaagcaggacaaaatgacaaatgctaaaaacaggacagaaaactcagagagagaaagagatgtttatgaggagctgctcacgcaagctgaaattcaaggcaatataaacaaagtcaatacattttctgcattagcaaatatcgacctggctttagaacaaggagatgcactggccttgttcagggctctgcagtcaccagccctggggcttcgaggactgcagcaacagaatagcgactggtacttgaagcagctcctgagtgataaacagcagaagagacagagtggtcagactgaccccctgcagaaggaggagctgcagtctggagtggatgctgcaaacagtgctgcccagcaatatcagagaagattggcagcagtagcactgattaatgctgcaatccagaagggtgttgctgagaagactgttttggaactgatgaatcccgaagcccagctgccccaggtgtatccatttgccgccgatctctatcagaaggagctggctaccctgcagcgacaaagtcctgaacataatctcacccacccagagctctctgtcgcagtggagatgttgtcatcggtggccctgatcaacagggcattggaatcaggagatgtgaatacagtgtggaagcaattgagcagttcagttactggtcttaccaatattgaggaagaaaactgtcagaggtatctcgatgagttgatgaaactgaaggctcaggcacatgcagagaataatgaattcattacatggaatgatatccaagcttgcgtggaccatgtgaacctggtggtgcaagaggaacatgagaggattttagccattggtttaattaatgaagccctggatgaaggtgatgcccaaaagactctgcaggccctacagattcctgcagctaaacttgagggagtccttgcagaagtggcccagcattaccaagacacgctgattagagcgaagagagagaaagcccaggaaatccaggatgagtcagctgtgttatggttggatgaaattcaaggtggaatctggcagtccaacaaagacacccaagaagcacagaagtttgccttaggaatctttgccattaatgaggcagtagaaagtggtgatgttggcaaaacactgagtgcccttcgctcccctgatgttggcttgtatggagtcatccctgagtgtggtgaaacttaccacagtgatcttgctgaagccaagaagaaaaaactggcagtaggagataataacagcaagtgggtgaagcactgggtaaaaggtggatattattattaccacaatctggagacccaggaaggaggatgggatgaacctccaaattttgtgcaaaattctatgcagctttctcgggaggagatccagagttctatctctggggtgactgccgcatataaccgagaacagctgtggctggccaatgaaggcctgatcaccaggctgcaggctcgctgccgtggatacttagttcgacaggaattccgatccaggatgaatttcctgaagaaacaaatccctgccatcacctgcattcagtcacagtggagaggatacaagcagaagaaggcatatcaagatcggttagcttacctgcgctcccacaaagatgaagttgtaaagattcagtccctggcaaggatgcaccaagctcgaaagcgctatcgagatcgcctgcagtacttccgggaccatataaatgacattatcaaaatccaggcttttattcgggcaaacaaagctcgggatgactacaagactctcatcaatgctgaggatcctcctatggttgtggtccgaaaatttgtccacctgctggaccaaagtgaccaggattttcaggaggagcttgaccttatgaagatgcgggaagaggttatcaccctcattcgttctaaccagcagctggagaatgacctcaatctcatggatatcaaaattggactgctagtgaaaaataagattacgttgcaggatgtggtttcccacagtaaaaaacttacca

SEQ ID NO: 342118 - DNA, 1047 bp, Homo sapiens
ggtattaaaactgatcttttgacatttttgacaatgttcttataaattactttcttttttatcatatatggatgggatgaagcacagagtaagatagagtgcacagcaaaggggatctgcccctcctatctgtccaataccccacaggttttggtgataatcttgggcaatgttccagtcaaacctgcctcccacttctcactaaagttagtgaacatgtgacccacattccccaaataagagcctcttataaactccattcttggctttttcattcatagagatagctattttatgagacatagataaagcattttttagtgatgtgcacgatgccttttttcttaattattaacttctcaaaacataaacacattggaggcacttaataaagggagctgtagctaccgccgtccgcgcctccaaggtttcacggcttcctcagcagagactcgggctcgtccgccatgtccgccgcagacgaggttgacgggctgggcgtggcccggccgcactatggctctgtcctggataatgaaagacttactgcagaggagatggatgaaaggagacgtcagaacgtggcttatgagtacctttgtcatttggaagaagcgaagaggtggatggaagcatgcctaggggaagatctgcctcccaccacagaactggaggaggggcttaggaatggggtctaccttgccaaactggggaacttcttctctcccaaagtagtgtccctgaaaaaaatctatgatcgagaacagaccagatacaaggcgactggcctccactttagacacactgataatgtgattcagtggttgaatgccatggatgagattggattgcctaaggtaacttacctgagataatagtttaggctttgttccagctgttgtggcataaccctcaaacaacctgttctcattctacctgtaaaattattctcagaatctttggtgtttttttaaatactaaaagatgtctttctttttgacttaggaaatagttttgttctttttcttttataatcctcatacctgt

SEQ ID NO: 342119 - DNA, 832 bp, Homo sapiens
tgtagtggctcatatctgtaatctcagtactttgggagatgaaggtgagaggattgcttgaggccaggagttcaggaccaacatgggcaataccacaagaccccatctctacaaaaaaccttaaaaattagcttggcgtggtgtgcacctgtactatctactcaagaggctgtggagacagcatcacttgagtccgggagtttgaggctgcagtgagccatgaccatatcactatattccagtccaggtaacagtgacaatctgtctcttaaaaaataaaataaattgaaaaagaaaagggacattaagaagagcaggaggtgaaatagagggagagagagggccaggagagggaggaagaggaggaagaagaggagaaagaggagaagaaagaaaacctaaattcgaggaaactccagaattacctaaaactgaataatgtgctaagctatcacagaaactattttggcataattctgaatgaacctacataaggaataaagaaattgcaaaacaaattctcaatgcattaaataaattagctggtctaaacagcaaacagatgtgaaacctggaaactactattaaacattaaagaatgcagtagtctcgatgctgctcacccccagagccagcagccattgcatgcagttctttgccactttcagcttccactaagtttcaccatctaggttatcagttctaataaacatgaaccttggaagtagggaacaaaaatttaccactcttgaattgtgttagagaaggtttttcctgagctacaggtgctattaaagcataattccaaggcacagtgggacaaagaaataac

SEQ ID NO: 342120 - DNA, 406 bp, Homo sapiens
ccccactcccagcattacaggagatacattttaagattgtgagctcggtgggctatgactcgtctagtcatcctggtctctaactctgacccccaaacagcccttgacccacaccgtttgcgttcagtgaacgcgacagatttcctgccccctccgtaaccagatccccaccccaccccgcggcctccgcgttccacaatcaggacgcatttgttaaaaaatgtgccggataattaaaaaaaaaaaaaagaaagaaaaaagaaaggaaaagaaagaaacgtgccggagaggcgcggaacgggcgagggccaggaggccccagcaaagcctgcagaggtttatcccgcccgttacgaggcccaaggccatcgcccggtgaagcggggtgggccctgggcgcggccgc

SEQ ID NO: 342121 - DNA, 1439 bp, Homo sapiens
cagatgcaaggtgggcgtttggttaacgtgatggggacgtggggacacagtccaaagagctggctgcctggcgtccacgcagagttggaagccctatgccactgggtagacgcgggtgaaagggaagccggatcgtgatggtgggcaaaccaggatccgggaagtgttggggtgcgcggatgagggggcgcgacggccagggtggccagaagagtaggtttgggagctgcccagcccggcctctaaccctgctctcttgcagaccgtacgcgtccagggcaatgacatctcacaccggcttcggctgtctgccgtgcggctgcaggacgagggcgtgtacgagtgccgcgtgtcggactacagcgacgacgacacgcaggagcacaaggcccaggcgatgctgcgcgtgctctcgcgcttcgcgccgcccaacatgcaggccgccgaggccgtgtcccacatccagagcagcggcccgcgtcgccacggcccagccagcgccgccaacgccaacaacgcgggcgccgcgagccgtaccacctccgagcccggccgcggcgacaagagcccgccgcccgggagccctcccgccgccatcgatcccgcagtccccgaggccgcggcagcctcggcggcccacacgcccaccaccacagtcgcggcagctgctgctgcctcgtcagcgtcgccgccatcgggacaggcggtcctgctgcgccagaggcacggctcgggcaccggccgtagctacaccacagacccactcttgtccctgctcctgttagctctgcataagttcctgcgcctgctcttgggacattgacagacaagaccaacccgagcatctcagaggccgcacatgacctgcccggggccctcggtgaggaccatgtcgctggatggacacagagagactgagagacgcatgaaaaagtccacatggaacaatcaataaatcatatttttgggaaagttacacaaatgtagaacacctaaaataatgcatctagtttccaaataatttggagtttggcccatgcagtctgcatgggaatcaatgatttctctacttcaatgtagttttcttttctacactttccctccaagtcttcattttgcacgaactgttgagcagttatctttaggataatatgtacaaatgttggggtcaaagccttttgacaaagcaaaatatttttagtagattattgtgtttaggatttttttttaatttactttttttctttgggggcttttcttttttattaaattatttcttttgaggcattttgattaaaaaagacacatcttatcataattaaaattcactgtcaataatatttatttttaaataaagattggaaacaaggtcagacacttgtttataaactgtattgtatattgctgaagaacagttgaataaaaaacaactttgaaat

SEQ ID NO: 342122 - DNA, 698 bp, Homo sapiens
gaatgcctatcctgccagatcatcaagaaattcaatctcagcctttctcagagctctctgaccaaggtgaagcaaaggtcctgtgtcttacacagtgctcaagcaccagggaggcccccccagcagacatcagcatcagcccactgtggtcactatggtgatgcccacttgccatcctggcccatatggttcccttaccatgcttggagcagagtcttggtgaggctgggaacctaggagcccagcctccctaagtcagcctgcatcctgccacttggaggtgaattgcttccgtgggccctatctcagagggtacgtggctcctcgctgctcatggaacccacagactgctctgtctctgccccatcctcttttccaggctttattttagggaagatggtattcttttcctctcatcctcagagcctcccccctctactcacacccaccacaacacccagcagaatcttctcaagggactcaagctctggagacaaaagacaggaagggaaatcttgcaatccattactgttttctgccatgccacaaacatcccctgaggacaggaaacctagagcctgctccctgctggaatgaaagaagaaagaagaaagggaaaaaaagtccaagggaacacacacatgaattaatatttgaatgaatcgtcctgctgggacaggccagccttgagccagcca

SEQ ID NO: 342123 - DNA, 389 bp, Homo sapiens
gtttggctgaatgcaatccccacagaagccttcagtatggagccagttcttaaaaccagttgttgcctatttgattgattcattgattgcaccagtcactgacctgtgcatggcagtgggggagttgctctttggcagtcaagggaaataataataggaaagctgccaagataaggcatctggcagaacttgttgaaactctatttctagaacttggaatgcacgctgacctcaaaggcaccaattcctcttcgtgcccttaagtggaattgtttgtaatctttgacccagtatgacctatgcaggtactacactccggcatattccagatatttgctttccacatgtggagacttcatttccacctccacctccctcccctccccatg

SEQ ID NO: 342124 - DNA, 3171 bp, Homo sapiens
ggccccggggcctccatgatggaggagcgagcggccgccgcggtcgccgccgccgcctcctcctgccgtccgctcggctcaggcgcgggccctggccccactggggcggccccggtctccgcccctgcccccgggccgggcccggcaggtaagggaggcggcggcggaggcagccccgggcccacggcgggcccggagcccctgagcctgccggggatcctgcactttatccagcacgagtgggcgcgcttcgaagccgagaaagcccgctgggaggccgagcgcgccgagttacaggctcaggtggccttccttcagggagagaggaaagggcaggagaatctaaagacggacctggtgcggcggatcaagatgctagagtatgcgctgaagcaggaaagggccaaatatcataaactgaagtttgggacagacctgaaccagggggagaagaaagcagatgtgtcagaacaagtctccaatggccccgtggaatcggtcaccctggagaacagcccgttggtgtggaaggaggggcggcagcttctccgacagtacctggaagaggtgggctacacagacaccatcctcgacatgcggtccaagcgcgtccgttccctgctgggccgctcgctggagctcaacggggcagtggagccgagtgaaggggcccccagggctccaccaggccctgcagggctcagtggtggggagtcgctgctggtgaaacagatcgaggagcagataaagaggaacgcggcaggcaaagatggcaaagagcgcttgggcggctcagtgctggggcagatccccttcctgcagaactgcgaggacgaagacagcgacgaggacgatgagctggacagcgtgcagcacaagaagcagcgtgtgaagctcccatccaaggctctggtgcccgaaatggaagacgaggatgaggaagacgactctgaggatgctatcaatgagtttgatttcctgggctcaggagaggatggggaaggggctccagaccctcggcggtgcactgtggatgggagcccccatgagctggaaagccgtcgggtcaaactccaaggcattctggctgacctgcgggatgtggatgggctgcccccaaaagtgactggcccgcctcctggcacaccccagccccggccacatgaagacgtcttcatcatggacactatcgggggcggggaggtgagcctgggggacttggcagatctcaccgtcaccaacgacaacgacctcagctgcgatctgtctgacagcaaagatgcttttaagaagacgtggaaccccaagttcaccctgcgctcgcactacgacggcattcgttccctggccttccaccacagccagtcggctctgctcaccgcctccgaggacggcacgctcaagctctggaacctgcagaaggcggtcacggccaagaagaatgcggcgctagatgtggaacctatacatgctttccgggctcacaggggcccagtgttggctgtggctatgggcagcaacagtgaatactgctacagtggcggggcagatgcctgcatccatagttggaagattccagacctcagcatggatccctatgatggctacgacccaagcgtgctgagccacgtcctggagggccacggggacgccgtgtggggcctggccttcagtcccacctcccagcgcctggcctcctgttctgctgatggcaccgtccgcatctgggaccccagcagcagcagcccggcctgcctctgcaccttccccacagccagcgagcacggggtccccacctcagtggccttcaccagcaccgagcctgcccacatcgtggcctccttccgctctggcgacaccgtcttgtatgacatggaggttggcagtgccctcctcacgctggagtcccggggcagcagcggtccaacccagatcaaccaagtggtgagtcatccaaaccagcctctcaccatcaccgcccacgacgacaggggcatccgcttcctggacaatcggacaggtaagccggtgcactccatggttgcacacctggacgcagtcacctgcctagccgtggaccccaacggcgcattcctgatgtcaggaagccatgactgctccctgcgtctctggagcctggacaacaaaacgtgcgtgcaggagatcacggcccaccgcaagaagcacgaggaggccatccacgctgttgcctgccaccccagcaaggccctcattgccagtgctggcgctgatgccctggccaaggtcttcgtatgatgcccacctggccctgccctggccgccacgctggctggggtgtagggccgggcaggtggggctgaggggactcccagcctcgctggaggtgcagaggcctggcctctgtctgtttgccgtggagcctggtggtgctaacggccctttccccaggaatccctccccaacggctgccttccccaagcatccagcctggggatgggcccctttcaggaatcacccccgaggatggcctcggggtttccccctgtgccctgacagccgctcctggtatcagagctgctttccagagggcagcacagccagggccgggtgtctttagggatcagtttttccaagactccagaaggtgccaggttctccccttgagctcctgctcccccatcccccatcctcccagacctgggcaggagctgtgctgggagaaagggtggcagccgggagcctcagagctgagccccggcctggctgcccctcccctccggccctctccactgctttccagacactaaccaaggcttccaggccagggattgcccaacactcctagggcagccctcccagcgccccatggggtcgcccatgggtagagacggctttcttgtgcccctccctggggcatggagggtggagtgggcctcgggtccccctgaactccctgtatatctgtataaataacgggattttcatggcgccgccccacccgcattatcactgtgtgatggtctcagtcagtctcctccctgtctccactctttccctctatttatttcactctcttgtttggttctaccctgcaccctcggtccccttccaggttcctgtttataagccccaacccctctgtccccatcttgtatgtgaaaacttgtctcaataaaccctttggagtaa

SEQ ID NO: 342125 - DNA, 201 bp, Homo sapiens
ctgggggaggctggtctgggcgggaatgaccgtggtgaccatagggggcagcacagtccgctggggccctcctctgggtcactggagctgcatcgtctcattcggcctctaagcagcctgtgcggttggtactttgatccccagtttacagatgtgggccctgatgcccagacgctttgtaacttggccattgaagctctg

SEQ ID NO: 342126 - DNA, 2830 bp, Homo sapiens
agcaccctcacacatagcattgtgtgtgtgtacaagggcttccactggaaatagccttgacggggaactgctggagcgagggtgtgcttatgtcagattttggtgtatgctcttaagtggccccttaagaggttgtctcggtttgcattggcccctgtggtacatgaagaagcccaggggatgtctgacccacgtggctctgcacccctgcaggtacctggaagaggtgggctacacagacaccatcctcgacatgcggtccaagcgcgtccgttccctgctgggccgctcgctggagctcaacggggcagtggagccgagtgaaggggcccccagggctccaccaggccctgcagggctcagtggtggggagtcgctgctggtgaaacagatcgaggagcagataaagaggaacgcggcaggcaaagatggcaaagagcgcttgggcggctcagtgctggggcagatccccttcctgcagaactgcgaggacgaagacagcgacgaggacgatgagctggacagcgtgcagcacaagaagcagcgtgtgaagctcccatccaaggctctggtgcccgaaatggaagacgaggatgaggaagacgactctgaggatgctatcaatgagtttgatttcctgggctcaggagaggatggggaaggggctccagaccctcggcggtgcactgtggatgggagcccccatgagctggaaagccgtcgggtcaaactccaaggcattctggctgacctgcgggatgtggatgggctgcccccaaaagtgactggcccgcctcctggcacaccccagccccggccacatgaagacgtcttcatcatggacactatcgggggcggggaggtgagcctgggggacttggcagatctcaccgtcaccaacgacaacgacctcagctgcgatctgtctgacagcaaagatgcttttaagaagacgtggaaccccaagttcaccctgcgctcgcactacgacggcattcgttccctggccttccaccacagccagtcggctctgctcaccgcctccgaggacggcacgctcaagctctggaacctgcagaaggcggtcacggccaagaagaatgcggcgctagatgtggaacctatacatgctttccgggctcacaggggcccagtgttggctgtggctatgggcagcaacagtgaatactgctacagtggcggggcagatgcctgcatccatagttggaagattccagacctcagcatggatccctatgatggctacgacccaagcgtgctgagccacgtcctggagggccacggggacgccgtgtggggcctggccttcagtcccacctcccagcgcctggcctcctgttctgctgatggcaccgtccgcatctgggaccccagcagcagcagcccggcctgcctctgcaccttccccacagccagcgagcacggggtccccacctcagtggccttcaccagcaccgagcctgcccacatcgtggcctccttccgctctggcgacaccgtcttgtatgacatggaggttggcagtgccctcctcacgctggagtcccggggcagcagcggtccaacccagatcaaccaagtggtgagtcatccaaaccagcctctcaccatcaccgcccacgacgacaggggcatccgcttcctggacaatcggacaggtaagccggtgcactccatggttgcacacctggacgcagtcacctgcctagccgtggaccccaacggcgcattcctgatgtcaggaagccatgactgctccctgcgtctctggagcctggacaacaaaacgtgcgtgcaggagatcacggcccaccgcaagaagcacgaggaggccatccacgctgttgcctgccaccccagcaaggccctcattgccagtgctggcgctgatgccctggccaaggtcttcgtatgatgcccacctggccctgccctggccgccacgctggctggggtgtagggccgggcaggtggggctgaggggactcccagcctcgctggaggtgcagaggcctggcctctgtctgtttgccgtggagcctggtggtgctaacggccctttccccaggaatccctccccaacggctgccttccccaagcatccagcctggggatgggcccctttcaggaatcacccccgaggatggcctcggggtttccccctgtgccctgacagccgctcctggtatcagagctgctttccagagggcagcacagccagggccgggtgtctttagggatcagtttttccaagactccagaaggtgccaggttctccccttgagctcctgctcccccatcccccatcctcccagacctgggcaggagctgtgctgggagaaagggtggcagccgggagcctcagagctgagccccggcctggctgcccctcccctccggccctctccactgctttccagacactaaccaaggcttccaggccagggattgcccaacactcctagggcagccctcccagcgccccatggggtcgcccatgggtagagacggctttcttgtgcccctccctggggcatggagggtggagtgggcctcgggtccccctgaactccctgtatatctgtataaataacgggattttcatggcgccgccccacccgcattatcactgtgtgatggtctcagtcagtctcctccctgtctccactctttccctctatttatttcactctcttgtttggttctaccctgcaccctcggtccccttccaggttcctgtttataagccccaacccctctgtccccatcttgtatgtgaaaacttgtctcaataaaccctttggagtaa

SEQ ID NO: 342127 - DNA, 2181 bp, Homo sapiens
gtcacctatgccagactgggttggaactgctgggtgactccggccctatgcctcgaccctgcagaaagccgtcgggtcaaactccaaggcattctggctgacctgcgggatgtggatgggctgcccccaaaagtgactggcccgcctcctggcacaccccagccccggccacatgaagacgtcttcatcatggacactatcgggggcggggaggtgagcctgggggacttggcagatctcaccgtcaccaacgacaacgacctcagctgcgatctgtctgacagcaaagatgcttttaagaagacgtggaaccccaagttcaccctgcgctcgcactacgacggcattcgttccctggccttccaccacagccagtcggctctgctcaccgcctccgaggacggcacgctcaagctctggaacctgcagaaggcggtcacggccaagaagaatgcggcgctagatgtggaacctatacatgctttccgggctcacaggggcccagtgttggctgtggctatgggcagcaacagtgaatactgctacagtggcggggcagatgcctgcatccatagttggaagattccagacctcagcatggatccctatgatggctacgacccaagcgtgctgagccacgtcctggagggccacggggacgccgtgtggggcctggccttcagtcccacctcccagcgcctggcctcctgttctgctgatggcaccgtccgcatctgggaccccagcagcagcagcccggcctgcctctgcaccttccccacagccagcgagcacggggtccccacctcagtggccttcaccagcaccgagcctgcccacatcgtggcctccttccgctctggcgacaccgtcttgtatgacatggaggttggcagtgccctcctcacgctggagtcccggggcagcagcggtccaacccagatcaaccaagtggtgagtcatccaaaccagcctctcaccatcaccgcccacgacgacaggggcatccgcttcctggacaatcggacaggtaagccggtgcactccatggttgcacacctggacgcagtcacctgcctagccgtggaccccaacggcgcattcctgatgtcaggaagccatgactgctccctgcgtctctggagcctggacaacaaaacgtgcgtgcaggagatcacggcccaccgcaagaagcacgaggaggccatccacgctgttgcctgccaccccagcaaggccctcattgccagtgctggcgctgatgccctggccaaggtcttcgtatgatgcccacctggccctgccctggccgccacgctggctggggtgtagggccgggcaggtggggctgaggggactcccagcctcgctggaggtgcagaggcctggcctctgtctgtttgccgtggagcctggtggtgctaacggccctttccccaggaatccctccccaacggctgccttccccaagcatccagcctggggatgggcccctttcaggaatcacccccgaggatggcctcggggtttccccctgtgccctgacagccgctcctggtatcagagctgctttccagagggcagcacagccagggccgggtgtctttagggatcagtttttccaagactccagaaggtgccaggttctccccttgagctcctgctcccccatcccccatcctcccagacctgggcaggagctgtgctgggagaaagggtggcagccgggagcctcagagctgagccccggcctggctgcccctcccctccggccctctccactgctttccagacactaaccaaggcttccaggccagggattgcccaacactcctagggcagccctcccagcgccccatggggtcgcccatgggtagagacggctttcttgtgcccctccctggggcatggagggtggagtgggcctcgggtccccctgaactccctgtatatctgtataaataacgggattttcatggcgccgccccacccgcattatcactgtgtgatggtctcagtcagtctcctccctgtctccactctttccctctatttatttcactctcttgtttggttctaccctgcaccctcggtccccttccaggttcctgtttataagccccaacccctctgtccccatcttgtatgtgaaaacttgtctcaataaaccctttggagtaa

SEQ ID NO: 342128 - DNA, 3858 bp, Homo sapiens
ggccccggggcctccatgatggaggagcgagcggccgccgcggtcgccgccgccgcctcctcctgccgtccgctcggctcaggcgcgggccctggccccactggggcggccccggtctccgcccctgcccccgggccgggcccggcaggtaagggaggcggcggcggaggcagccccgggcccacggcgggcccggagcccctgagcctgccggggatcctgcactttatccagcacgagtgggcgcgcttcgaagccgagaaagcccgctgggaggccgagcgcgccgagttacaggctcaggtggccttccttcagggagagaggaaagggcaggagaatctaaagacggacctggtgcggcggatcaagatgctagagtatgcgctgaagcaggaaagggccaaatatcataaactgaagtttgggacagacctgaaccagggggagaagaaagcagatgtgtcagaacaagtctccaatggccccgtggaatcggtcaccctggagaacagcccgttggtgtggaaggaggggcggcagcttctccgacagtacctggaagaggtgggctacacagacaccatcctcgacatgcggtccaagcgcgtccgttccctgctgggccgctcgctggagctcaacggggcagtggagccgagtgaaggggcccccagggctccaccaggccctgcagggctcagtggtggggagtcgctgctggtgaaacagatcgaggagcagataaagaggaacgcggcaggcaaagatggcaaagagcgcttgggcggctcagtgctggggcagatccccttcctgcagaactgcgaggacgaagacagcgacgaggacgatgagctggacagcgtgcagcacaagaagcagcgtgtgaagctcccatccaaggctctggtgcccgaaatggaagacgaggatgaggaagacgactctgaggatgctatcaatgagtttgatttcctgggctcaggagaggatggggaaggggctccagaccctcggcggtgcactgtggatgggagcccccatgagctggaaagccgtcgggtcaaactccaaggcattctggctgacctgcgggatgtggatgggctgcccccaaaagtgactggcccgcctcctggcacaccccagccccggccacatgaagacgtcttcatcatggacactatcgggggcggggaggtgagcctgggggacttggcagatctcaccgtcaccaacgacaacgacctcagctgcgatctgtctgacagcaaagatgcttttaagaagacgtggaaccccaagttcaccctgcgctcgcactacgacggcattcgttccctggccttccaccacagccagtcggctctgctcaccgcctccgaggacggcacgctcaagctctggaacctgcagaaggcggtcacggccaagaagaatgcggcgctagatgtggaacctatacatgctttccgggctcacaggggcccagtgttggctgtggctatgggcagcaacagtgaatactgctacagtggcggggcagatgcctgcatccatagttggaagattccagacctcagcatggatccctatgatggctacgacccaagcgtgctgagccacgtcctggagggccacggggacgccgtgtggggcctggccttcagtcccacctcccagcgcctggcctcctgttctgctgatggcaccgtccgcatctgggaccccagcagcagcagcccggcctgcctctgcaccttccccacagccagcgagcacggggtccccacctcagtggccttcaccagcaccgagcctgcccacatcgtggcctccttccgctctggcgacaccgtcttgtatgacatggaggttggcagtgccctcctcacgctggagtcccggggcagcagcggtccaacccagatcaaccaagtggtgagtcatccaaaccagcctctcaccatcaccgcccacgacgacaggggcatccgcttcctggacaatcggacaggtaagccggtgcactccatggttgcacacctggacgcagtcacctgcctagccgtggaccccaacggcgcattcctgatgtcaggaagccatgactgctccctgcgtctctggagcctggacaacaaaacgtgcgtgcaggagatcacggcccaccgcaagaagcacgaggaggccatccacgctgttgcctgccaccccagcaaggccctcattgccagtgctggcgctgatgccctggccaaggtcttcgtatgatgcccacctggccctgccctggccgccacgctggctggggtgtagggccgggcaggtggggctgaggggactcccagcctcgctggaggtgcagaggcctggcctctgtctgtttgccgtggagcctggtggtgctaacggccctttccccaggaatccctccccaacggctgccttccccaagcatccagcctggggatgggcccctttcaggaatcacccccgaggatggcctcggggtttccccctgtgccctgacagccgctcctggtatcagagctgctttccagagggcagcacagccagggccgggtgtctttagggatcagtttttccaagactccagaaggtgccaggttctccccttgagctcctgctcccccatcccccatcctcccagacctgggcaggagctgtgctgggagaaagggtggcagccgggagcctcagagctgagccccggcctggctgcccctcccctccggccctctccactgctttccagacactaaccaaggcttccaggccagggattgcccaacactcctagggcagccctcccagcgccccatggggtcgcccatgggtagagacggctttcttgtgcccctccctggggcatggagggtggagtgggcctcgggtccccctgaactccctgtatatctgtataaataacgggattttcatggcgccgccccacccgcattatcactgtgtgatggtctcagtcagtctcctccctgtctccactctttccctctatttatttcactctcttgtttggttctaccctgcaccctcggtccccttccaggttcctgtttataagccccaacccctctgtccccatcttgtatgtgaaaacttgtctcaataaaccctttggagtaaaaaaaaaaaaaaagaaaaaaaaaacacaaaaaaaagaaagaagaaagaaacaatgcaacatcacgacccacaacacaatctgatacacagcgagtatcatgccactctgacccaatgagagcacagttggcacgccccacatgcatccccacagctagttccaccagtgtctcatccttactgtaactgactcgcttcacctcccactcatcccattagaatcgcccatatcaagcagcaacacaataccccgtccacacggccaccctacccccctctaccaaccctccatctactatcctacctcttacccctcttcagtcgctcactcttccctactctcatcatcattctcactacatcctaccacactataacaccaaccacaatcgccacattcatccctcacacattctcacactatacttacacgacatcctatccttcccatccacatcaagtcacacatcatccataccacactctttcttatctcttcacgatatacccttccttctctgtctaccctcatacaactagccacccaactcgaactcaatttacacccatccactcacaccccgaaccttccagcctccaccagtacgcctagcaacatcacaaccagcctcatacaacccccaccatcaatttcattacacatcaccaaacaaaccaccccaccct

SEQ ID NO: 342129 - DNA, 3904 bp, Homo sapiens
ggccccggggcctccatgatggaggagcgagcggccgccgcggtcgccgccgccgcctcctcctgccgtccgctcggctcaggcgcgggccctggccccactggggcggccccggtctccgcccctgcccccgggccgggcccggcaggtaagggaggcggcggcggaggcagccccgggcccacggcgggcccggagcccctgagcctgccggggatcctgcactttatccagcacgagtgggcgcgcttcgaagccgagaaagcccgctgggaggccgagcgcgccgagttacaggctcaggtggccttccttcagggagagaggaaagggcaggagaatctaaagacggacctggtgcggcggatcaagatgctagagtatgcgctgaagcaggaaagggccaaatatcataaactgaagtttgggacagacctgaaccagggggagaagaaagcagatgtgtcagaacaagtctccaatggccccgtggaatcggtcaccctggagaacagcccgttggtgtggaaggaggggcggcagcttctccgacagtacctggaagaggtgggctacacagacaccatcctcgacatgcggtccaagcgcgtccgttccctgctgggccgctcgctggagctcaacggggcagtggagccgagtgaaggggcccccagggctccaccaggccctgcagggctcagtggtggggagtcgctgctggtgaaacagatcgaggagcagataaagaggaacgcggcaggcaaagatggcaaagagcgcttgggcggctcagtgctggggcagatccccttcctgcagaactgcgaggacgaagacagcgacgaggacgatgagctggacagcgtgcagcacaagaagcagcgtgtgaagctcccatccaaggctctggtgcccgaaatggaagacgaggatgaggaagacgactctgaggatgctatcaatgagtttgatttcctgggctcaggagaggatggggaaggggctccagaccctcggcggtgcactgtggatgggagcccccatgagctggaaagccgtcgggtcaaactccaaggcattctggctgacctgcgggatgtggatgggctgcccccaaaagtgactggcccgcctcctggcacaccccagccccggccacatgaagacgtcttcatcatggacactatcgggggcggggaggtgagcctgggggacttggcagatctcaccgtcaccaacgacaacgacctcagctgcgatctgtctgacagcaaagatgcttttaagaagacgtggaaccccaagttcaccctgcgctcgcactacgacggcattcgttccctggccttccaccacagccagtcggctctgctcaccgcctccgaggacggcacgctcaagctctggaacctgcagaaggcggtcacggccaagaagaatgcggcgctagatgtggaacctatacatgctttccgggctcacaggggcccagtgttggctgtggctatgggcagcaacagtgaatactgctacagtggcggggcagatgcctgcatccatagttggaagattccagacctcagcatggatccctatgatggctacgacccaagcgtgctgagccacgtcctggagggccacggggacgccgtgtggggcctggccttcagtcccacctcccagcgcctggcctcctgttctgctgatggcaccgtccgcatctgggaccccagcagcagcagcccggcctgcctctgcaccttccccacagccagcgagcacggggtccccacctcagtggccttcaccagcaccgagcctgcccacatcgtggcctccttccgctctggcgacaccgtcttgtatgacatggaggttggcagtgccctcctcacgctggagtcccggggcagcagcggtccaacccagatcaaccaagtggtgagtcatccaaaccagcctctcaccatcaccgcccacgacgacaggggcatccgcttcctggacaatcggacaggtaagccggtgcactccatggttgcacacctggacgcagtcacctgcctagccgtggaccccaacggcgcattcctgatgtcaggaagccatgactgctccctgcgtctctggagcctggacaacaaaacgtgcgtgcaggagatcacggcccaccgcaagaagcacgaggaggccatccacgctgttgcctgccaccccagcaaggccctcattgccagtgctggcgctgatgccctggccaaggtcttcgtatgatgcccacctggccctgccctggccgccacgctggctggggtgtagggccgggcaggtggggctgaggggactcccagcctcgctggaggtgcagaggcctggcctctgtctgtttgccgtggagcctggtggtgctaacggccctttccccaggaatccctccccaacggctgccttccccaagcatccagcctggggatgggcccctttcaggaatcacccccgaggatggcctcggggtttccccctgtgccctgacagccgctcctggtatcagagctgctttccagagggcagcacagccagggccgggtgtctttagggatcagtttttccaagactccagaaggtgccaggttctccccttgagctcctgctcccccatcccccatcctcccagacctgggcaggagctgtgctgggagaaagggtggcagccgggagcctcagagctgagccccggcctggctgcccctcccctccggccctctccactgctttccagacactaaccaaggcttccaggccagggattgcccaacactcctagggcagccctcccagcgccccatggggtcgcccatgggtagagacggctttcttgtgcccctccctggggcatggagggtggagtgggcctcgggtccccctgaactccctgtatatctgtataaataacgggattttcatggcgccgccccacccgcattatcactgtgtgatggtctcagtcagtctcctccctgtctccactctttccctctatttatttcactctcttgtttggttctaccctgcaccctcggtccccttccaggttcctgtttataagccccaacccctctgtccccatcttgtatgtgaaaacttgtctcaataaaccctttggagtaaaaaaaaaaaaaaaaaaaaaaaacaaacaaaaacagacaaaacaacaaaaaaaaaaaaaagaaaaaaaaaacacaaaaaaaagaaagaagaaagaaacaatgcaacatcacgacccacaacacaatctgatacacagcgagtatcatgccactctgacccaatgagagcacagttggcacgccccacatgcatccccacagctagttccaccagtgtctcatccttactgtaactgactcgcttcacctcccactcatcccattagaatcgcccatatcaagcagcaacacaataccccgtccacacggccaccctacccccctctaccaaccctccatctactatcctacctcttacccctcttcagtcgctcactcttccctactctcatcatcattctcactacatcctaccacactataacaccaaccacaatcgccacattcatccctcacacattctcacactatacttacacgacatcctatccttcccatccacatcaagtcacacatcatccataccacactctttcttatctcttcacgatatacccttccttctctgtctaccctcatacaactagccacccaactcgaactcaatttacacccatccactcacaccccgaaccttccagcctccaccagtacgcctagcaacatcacaaccagcctcatacaacccccaccatcaatttcattacacatcaccaaacaaaccaccccaccct

SEQ ID NO: 342130 - DNA, 1948 bp, Homo sapiens
  misc_feature (3)..(3): n is a, c, g, or t
agnataggctagtacgaggccgggtgttaatcggccgaggctgtctgacagcaaagatgcttttaagaagacgtggaaccccaagttcaccctgcgctcgcactacgacggcattcgttccctggccttccaccacagccagtcggctctgctcaccgcctccgaggacggcacgctcaagctctggaacctgcagaaggcggtcacggccaagaagaatgcggcgctagatgtggaacctatacatgctttccgggctcacaggggcccagtgttggctgtggctatgggcagcaacagtgaatactgctacagtggcggggcagatgcctgcatccatagttggaagattccagacctcagcatggatccctatgatggctacgacccaagcgtgctgagccacgtcctggagggccacggggacgccgtgtggggcctggccttcagtcccacctcccagcgcctggcctcctgttctgctgatggcaccgtccgcatctgggaccccagcagcagcagcccggcctgcctctgcaccttccccacagccagcgagcacggggtccccacctcagtggccttcaccagcaccgagcctgcccacatcgtggcctccttccgctctggcgacaccgtcttgtatgacatggaggttggcagtgccctcctcacgctggagtcccggggcagcagcggtccaacccagatcaaccaagtggtgagtcatccaaaccagcctctcaccatcaccgcccacgacgacaggggcatccgcttcctggacaatcggacaggtaagccggtgcactccatggttgcacacctggacgcagtcacctgcctagccgtggaccccaacggcgcattcctgatgtcaggaagccatgactgctccctgcgtctctggagcctggacaacaaaacgtgcgtgcaggagatcacggcccaccgcaagaagcacgaggaggccatccacgctgttgcctgccaccccagcaaggccctcattgccagtgctggcgctgatgccctggccaaggtcttcgtatgatgcccacctggccctgccctggccgccacgctggctggggtgtagggccgggcaggtggggctgaggggactcccagcctcgctggaggtgcagaggcctggcctctgtctgtttgccgtggagcctggtggtgctaacggccctttccccaggaatccctccccaacggctgccttccccaagcatccagcctggggatgggcccctttcaggaatcacccccgaggatggcctcggggtttccccctgtgccctgacagccgctcctggtatcagagctgctttccagagggcagcacagccagggccgggtgtctttagggatcagtttttccaagactccagaaggtgccaggttctccccttgagctcctgctcccccatcccccatcctcccagacctgggcaggagctgtgctgggagaaagggtggcagccgggagcctcagagctgagccccggcctggctgcccctcccctccggccctctccactgctttccagacactaaccaaggcttccaggccagggattgcccaacactcctagggcagccctcccagcgccccatggggtcgcccatgggtagagacggctttcttgtgcccctccctggggcatggagggtggagtgggcctcgggtccccctgaactccctgtatatctgtataaataacgggattttcatggcgccgccccacccgcattatcactgtgtgatggtctcagtcagtctcctccctgtctccactctttccctctatttatttcactctcttgtttggttctaccctgcaccctcggtccccttccaggttcctgtttataagccccaacccctctgtccccatcttgtatgtgaaaacttgtctcaataaaccctttggagtaa

SEQ ID NO: 342131 - DNA, 3427 bp, Homo sapiens
ggccccggggcctccatgatggaggagcgagcggccgccgcggtcgccgccgccgcctcctcctgccgtccgctcggctcaggcgcgggccctggccccactggggcggccccggtctccgcccctgcccccgggccgggcccggcaggtaagggaggcggcggcggaggcagccccgggcccacggcgggcccggagcccctgagcctgccggggatcctgcactttatccagcacgagtgggcgcgcttcgaagccgagaaagcccgctgggaggccgagcgcgccgagttacaggctcaggtggccttccttcagggagagaggaaagggcaggagaatctaaagacggacctggtgcggcggatcaagatgctagagtatgcgctgaagcaggaaagggccaaatatcataaactgaagtttgggacagacctgaaccagggggagaagaaagcagatgtgtcagaacaagtctccaatggccccgtggaatcggtcaccctggagaacagcccgttggtgtggaaggaggggcggcagcttctccgacagtacctggaagaggtgggctacacagacaccatcctcgacatgcggtccaagcgcgtccgttccctgctgggccgctcgctggagctcaacggggcagtggagccgagtgaaggggcccccagggctccaccaggccctgcagggctcagtggtggggagtcgctgctggtgaaacagatcgaggagcagataaagaggaacgcggcaggcaaagatggcaaagagcgcttgggcggctcagtgctggggcagatccccttcctgcagaactgcgaggacgaagacagcgacgaggacgatgagctggacagcgtgcagcacaagaagcagcgtgtgaagctcccatccaaggctctggtgcccgaaatggaagacgaggatgaggaagacgactctgaggatgctatcaatgagtttgatttcctgggctcaggagaggatggggaaggggctccagaccctcggcggtgcactgtggatgggagcccccatgagctggaaagccgtcgggtcaaactccaaggcattctggctgacctgcgggatgtggatgggctgcccccaaaagtgactggcccgcctcctggcacaccccagccccggccacatgaagacgtcttcatcatggacactatcgggggcggggaggtgagcctgggggacttggcagatctcaccgtcaccaacgacaacgacctcagctgcgatctgtctgacagcaaagatgcttttaagaagacgtggaaccccaagttcaccctgcgctcgcactacgacggcattcgttccctggccttccaccacagccagtcggctctgctcaccgcctccgaggacggcacgctcaagctctggaacctgcagaaggcggtcacggccaagaagaatgcggcgctagatgtggaacctatacatgctttccgggctcacaggggcccagtgttggctgtggctatgggcagcaacagtgaatactgctacagtggcggggcagatgcctgcatccatagttggaagattccagacctcagcatggatccctatgatggctacgacccaagcgtgctgagccacgtcctggagggccacggggacgccgtgtggggcctggccttcagtcccacctcccagcgcctggcctcctgttctgctgatggcaccgtccgcatctgggaccccagcagcagcagcccggcctgcctctgcaccttccccacagccagcgagcacggggtccccacctcagtggccttcaccagcaccgagcctgcccacatcgtggcctccttccgctctggcgacaccgtcttgtatgacatggaggttggcagtgccctcctcacgctggagtcccggggcagcagcggtccaacccagatcaaccaagtggtgagtcatccaaaccagcctctcaccatcaccgcccacgacgacaggggcatccgcttcctggacaatcggacaggtaagccggtgcactccatggttgcacacctggacgcagtcacctgcctagccgtggaccccaacggcgcattcctgatgtcaggaagccatgactgctccctgcgtctctggagcctggacaacaaaacgtgcgtgcaggagatcacggcccaccgcaagaagcacgaggaggccatccacgctgttgcctgccaccccagcaaggccctcattgccagtgctggcgctgatgccctggccaaggtcttcgtatgatgcccacctggccctgccctggccgccacgctggctggggtgtagggccgggcaggtggggctgaggggactcccagcctcgctggaggtgcagaggcctggcctctgtctgtttgccgtggagcctggtggtgctaacggccatggagggtggagtgggcctcgggtccccctgaactccctgtatatctgtataaataacgggattttcatggcgccgccccacccgcattatcactgtgtgatggtctcagtcagtctcctccctgtctccactctttccctctatttatttcactctcttgtttggttctaccctgcaccctcggtccccttccaggttcctgtttataagccccaacccctctgtccccatcttgtatgtgaaaacttgtctcaataaaccctttggagtaaaaaaaaaaaaaaaaaaaaaaaacaaacaaaaacagacaaaacaacaaaaaaaaaaaaaagaaaaaaaaaacacaaaaaaaagaaagaagaaagaaacaatgcaacatcacgacccacaacacaatctgatacacagcgagtatcatgccactctgacccaatgagagcacagttggcacgccccacatgcatccccacagctagttccaccagtgtctcatccttactgtaactgactcgcttcacctcccactcatcccattagaatcgcccatatcaagcagcaacacaataccccgtccacacggccaccctacccccctctaccaaccctccatctactatcctacctcttacccctcttcagtcgctcactcttccctactctcatcatcattctcactacatcctaccacactataacaccaaccacaatcgccacattcatccctcacacattctcacactatacttacacgacatcctatccttcccatccacatcaagtcacacatcatccataccacactctttcttatctcttcacgatatacccttccttctctgtctaccctcatacaactagccacccaactcgaactcaatttacacccatccactcacaccccgaaccttccagcctccaccagtacgcctagcaacatcacaaccagcctcatacaacccccaccatcaatttcattacacatcaccaaacaaaccaccccaccct

SEQ ID NO: 342132 - DNA, 2145 bp, Homo sapiens
ggccccggggcctccatgatggaggagcgagcggccgccgcggtcgccgccgccgcctcctcctgccgtccgctcggctcaggcgcgggccctggccccactggggcggccccggtctccgcccctgcccccgggccgggcccggcaggtaagggaggcggcggcggaggcagccccgggcccacggcgggcccggagcccctgagcctgccggggatcctgcactttatccagcacgagtgggcgcgcttcgaagccgagaaagcccgctgggaggccgagcgcgccgagttacaggctcaggtggccttccttcagggagagaggaaagggcaggagaatctaaagacggacctggtgcggcggatcaagatgctagagtatgcgctgaagcaggaaagggccaaatatcataaactgaagtttgggacagacctgaaccagggggagaagaaagcagatgtgtcagaacaagtctccaatggccccgtggaatcggtcaccctggagaacagcccgttggtgtggaaggaggggcggcagcttctccgacagtacctggaagaggtgggctacacagacaccatcctcgacatgcggtccaagcgcgtccgttccctgctgggccgctcgctggagctcaacggggcagtggagccgagtgaaggggcccccagggctccaccaggccctgcagggctcagtggtggggagtcgctgctggtgaaacagatcgaggagcagataaagaggaacgcggcaggcaaagatggcaaagagcgcttgggcggctcagtgctggggcagatccccttcctgcagaactgcgaggacgaagacagcgacgaggacgatgagctggacagcgtgcagcacaagaagcagcgtgtgaagctcccatccaaggctctggtgcccgaaatggaagacgaggatgaggaagacgactctgaggatgctatcaatgagtttgatttcctgggctcaggagaggatggggaaggggctccagaccctcggcggtgcactgtggatgggagcccccatgagctggaaagccgtcgggtcaaactccaaggcattctggctgacctgcgggatgtggatgggctgcccccaaaagtgactggcccgcctcctggcacaccccagccccggccacatgaagacgtcttcatcatggacactatcgggggcggggaggtgagcctgggggacttggcagatctcaccgtcaccaacgacaacgacctcagctgcgatctgtctgacagcaaagatgcttttaagaagacgtggaaccccaagttcaccctgcgctcgcactacgacggcattcgttccctggccttccaccacagccagtcggctctgctcaccgcctccgaggacggcacgctcaagctctggaacctgcagaaggcggtcacggccaagaagaatgcggcgctagatgtggaacctatacatgctttccgggctcacaggggcccagtgttggctgtggctatgggcagcaacagtgaatactgctacagtggcggggcagatgcctgcatccatagttggaagattccagacctcagcatggatccctatgatggctacgacccaagcgtgctgagccacgtcctggagggccacggggacgccgtgtggggcctggccttcagtcccacctcccagcgcctggcctcctgttctgctgatggcaccgtccgcatctgggaccccagcagcagcagcccggcctgcctctgcaccttccccacagccagcgagcacggggtccccacctcagtggccttcaccagcaccgagcctgcccacatcgtggcctccttccgctctggcgacaccgtcttgtatgacatggaggttggcagtgccctcctcacgctggagtcccggggcagcagcgcaacccagatcaacaagtggtgagtcatcaaacaggctctcacattacgccagagaaggggtccgttctgggcaacggcaggagccgggcccagggggccctggcgggtctgcgaaggggccagcgtctgtggtgagccgaggccgcgttcgggcgcacaacgggtggaaagcccgaaaagaggccttgggccccagcctcggggcgcaactacaatccctggg

SEQ ID NO: 342133 - DNA, 791 bp, Homo sapiens
ggccccggggcctccatgatggaggagcgagcggccgccgcggtcgccgccgccgcctcctcctgccgtccgctcggctcaggcgcgggccctggccccactggggcggccccggtctccgcccctgcccccgggccgggcccggcaggtaagggaggcggcggcggaggcagccccgggcccacggcgggcccggagcccctgagcctgccggggatcctgcactttatccagcacgagtgggcgcgcttcgaagccgagaaagcccgctgggaggccgagcgcgccgagttacaggctcaggtggccttccttcagggagagaggaaagggcaggagaatctaaagacggacctggtgcggcggatcaagatgctagagtatgcgctgaagcaggaaagggccaaatatcataaactgaagtttgggattgcccaacactcctagggcagccctcccagcgccccatggggtcgcccatgggtagagacggctttcttgtgcccctccctggggcatggagggtggagtgggcctcgggtccccctgaactccctgtatatctgtataaataacgggattttcatggcgccgccccacccgcattatcactgtgtgatggtctcagtcagtctcctccctgtctccactctttccctctatttatttcactctcttgtttggttctaccctgcaccctcggtccccttccaggttcctgtttataagccccaacccctctgtccccatcttgtatgtgaaaacttgtctcaataaaccctttggagtaa

SEQ ID NO: 342134 - DNA, 313 bp, Homo sapiens
ttatctccctttgcctcctgtctgccctcccaggctcaggtggccttccttcagggagagaggaaagggcaggagaatctaaagacggacctggtgcggcggatcaagatgctagagtatgcgctgaagcaggaaaggtgagccttcatcctgccctgggcctgccttctgggtccgtctcaagcacagtgtcaggaggccaccagccacgcctccttccagctaagggagatttggggtcgacattcttttccatcattccagtaccataagattctaggggagaaacaggacagagtaggtgggatttggg

SEQ ID NO: 342135 - DNA, 543 bp, Homo sapiens
ctgggtctgggctctggccaccaagcctgggagggcaccttcctatctgagctttgacacctgccaggactcatgcctcctctgctctgctgtctttggcaggaacgcggcaggcaaagatggcaaagagcgcttgggcggctcagtgctggggcagatccccttcctgcagaactgcgaggacgaagacagcgacgaggacgatgagctggacagcgtgcagcacaagaagcagcgtgtgaaggtgagcccttcctccatgccctgcacagcctggcctgggtgtgacctgatcgaagcccttccgagtcagcctgggccttcaggggctgcggtgtgtgctggcagcagggatatggagacacacaggccctggcctggaggagcttgtggccagcagcggccttgtaaatagtcatgtgcagaaggacgcgttgtggtggaggcaggggcatgtgcctatgaaggaggcacctgtggcagatggcctcggagctttccctgagccccgggcttcccattagcgggtccctttgcctaggt

SEQ ID NO: 342136 - DNA, 3192 bp, Homo sapiens
ggccccggggcctccatgatggaggagcgagcggccgccgcggtcgccgccgccgcctcctcctgccgtccgctcggctcaggcgcgggccctggccccactggggcggccccggtctccgcccctgcccccgggccgggcccggcaggtaagggaggcggcggcggaggcagccccgggcccacggcgggcccggagcccctgagcctgccggggatcctgcactttatccagcacgagtgggcgcgcttcgaagccgagaaagcccgctgggaggccgagcgcgccgagttacaggctcaggtggccttccttcagggagagaggaaagggcaggagaatctaaagacggacctggtgcggcggatcaagatgctagagtatgcgctgaagcaggaaagggccaaatatcataaactgaagtttgggacagacctgaaccagggggagaagaaagcagatgtgtcagaacaagtctccaatggccccgtggaatcggtcaccctggagaacagcccgttggtgtggaaggaggggcggcagcttctccgacagtacctggaagaggtgggctacacagacaccatcctcgacatgcggtccaagcgcgtccgttccctgctgggccgctcgctggagctcaacggggcagtggagccgagtgaaggggcccccagggctccaccaggccctgcagggctcagtggtggggagtcgctgctggtgaaacagatcgaggagcagataaagaggaacgcggcaggcaaagatggcaaagagcgcttgggcggctcagtgctggggcagatccccttcctgcagaactgcgaggacgaagacagcgacgaggacgatgagctggacagcgtgcagcacaagaagcagcgtgtgaagctcccatccaaggctctggtgcccgaaatggaagacgaggatgaggaagacgactctgaggatgctatcaatgagtttgatttcctgggctcaggagaggatggggaaggggctccagaccctcggcggtgcactgtggatgggagcccccatgagctggaaagccgtcgggtcaaactccaaggcattctggctgacctgcgggatgtggatgggctgcccccaaaagtgactggcccgcctcctggcacaccccagccccggccacatgaaggttcctttggcttctcctcagacgtcttcatcatggacactatcgggggcggggaggtgagcctgggggacttggcagatctcaccgtcaccaacgacaacgacctcagctgcgatctgtctgacagcaaagatgcttttaagaagacgtggaaccccaagttcaccctgcgctcgcactacgacggcattcgttccctggccttccaccacagccagtcggctctgctcaccgcctccgaggacggcacgctcaagctctggaacctgcagaaggcggtcacggccaagaagaatgcggcgctagatgtggaacctatacatgctttccgggctcacaggggcccagtgttggctgtggctatgggcagcaacagtgaatactgctacagtggcggggcagatgcctgcatccatagttggaagattccagacctcagcatggatccctatgatggctacgacccaagcgtgctgagccacgtcctggagggccacggggacgccgtgtggggcctggccttcagtcccacctcccagcgcctggcctcctgttctgctgatggcaccgtccgcatctgggaccccagcagcagcagcccggcctgcctctgcaccttccccacagccagcgagcacggggtccccacctcagtggccttcaccagcaccgagcctgcccacatcgtggcctccttccgctctggcgacaccgtcttgtatgacatggaggttggcagtgccctcctcacgctggagtcccggggcagcagcggtccaacccagatcaaccaagtggtgagtcatccaaaccagcctctcaccatcaccgcccacgacgacaggggcatccgcttcctggacaatcggacaggtaagccggtgcactccatggttgcacacctggacgcagtcacctgcctagccgtggaccccaacggcgcattcctgatgtcaggaagccatgactgctccctgcgtctctggagcctggacaacaaaacgtgcgtgcaggagatcacggcccaccgcaagaagcacgaggaggccatccacgctgttgcctgccaccccagcaaggccctcattgccagtgctggcgctgatgccctggccaaggtcttcgtatgatgcccacctggccctgccctggccgccacgctggctggggtgtagggccgggcaggtggggctgaggggactcccagcctcgctggaggtgcagaggcctggcctctgtctgtttgccgtggagcctggtggtgctaacggccctttccccaggaatccctccccaacggctgccttccccaagcatccagcctggggatgggcccctttcaggaatcacccccgaggatggcctcggggtttccccctgtgccctgacagccgctcctggtatcagagctgctttccagagggcagcacagccagggccgggtgtctttagggatcagtttttccaagactccagaaggtgccaggttctccccttgagctcctgctcccccatcccccatcctcccagacctgggcaggagctgtgctgggagaaagggtggcagccgggagcctcagagctgagccccggcctggctgcccctcccctccggccctctccactgctttccagacactaaccaaggcttccaggccagggattgcccaacactcctagggcagccctcccagcgccccatggggtcgcccatgggtagagacggctttcttgtgcccctccctggggcatggagggtggagtgggcctcgggtccccctgaactccctgtatatctgtataaataacgggattttcatggcgccgccccacccgcattatcactgtgtgatggtctcagtcagtctcctccctgtctccactctttccctctatttatttcactctcttgtttggttctaccctgcaccctcggtccccttccaggttcctgtttataagccccaacccctctgtccccatcttgtatgtgaaaacttgtctcaataaaccctttggagtaa

SEQ ID NO: 342137 - DNA, 2638 bp, Homo sapiens
  misc_feature (3)..(3): n is a, c, g, or t
agnataggctagtacgaggccgggtgttaatcggccgaggatgcggtccaagcgcgtccgttccctgctgggccgctcgctggagctcaacggggcagtggagccgagtgaaggggcccccagggctccaccaggccctgcagggctcagtggtggggagtcgctgctggtgaaacagatcgaggagcagataaagaggaacgcggcaggcaaagatggcaaagagcgcttgggcggctcagtgctggggcagatccccttcctgcagaactgcgaggacgaagacagcgacgaggacgatgagctggacagcgtgcagcacaagaagcagcgtgtgaagctcccatccaaggctctggtgcccgaaatggaagacgaggatgaggaagacgactctgaggatgctatcaatgagtttgatttcctgggctcaggagaggatggggaaggggctccagaccctcggcggtgcactgtggatgggagcccccatgagctggaaagccgtcgggtcaaactccaaggcattctggctgacctgcgggatgtggatgggctgcccccaaaagtgactggcccgcctcctggcacaccccagccccggccacatgaaggttcctttggcttctcctcagacgtcttcatcatggacactatcgggggcggggaggtgagcctgggggacttggcagatctcaccgtcaccaacgacaacgacctcagctgcgatctgtctgacagcaaagatgcttttaagaagacgtggaaccccaagttcaccctgcgctcgcactacgacggcattcgttccctggccttccaccacagccagtcggctctgctcaccgcctccgaggacggcacgctcaagctctggaacctgcagaaggcggtcacggccaagaagaatgcggcgctagatgtggaacctatacatgctttccgggctcacaggggcccagtgttggctgtggctatgggcagcaacagtgaatactgctacagtggcggggcagatgcctgcatccatagttggaagattccagacctcagcatggatccctatgatggctacgacccaagcgtgctgagccacgtcctggagggccacggggacgccgtgtggggcctggccttcagtcccacctcccagcgcctggcctcctgttctgctgatggcaccgtccgcatctgggaccccagcagcagcagcccggcctgcctctgcaccttccccacagccagcgagcacggggtccccacctcagtggccttcaccagcaccgagcctgcccacatcgtggcctccttccgctctggcgacaccgtcttgtatgacatggaggttggcagtgccctcctcacgctggagtcccggggcagcagcggtccaacccagatcaaccaagtggtgagtcatccaaaccagcctctcaccatcaccgcccacgacgacaggggcatccgcttcctggacaatcggacaggtaagccggtgcactccatggttgcacacctggacgcagtcacctgcctagccgtggaccccaacggcgcattcctgatgtcaggaagccatgactgctccctgcgtctctggagcctggacaacaaaacgtgcgtgcaggagatcacggcccaccgcaagaagcacgaggaggccatccacgctgttgcctgccaccccagcaaggccctcattgccagtgctggcgctgatgccctggccaaggtcttcgtatgatgcccacctggccctgccctggccgccacgctggctggggtgtagggccgggcaggtggggctgaggggactcccagcctcgctggaggtgcagaggcctggcctctgtctgtttgccgtggagcctggtggtgctaacggccctttccccaggaatccctccccaacggctgccttccccaagcatccagcctggggatgggcccctttcaggaatcacccccgaggatggcctcggggtttccccctgtgccctgacagccgctcctggtatcagagctgctttccagagggcagcacagccagggccgggtgtctttagggatcagtttttccaagactccagaaggtgccaggttctccccttgagctcctgctcccccatcccccatcctcccagacctgggcaggagctgtgctgggagaaagggtggcagccgggagcctcagagctgagccccggcctggctgcccctcccctccggccctctccactgctttccagacactaaccaaggcttccaggccagggattgcccaacactcctagggcagccctcccagcgccccatggggtcgcccatgggtagagacggctttcttgtgcccctccctggggcatggagggtggagtgggcctcgggtccccctgaactccctgtatatctgtataaataacgggattttcatggcgccgccccacccgcattatcactgtgtgatggtctcagtcagtctcctccctgtctccactctttccctctatttatttcactctcttgtttggttctaccctgcaccctcggtccccttccaggttcctgtttataagccccaacccctctgtccccatcttgtatgtgaaaacttgtctcaataaaccctttggagtaa

SEQ ID NO: 342138 - DNA, 2142 bp, Homo sapiens
tgaggacccagtcggggagaggcagaaagccgtcgggtcaaactccaaggcattctggctgacctgcgggatgtggatgggctgcccccaaaagtgactggcccgcctcctggcacaccccagccccggccacatgaagacgtcttcatcatggacactatcgggggcggggaggtgagcctgggggacttggcagatctcaccgtcaccaacgacaacgacctcagctgcgatctgtctgacagcaaagatgcttttaagaagacgtggaaccccaagttcaccctgcgctcgcactacgacggcattcgttccctggccttccaccacagccagtcggctctgctcaccgcctccgaggacggcacgctcaagctctggaacctgcagaaggcggtcacggccaagaagaatgcggcgctagatgtggaacctatacatgctttccgggctcacaggggcccagtgttggctgtggctatgggcagcaacagtgaatactgctacagtggcggggcagatgcctgcatccatagttggaagattccagacctcagcatggatccctatgatggctacgacccaagcgtgctgagccacgtcctggagggccacggggacgccgtgtggggcctggccttcagtcccacctcccagcgcctggcctcctgttctgctgatggcaccgtccgcatctgggaccccagcagcagcagcccggcctgcctctgcaccttccccacagccagcgagcacggggtccccacctcagtggccttcaccagcaccgagcctgcccacatcgtggcctccttccgctctggcgacaccgtcttgtatgacatggaggttggcagtgccctcctcacgctggagtcccggggcagcagcggtccaacccagatcaaccaagtggtgagtcatccaaaccagcctctcaccatcaccgcccacgacgacaggggcatccgcttcctggacaatcggacaggtaagccggtgcactccatggttgcacacctggacgcagtcacctgcctagccgtggaccccaacggcgcattcctgatgtcaggaagccatgactgctccctgcgtctctggagcctggacaacaaaacgtgcgtgcaggagatcacggcccaccgcaagaagcacgaggaggccatccacgctgttgcctgccaccccagcaaggccctcattgccagtgctggcgctgatgccctggccaaggtcttcgtatgatgcccacctggccctgccctggccgccacgctggctggggtgtagggccgggcaggtggggctgaggggactcccagcctcgctggaggtgcagaggcctggcctctgtctgtttgccgtggagcctggtggtgctaacggccctttccccaggaatccctccccaacggctgccttccccaagcatccagcctggggatgggcccctttcaggaatcacccccgaggatggcctcggggtttccccctgtgccctgacagccgctcctggtatcagagctgctttccagagggcagcacagccagggccgggtgtctttagggatcagtttttccaagactccagaaggtgccaggttctccccttgagctcctgctcccccatcccccatcctcccagacctgggcaggagctgtgctgggagaaagggtggcagccgggagcctcagagctgagccccggcctggctgcccctcccctccggccctctccactgctttccagacactaaccaaggcttccaggccagggattgcccaacactcctagggcagccctcccagcgccccatggggtcgcccatgggtagagacggctttcttgtgcccctccctggggcatggagggtggagtgggcctcgggtccccctgaactccctgtatatctgtataaataacgggattttcatggcgccgccccacccgcattatcactgtgtgatggtctcagtcagtctcctccctgtctccactctttccctctatttatttcactctcttgtttggttctaccctgcaccctcggtccccttccaggttcctgtttataagccccaacccctctgtccccatcttgtatgtgaaaacttgtctcaataaaccctttggagtaa

SEQ ID NO: 342139 - DNA, 3368 bp, Homo sapiens
ggccccggggcctccatgatggaggagcgagcggccgccgcggtcgccgccgccgcctcctcctgccgtccgctcggctcaggcgcgggccctggccccactggggcggccccggtctccgcccctgcccccgggccgggcccggcaggtaagggaggcggcggcggaggcagccccgggcccacggcgggcccggagcccctgagcctgccggggatcctgcactttatccagcacgagtgggcgcgcttcgaagccgagaaagcccgctgggaggccgagcgcgccgagttacaggctcaggtggccttccttcagggagagaggaaagggcaggagaatctaaagacggacctggtgcggcggatcaagatgctagagtatgcgctgaagcaggaaagggccaaatatcataaactgaagtttgggacagacctgaaccagggggagaagaaagcagatgtgtcagaacaagtctccaatggccccgtggaatcggtcaccctggagaacagcccgttggtgtggaaggaggggcggcagcttctccgacagtacctggaagaggtgggctacacagacaccatcctcgacatgcggtccaagcgcgtccgttccctgctgggccgctcgctggagctcaacggggcagtggagccgagtgaaggggcccccagggctccaccaggccctgcagggctcagtggtggggagtcgctgctggtgaaacagatcgaggagcagataaagaggaacgcggcaggcaaagatggcaaagagcgcttgggcggctcagtgctggggcagatccccttcctgcagaactgcgaggacgaagacagcgacgaggacgatgagctggacagcgtgcagcacaagaagcagcgtgtgaagctcccatccaaggctctggtgcccgaaatggaagacgaggatgaggaagacgactctgaggatgctatcaatgagtttgatttcctgggctcaggagaggatggggaaggggctccagaccctcggcggtgcactgtggatgggagcccccatgagctggaaagccgtcgggtcaaactccaaggcattctggctgacctgcgggatgtggatgggctgcccccaaaagtgactggcccgcctcctggcacaccccagccccggccacatgaagacgtcttcatcatggacactatcgggggcggggaggtgagcctgggggacttggcagatctcaccgtcaccaacgacaacgacctcagctgcgatctgtctgacagcaaagatgcttttaagaagacgtggaaccccaagttcaccctgcgctcgcactacgacggcattcgttccctggccttccaccacagccagtcggctctgctcaccgcctccgaggacggcacgctcaagctctggaacctgcagaaggcggtcacggccaagaagaatgcggcgctagatgtggaacctatacatgctttccgggctcacaggggcccagtgttggctgtggctatgggcagcaacagtgaatactgctacagtggcggggcagatgcctgcatccatagttggaagattccagacctcagcatggatccctatgatggctacgacccaagcgtgctgagccacgtcctggagggccacggggacgccgtgtggggcctggccttcagtcccacctcccagcgcctggcctcctgttctgctgatggcaccgtccgcatctgggaccccagcagcagcagcccggcctgcctctgcaccttccccacagccagcgagcacggggtccccacctcagtggccttcaccagcaccgagcctgcccacatcgtggcctccttccgctctggcgacaccgtcttgtatgacatggaggttggcagtgccctcctcacgctggagtcccggggcagcagcggtccaacccagatcaaccaagtggtgagtcatccaaaccagcctctcaccatcaccgcccacgacgacaggggcatccgcttcctggacaatcggacaggtaagccggtgcactccatggttgcacacctggacgcagtcacctgcctagccgtggaccccaacggcgcattcctgatgtcaggaagccatgactgctccctgcgtctctggagcctggacaacaaaacgtgcgtgcaggagatcacggcccaccgcaagaagcacgaggaggccatccacgctgttgcctgccaccccagcaaggccctcattgccagtgctggcgctgatgccctggccaaggtcttcgtatgatgcccacctggccctgccctggccgccacgctggctggggtgtagggccgggcaggtggggctgaggtgagggcagaaaccccgcattctgagtctctgcacgcccatgcctagtactgccaggtgtgctgagccccgcagtccagtcaggggcgtcctgtgagaatcactgggggagccctgggcatgcaggggaggggttgaggccttagaggcgccctagaggcggcggctcagtctcccctcccttctctttcccgcaggggactcccagcctcgctggaggtgcagaggcctggcctctgtctgtttgccgtggagcctggtggtgctaacggccctttccccaggaatccctccccaacggctgccttccccaagcatccagcctggggatgggcccctttcaggaatcacccccgaggatggcctcggggtttccccctgtgccctgacagccgctcctggtatcagagctgctttccagagggcagcacagccagggccgggtgtctttagggatcagtttttccaagactccagaaggtgccaggttctccccttgagctcctgctcccccatcccccatcctcccagacctgggcaggagctgtgctgggagaaagggtggcagccgggagcctcagagctgagccccggcctggctgcccctcccctccggccctctccactgctttccagacactaaccaaggcttccaggccagggattgcccaacactcctagggcagccctcccagcgccccatggggtcgcccatgggtagagacggctttcttgtgcccctccctggggcatggagggtggagtgggcctcgggtccccctgaactccctgtatatctgtataaataacgggattttcatggcgccgccccacccgcattatcactgtgtgatggtctcagtcagtctcctccctgtctccactctttccctctatttatttcactctcttgtttggttctaccctgcaccctcggtccccttccaggttcctgtttataagccccaacccctctgtccccatcttgtatgtgaaaacttgtctcaataaaccctttggagtaa

SEQ ID NO: 342140 - DNA, 2694 bp, Homo sapiens
ggccccggggcctccatgatggaggagcgagcggccgccgcggtcgccgccgccgcctcctcctgccgtccgctcggctcaggcgcgggccctggccccactggggcggccccggtctccgcccctgcccccgggccgggcccggcaggtaagggaggcggcggcggaggcagccccgggcccacggcgggcccggagcccctgagcctgccggggatcctgcactttatccagcacgagtgggcgcgcttcgaagccgagaaagcccgctgggaggccgagcgcgccgagttacaggctcaggtggccttccttcagggagagaggaaagggcaggagaatctaaagacggacctggtgcggcggatcaagatgctagagtatgcgctgaagcaggaaagggccaaatatcataaactgaagtttgggacagacctgaaccagggggagaagaaagcagatgtgtcagaacaagtctccaatggccccgtggaatcggtcaccctggagaacagcccgttggtgtggaaggaggggcggcagcttctccgacagtacctggaagaggtgggctacacagacaccatcctcgacatgcggtccaagcgcgtccgttccctgctgggccgctcgctggagctcaacggggcagtggagccgagtgaaggggcccccagggctccaccaggccctgcagggctcagtggtggggagtcgctgctggtgaaacagatcgaggagcagataaagaggaacgcggcaggcaaagatggcaaagagcgcttgggcggctcagtgctggggcagatccccttcctgcagaactgcgaggacgaagacagcgacgaggacgatgagctggacagcgtgcagcacaagaagcagcgtgtgaagctcccatccaaggctctggtgcccgaaatggaagacgaggatgaggaagacgactctgaggatgctatcaatgagtttgatttcctgggctcaggagaggatggggaaggggctccagaccctcggcggtgcactgtggatgggagcccccatgagctggaaagccgtcgggtcaaactccaaggcattctggctgacctgcgggatgtggatgggctgcccccaaaagtgactggcccgcctcctggcacaccccagccccggccacatgaagacgtcttcatcatggacactatcgggggcggggaggtgagcctgggggacttggcagatctcaccgtcaccaacgacaacgacctcagctgcgatctgtctgacagcaaagatgcttttaagaagacgtggaaccccaagttcaccctgcgctcgcactacgacggcattcgttccctggccttccaccacagccagtcggctctgctcaccgcctccgaggacggcacgctcaagctctggaacctgcagaaggcggtcacggccaagaagaatgcggcgctagatgtggaacctatacatgctttccgggctcacaggggcccagtgttggctgtggctatgggcagcaacagtgaatactgctacagtggcggggcagatgcctgcatccatagttggaagattccagacctcagcatggatccctatgatggctacgacccaagcgtgctgagccacgtcctggagggccacggggacgccgtgtggggcctggccttcagtcccacctcccagcgcctggcctcctgttctgctgatggcaccgtccgcatctgggaccccagcagcagcagcccggcctgcctctgcaccttccccacagccagcgagcacggggtccccacctcagtggccttcaccagcaccgagcctgcccacatcgtggcctccttccgctctggcgacaccgtcttgtatgacatggaggttggcagtgccctcctcacgctggagtcccggggcagcagcggtccaacccagatcaaccaagtggtgagtcatccaaaccagcctctcaccatcaccgcccacgacgacaggggcatccgcttcctggacaatcggacaggtaagccggtgcactccatggttgcacacctggacgcagtcacctgcctagccgtggaccccaacggcgcattcctgatgtcaggaagccatgactgctccctgcgtctctggagcctggacaacaaaacgtgcgtgcaggagatcacggcccaccgcaagaagcacgaggaggccatccacgctgttgcctgccaccccagcaaggccctcattgccagtgctggcgctgatgccctggccaaggtcttcgtatgatgcccacctggccctgccctggccgccacgctggctggggtgtagggccgggcaggtggggctgaggggactcccagcctcgctggaggtgcagaggcctggcctctgtctgtttgccgtggagcctggtggtgctaacggccatggagggtggagtgggcctcgggtccccctgaactccctgtatatctgtataaataacgggattttcatggcgccgccccacccgcattatcactgtgtgatggtctcagtcagtctcctccctgtctccactctttccctctatttatttcactctcttgtttggttctaccctgcaccctcggtccccttccaggttcctgtttataagccccaacccctctgtccccatcttgtatgtgaaaacttgtctcaataaaccctttggagtaa

SEQ ID NO: 342141 - DNA, 1313 bp, Homo sapiens
taaggatcctgtttcactgcggttgagtgcctctacgctcagtcgggagcaggtcaccagatagtccaacccagatcaaccaagtggtgagtcatccaaaccagcctctcaccatcaccgcccacgacgacaggggcatccgcttcctggacaatcggacaggtaagccggtgcactccatggttgcacacctggacgcagtcacctgcctagccgtggaccccaacggcgcattcctgatgtcaggaagccatgactgctccctgcgtctctggagcctggacaacaaaacgtgcgtgcaggagatcacggcccaccgcaagaagcacgaggaggccatccacgctgttgcctgccaccccagcaaggccctcattgccagtgctggcgctgatgccctggccaaggtcttcgtatgatgcccacctggccctgccctggccgccacgctggctggggtgtagggccgggcaggtggggctgaggggactcccagcctcgctggaggtgcagaggcctggcctctgtctgtttgccgtggagcctggtggtgctaacggccctttccccaggaatccctccccaacggctgccttccccaagcatccagcctggggatgggcccctttcaggaatcacccccgaggatggcctcggggtttccccctgtgccctgacagccgctcctggtatcagagctgctttccagagggcagcacagccagggccgggtgtctttagggatcagtttttccaagactccagaaggtgccaggttctccccttgagctcctgctcccccatcccccatcctcccagacctgggcaggagctgtgctgggagaaagggtggcagccgggagcctcagagctgagccccggcctggctgcccctcccctccggccctctccactgctttccagacactaaccaaggcttccaggccagggattgcccaacactcctagggcagccctcccagcgccccatggggtcgcccatgggtagagacggctttcttgtgcccctccctggggcatggagggtggagtgggcctcgggtccccctgaactccctgtatatctgtataaataacgggattttcatggcgccgccccacccgcattatcactgtgtgatggtctcagtcagtctcctccctgtctccactctttccctctatttatttcactctcttgtttggttctaccctgcaccctcggtccccttccaggttcctgtttataagccccaacccctctgtccccatcttgtatgtgaaaacttgtctcaataaaccctttggagtaa

SEQ ID NO: 342142 - DNA, 410 bp, Homo sapiens
tgtgggaggctctgggagtctctcgtccagtcctttcactctctcaggcgaggcccagagtgggaggggaacctgccacccgcccttctcgcctcaggtaagccggtgcactccatggttgcacacctggacgcagtcacctgcctagccgtggaccccaacggcgcattcctgatgtcaggaagtaagttgagcacactagtcccaccagggttggggagaaggggaggaagaggcctgggcactggctccaggcaagtgctcagggggccccgggggccagggctgggggaggctggtctgggcgggaatgaccgtggtgaccatagggggcagcacagtccgctggggccctcctctgggtcactggagctgcatcgtctcattcggcctctaagcagcctgtgcgg

SEQ ID NO: 342143 - DNA, 263 bp, Homo sapiens
cgaccctgatgactccccactggaatccaccccagagtccaccaggaccaaagaccccgccccggtctctgtccctcactcaggacctgctgcggggcgggccatgagaccagactcgggcttagggaacaccactgtggccccaacctcgaccaggccacaggcccttccttcctgccctgcggcagcacagactttggggtctgtgcagagaggaatcacagaggccccaggctgaggtggtgggggtggaagacccccag

SEQ ID NO: 342144 - DNA, 150 bp, Homo sapiens
gagacggagtctggcattaaattatcttaagagcatgaaccttattgtgaaccacgcatgtgaggatccaggttgtgtactcatgagaatctaactaatgcctgatgatatgaagtggtgcagttttatccacaaatcattccccttctg

SEQ ID NO: 342145 - DNA, 175 bp, Homo sapiens
ccttcttcttaaagtacaggttttactgcagctttgactggggagggtaaagagattggagtaaaagagacttccttggaagtttctttaataattcagaaatttgtgttgacatcacagtagagtagtaagggtggattggagaaacatgtgataggaacagacaggccttaga

SEQ ID NO: 342146 - DNA, 1303 bp, Homo sapiens
ggggagcggcagggatcaccatccaaagggagcggcccccacggcgagctgaccccgacgttctgactgcaggagccctcatccaggctgggctcctgccgggcacggctgtgaccatttctcagggccaggttctcgtccccacacccactgcacagggcaggccaggctggtcttcccactgtggggatgaaggatcctccacaggaggaggagagcagagtccacagacatcccaacagcctcagcctccctgtgcctggccggcccccacagcttccccgtctcctccaggccccacagacactgatgaatggacagagacccccaaaaccagctgccccttgcatgtctgtctccatatgtttggtgacagcagtgaaaatgttattagttttgagggggtttgggaagcccagcggtacctgaggagtttctggacatttaagccggttcctaggtgtggccttaacagggaggctgcccttcctttcactgaatgagctgcgtcactcataagctcactgagggaaccccatctgccagctcgtgcgtgctcagacgacgtccatgtctcaagcgttctgtgaaggctgcggtgcagcgtgaggtcaccctgctgtgttcagagctttgctcactgcctgcggggctggaccgttgcacctccagggcccccagaaaccgagtttcgggtcagggtcctctgtgtgcattcctgggggtccatgtaccagctgtgacgacgtccaggggttgggctgagaagcagacacccttggggaaactggctctgtccctcccctcccccatcccaggagctgaggtcttggtgaggccacagggccaggtccacgcaaggactgtccgtgtcctgtcctgtggtctctggccccacgtgacacccacacgtgtggtaggcagcctggcctgggttgtggctatggccaggcccccaagctgtccccgatgcccagggctggtgaccacccaggcaggtgggggccccacttggtaacagagtcatagggcagaacccacctgggctgccacagaaggtctggctgcccctgtgcccactgctccccaccatggccaatcagaagagtcaggggctcctggtctttccgggagggacgtggcccagccagctctaggtgttctgagcagctctgggacccagcgattgaggggtcaggctgggggtgtcagagccagggtcctccttaagtacctcccacactacacagacagcccctgagctctggagcaagccctgacccaataaaggctttgaacccaa

SEQ ID NO: 342147 - DNA, 1217 bp, Homo sapiens
ggggagcggcagggatcaccatccaaagggagcggcccccacggcgagctgaccccgacgttctgactgcaggagccctcatccaggctgggctcctgccgggcacggctgtgaccatttctcagggccaggttctcgtccccacacccactgcacagggcaggccaggctggtcttcccactgtggggatgaaggatcctccacaggaggaggagagcagagtccacagacatcccaacagcctcagcctccctgtgcctggccggcccccacagcttccccgtctcctccaggccccacagacactgatgaatggacagagacccccaaaaccagctgccccttgcatgtctgtctccatatgtttggtgacagcagtgaaaatgttattagttttgagggggtttgggaagcccagcggtacctgaggagtttctggacatttaagccggttcctaggtgtggccttaacagggaggctgcccttcctttcactgaatgagctgcgtcactcataagctcactgagggaaccccatctgccagctcgtgcgtgctcagacgacgtccatgtctcaagcgttctgtgaaggctgcggtgcagcgtgaggtcaccctgctgtgttcagagctttgctcactgcctgcggggctggaccgttgcacctccagggcccccagaaaccgagtttcgggtcagggtcctctgtgtgcattcctgggggtccatgtaccagctgtgacgacgtccaggggttgggctgagaagcagacacccttggggaaactggctctgtccctcccctcccccatcccaggagctgaggtcttggtgaggccacagggccaggtccacgcaaggactgtccgtgtcctgtcctgtggtctctggccccacgtgacacccacacgtgtggtaggcagcctggcctgggttgtggctatggccaggcccccaagctgtccccgatgcccagggctggtgaccacccaggcaggtgggggccccacttggtaacagagtcatagggcagaacccacctgggctgccacagaaggtctggctgcccctgtgcccactgctccccaccatggccaatcagaagagtcaggggctcctggtctttccgggagggacgtggcccagccagctctaggtgttctgaggcccctgagctctggagcaagccctgacccaataaaggctttgaacccaa

SEQ ID NO: 342148 - DNA, 1077 bp, Homo sapiens
  misc_feature (888)..(888): n is a, c, g, or t
  misc_feature (890)..(890): n is a, c, g, or t
  misc_feature (894)..(894): n is a, c, g, or t
  misc_feature (947)..(947): n is a, c, g, or t
  misc_feature (955)..(955): n is a, c, g, or t
  misc_feature (977)..(977): n is a, c, g, or t
  misc_feature (1075)..(1075): n is a, c, g, or t
ctgagcgaccgcggacctcctcgggacaggacttcagggccacaggtgctgccaagatgctccagggcacctgctccgtgctcctgctctggggaatcctgggggccatccaggcccagcagcaggaggtcatctcgccggacactaccgagagaaacaacaactgcccagagaagaccgactgccccatccacgtgtacttcgtgctggacacctcggagagcgtcaccatgcagtcccccacggacatcctgctcttccacatgaagcagttcgtgccgcagttcatcagccagctgcagaacgagttctacctggaccaggtggcgctgagctggcgctacggcggcctgcacttctctgaccaggtggaggtgttcagcccaccgggcagcgaccgggcctccttcatcaagaacctgcagggcatcagctccttccgccgcggcaccttcaccgactgcgcgctggccaacatgacggagcagatccggcaggaccgcagcaagggcaccgtccacttcgccgtggtcatcaccgacggccacgtcaccggcagcccctgcgggggcatcaagctgcaggccgagcgggcccgcgaggagggcatccggctcttcgccgtggcccccaaccagaacctgaaggagcagggcctgcgggacatcgccagcacgccgcacgagctctaccgcaacgactacgccaccatgctgcccgactccaccgagatcgaccaggacaccatcaaccgcatcatcaaggtcatgaaacacgaagcctacggagagtgctacaaggtgagctgcctggaatccctgggcctctggcccaaggctacgtggacagaaggtgcaagggcacatgggtgagcgggagagctggcanangganacaggagaccgggcatcgaagcccattggattccaggaccaaggcgttctggntcaaaganaaaggtgatttgagcgacgtcncaggtggcctgcttgctgcaaacggacgatgaaaaggcactgggcatgactctgttcaggaacttgaacgggccgaggtacggggagaggatcagganag

SEQ ID NO: 342149 - DNA, 3090 bp, Homo sapiens
acaggatcttatgatgcctgcaggtcttgatgaaggatgccggtcgctgccggtggctgaacacctccacctggtcagagaagtgcaggcccgcgtagcgccagctcagcgccacctggtccaggtagaactcgttctgcagctggctgatgaactgcggcaccttcaccgactgcgcgctggccaacatgacggagcagatccggcaggaccgcagcaagggcaccgtccacttcgccgtggtcatcaccgacggccacgtcaccggcagcccctgcggggggcatccggctcttcgccgtggcccccaaccagaacctgaaggagcagggcctgcgggacatcgccagcacgccgcacgagctctaccgcaacgactacgccaccatgctgcccgactccaccgagatcgaccaggacaccatcaaccgcatcatcaaggtcatgaaacacgaagcctacggagagtgctacaaggtgagctgcctggaaatccctgggccctctggccccaagggctaccgtggacagaagggtgccaagggcaacatgggtgagccgggagagcctggccagaagggaagacagggagacccgggcatcgaaggccccattggattcccaggacccaagggcgttcctggcttcaaaggagagaagggtgaatttggagccgacggtcgcaagggggcccctggcctggctggcaagaacgggaccgatggacagaagggcaagctggggcgcatcggacctcctggctgcaagggagaccctggaaaccggggccccgacggttacccgggggaagcagggagtccaggggagcgaggagaccaaggcggcaagggggaccctggccgcccaggacgcagagggcccccgggagaaatcggggccaagggaagcaaggggtatcaaggcaacaatggagccccaggaagtcctggtgtgaaaggagccaagggcgggcctgggccccgcggacccaaaggcgagccggggcgcaggggagaccccggcaccaagggcagcccaggcagcgatggccccaagggggagaagggggaccctggccctgaggggccccgcggcctggctggagaggttggcaacaaaggagccaagggagaccgaggcttgcctggacccagaggcccccagggagctcttggggagcccggaaagcagggatctcggggagaccccggtgatgcaggaccccgtggagactcaggacagccaggccccaagggagaccccggcaggcctggattcagctacccaggaccccgaggagcacccggagaaaaaggcgagcccggcccacgcggccccgagggaggccgaggcgactttggcttgaaaggagaacctgggaggaaaggagagaaaggagagcctgcggatcctggtccccctggtgagccaggccctcgggggccaagaggagtcccaggacccgagggtgagcccggcccccctggagaccccggtctcacggagtgtgacgtcatgacctacgtgagggagacctgcgggtgctgcgactgtgagaagcgctgtggcgccctggacgtggtcttcgtcatcgacagctccgagagcattgggtacaccaacttcacactggagaagaacttcgtcatcaacgtggtcaacaggctgggtgccatcgctaaggaccccaagtccgagacagggacgcgtgtgggcgtggtgcagtacagccacgagggcacctttgaggccatccagctggacgacgaacgtatcgactccctgtcgagcttcaaggaggctgtcaagaacctcgagtggattgcgggcggcacctggacaccctcagccctcaagtttgcctacgaccgcctcatcaaggagagccggcgccagaagacacgtgtgtttgcggtggtcatcacggacgggcgccacgaccctcgggacgatgacctcaacttgcgggcgctgtgcgaccgcgacgtcacagtgacggccatcggcatcggggacatgttccacgagaagcacgagagtgaaaacctctactccatcgcctgcgacaagccacagcaggtgcgcaacatgacgctgttctccgacctggtcgctgagaagttcatcgatgacatggaggacgtcctctgcccggaccctcagatcgtgtgcccagaccttccctgccaaacagagctgtccgtggcacagtgcacgcagcggcccgtggacatcgtcttcctgctggacggctccgagcggctgggtgagcagaacttccacaaggcccggcgcttcgtggagcaggtggcgcggcggctgacgctggcccggagggacgacgaccctctcaacgcacgcgtggcgctgctgcagtttggtggccccggcgagcagcaggtggccttcccgctgagccacaacctcacggccatccacgaggcgctggagaccacacaatacctgaactccttctcgcacgtgggcgcaggcgtggtgcacgccatcaatgccatcgtgcgcagcccgcgtggcggggcccggaggcacgcagagctgtccttcgtgttcctcacggacggcgtcacgggcaacgacagtctgcacgagtcggcgcactccatgcgcaagcagaacgtggtacccaccgtgctggccttgggcagcgacgtggacatggacgtgctcaccacgctcagcctgggtgaccgcgccgccgtgttccacgagaaggactatgacagcctggcgcaacccggcttcttcgaccgcttcatccgctggatctgctagcgccgccgcccgggccccgcagtcgagggtcgtgagcccaccccgtccatggtgctaagcgggcccgggtcccacacggccagcaccgctgctcactcggacgacgccctgggcctgcacctctccagctcctcccacggggtccccgtagccccggcccccgcccagccccaggtctccccaggccctccgcaggctgcccggcctccctccccctgcagccatcccaaggctcctgacctacctggcccctgagctctggagcaagccctgacccaataaaggctttgaacccaa

SEQ ID NO: 342150 - DNA, 3546 bp, Homo sapiens
  misc_feature (2033)..(2033): n is a, c, g, or t
  misc_feature (2037)..(2037): n is a, c, g, or t
ccatgttgccgcaacatgctcgggagcggagcctcctcgggaccaggacttcagggccacaggtgctgccaagatgctccagggcacctgctccgtgctcctgctctggggaatcctgggggccatccaggcccagcagcaggaggtcatctcgccggacactaccgagagaaacaacaactgcccagagaagaccgactgccccatccacgtgtacttcgtgctggacacctcggagagcgtcaccatgcagtcccccacggacatcctgctcttccacatgaagcagttcgtgccgcagttcatcagccagctgcagaacgagttctacctggaccaggtggcgctgagctggcgctacggcggcctgcacttctctgaccaggtggaggtgttcagcccaccgggcagcgaccgggcctccttcatcaagaacctgcagggcatcagctccttccgccgcggcaccttcaccgactgcgcgctggccaacatgacggagcagatccggcaggaccgcagcaagggcaccgtccacttcgccgtggtcatcaccgacggccacgtcaccggcagcccctgcgggggcatcaagctgcaggccgagcgggcccgcgaggagggcatccggctcttcgccgtggcccccaaccagaacctgaaggagcagggcctgcgggacatcgccagcacgccgcacgagctctaccgcaacgactacgccaccatgctgcccgactccaccgagatcgaccaggacaccatcaaccgcatcatcaaggtcatgaaacacgaagcctacggagagtgctacaaggtgagctgcctggaaatccctgggccctctggccccaagggctaccgtggacagaagggtgccaagggcaacatgggtgagccgggagagcctggccagaagggaagacagggagacccgggcatcgaaggccccattggattcccaggacccaagggcgttcctggcttcaaaggagagaagggtgaatttggagccgacggtcgcaagggggcccctggcctggctggcaagaacgggaccgatggacagaagggcaagctggggcgcatcggacctcctggctgcaagggagaccctggaaaccggggccccgacggttacccgggggaagcagggagtccaggggagcgaggagaccaaggcggcaagggggaccctggccgcccaggacgcagagggcccccgggagaaatcggggccaagggaagcaaggggtatcaaggcaacaatggagccccaggaagtcctggtgtgaaaggagccaagggcgggcctgggccccgcggacccaaaggcgagccggggcgcaggggagaccccggcaccaagggcagcccaggcagcgatggccccaagggggagaagggggaccctggccctgaggggccccgcggcctggctggagaggttggcaacaaaggagccaagggagaccgaggcttgcctggacccagaggcccccagggagctcttggggagcccggaaagcagggatctcggggagaccccggtgatgcaggaccccgtggagactcaggacagccaggccccaagggagaccccggcaggcctggattcagctacccaggaccccgaggagcacccggagaaaaaggcgagcccggcccacgcggccccgagggaggccgaggcgactttggcttgaaaggagaacctgggaggaaaggagagaaaggagagcctgcggatcctggtccccctggtgagccaggccctcgggggccaagaggagtcccaggacccgagggtgagcccggcccccctggagaccccggtctcacggagtgtgacgtcatgacctacgtgagggagacctgcgggtgctgcgctccgagagcattgggtacaccaacttcacactggagaagaacttcgtcatcaacgtggtcaacaggctgggtgccatcgctaaggaccccaagtccgagacaggtcagcggggcagggcgggtgcagcattgcggggggccgngggngcgtgggaggcgatgagatgggagaagtccagacgcgtccctccaacgagggcctctgcatggctggggatgccccagaccccgaggcctctggcaacgacctcacgcgtgcggcttgcagggacgcgtgtgggcgtggtgcagtacagccacgagggcacctttgaggccatccagctggacgacgaacgtatcgactccctgtcgagcttcaaggaggctgtcaagaacctcgagtggattgcgggcggcacctggacaccctcagccctcaagtttgcctacgaccgcctcatcaaggagagccggcgccagaagacacgtgtgtttgcggtggtcatcacggacgggcgccacgaccctcgggacgatgacctcaacttgcgggcgctgtgcgaccgcgacgtcacagtgacggccatcggcatcggggacatgttccacgagaagcacgagagtgaaaacctctactccatcgcctgcgacaagccacagcaggtgcgcaacatgacgctgttctccgacctggtcgctgagaagttcatcgatgacatggaggacgtcctctgcccggaccctcagatcgtgtgcccagaccttccctgccaaacagagctgtccgtggcacagtgcacgcagcggcccgtggacatcgtcttcctgctggacggctccgagcggctgggtgagcagaacttccacaaggcccggcgcttcgtggagcaggtggcgcggcggctgacgctggcccggagggacgacgaccctctcaacgcacgcgtggcgctgctgcagtttggtggccccggcgagcagcaggtggccttcccgctgagccacaacctcacggccatccacgaggcgctggagaccacacaatacctgaactccttctcgcacgtgggcgcaggcgtggtgcacgccatcaatgccatcgtgcgcagcccgcgtggcggggcccggaggcacgcagagctgtccttcgtgttcctcacggacggcgtcacgggcaacgacagtctgcacgagtcggcgcactccatgcgcaagcagaacgtggtacccaccgtgctggccttgggcagcgacgtggacatggacgtgctcaccacgctcagcctgggtgaccgcgccgccgtgttccacgagaaggactatgacagcctggcgcaacccggcttcttcgaccgcttcatccgctggatctgctagcgccgccgcccgggccccgcagtcgagggtcgtgagcccaccccgtccatggtgctaagcgggcccgggtcccacacggccagcaccgctgctcactcggacgacgccctgggcctgcacctctccagctcctcccacggggtccccgtagccccggcccccgcccagccccaggtctccccaggccctccgcaggctgcccggcctccctccccctgcagccatcccaaggctcctgacctacctggcccctgagctctggagcaagccctgacccaataaaggctttgaacccaa

SEQ ID NO: 342151 - DNA, 1651 bp, Homo sapiens
gtgacgcgtgggcggactgctgtggggtggtgagcccggaccccctggagaccccggtctcacggagtgtgacgtcatgacctacgtgagggagacctgcgggtgctgcgactgtgagaagcgctgtggcgccctggacgtggtcttcgtcatcgacagctccgagagcattgggtacaccaacttcacactggagaagaacttcgtcatcaacgtggtcaacaggctgggtgccatcgctaaggaccccaagtccgagacagggacgcgtgtgggcgtggtgcagtacagccacgagggcacctttgaggccatccagctggacgacgaacgtatcgactccctgtcgagcttcaaggaggctgtcaagaacctcgagtggattgcgggcggcacctggacaccctcagccctcaagtttgcctacgaccgcctcatcaaggagagccggcgccagaagacacgtgtgtttgcggtggtcatcacggacgggcgccacgaccctcgggacgatgacctcaacttgcgggcgctgtgcgaccgcgacgtcacagtgacggccatcggcatcggggacatgttccacgagaagcacgagagtgaaaacctctactccatcgcctgcgacaagccacagcaggtgcgcaacatgacgctgttctccgacctggtcgctgagaagttcatcgatgacatggaggacgtcctctgcccggaccctcagatcgtgtgcccagaccttccctgccaaacagagctgtccgtggcacagtgcacgcagcggcccgtggacatcgtcttcctgctggacggctccgagcggctgggtgagcagaacttccacaaggcccggcgcttcgtggagcaggtggcgcggcggctgacgctggcccggagggacgacgaccctctcaacgcacgcgtggcgctgctgcagtttggtggccccggcgagcagcaggtggccttcccgctgagccacaacctcacggccatccacgaggcgctggagaccacacaatacctgaactccttctcgcacgtgggcgcaggcgtggtgcacgccatcaatgccatcgtgcgcagcccgcgtggcggggcccggaggcacgcagagctgtccttcgtgttcctcacggacggcgtcacgggcaacgacagtctgcacgagtcggcgcactccatgcgcaagcagaacgtggtacccaccgtgctggccttgggcagcgacgtggacatggacgtgctcaccacgctcagcctgggtgaccgcgccgccgtgttccacgagaaggactatgacagcctggcgcaacccggcttcttcgaccgcttcatccgctggatctgctagcgccgccgcccgggccccgcagtcgagggtcgtgagcccaccccgtccatggtgctaagcgggcccgggtcccacacggccagcaccgctgctcactcggacgacgccctgggcctgcacctctccagctcctcccacggggtccccgtagccccggcccccgcccagccccaggtctccccaggccctccgcaggctgcccggcctccctccccctgcagccatcccaaggctcctgacctacctggcccctgagctctggagcaagccctgacccaataaaggctttgaacccaa

SEQ ID NO: 342152 - DNA, 3455 bp, Homo sapiens
  misc_feature (3437)..(3437): n is a, c, g, or t
ccatgttgccgcaacatgctcgggagcggagcctcctcgggaccaggacttcagggccacaggtgctgccaagatgctccagggcacctgctccgtgctcctgctctggggaatcctgggggccatccaggcccagcagcaggaggtcatctcgccggacactaccgagagaaacaacaactgcccagagaagaccgactgccccatccacgtgtacttcgtgctggacacctcggagagcgtcaccatgcagtcccccacggacatcctgctcttccacatgaagcagttcgtgccgcagttcatcagccagctgcagaacgagttctacctggaccaggtggcgctgagctggcgctacggcggcctgcacttctctgaccaggtggaggtgttcagcccaccgggcagcgaccgggcctccttcatcaagaacctgcagggcatcagctccttccgccgcggcaccttcaccgactgcgcgctggccaacatgacggagcagatccggcaggaccgcagcaagggcaccgtccacttcgccgtggtcatcaccgacggccacgtcaccggcagcccctgcgggggcatcaagctgcaggccgagcgggcccgcgaggagggcatccggctcttcgccgtggcccccaaccagaacctgaaggagcagggcctgcgggacatcgccagcacgccgcacgagctctaccgcaacgactacgccaccatgctgcccgactccaccgagatcgaccaggacaccatcaaccgcatcatcaaggtcatgaaacacgaagcctacggagagtgctacaaggtgagctgcctggaaatccctgggccctctggccccaagggctaccgtggacagaagggtgccaagggcaacatgggtgagccgggagagcctggccagaagggaagacagggagacccgggcatcgaaggccccattggattcccaggacccaagggcgttcctggcttcaaaggagagaagggtgaatttggagccgacggtcgcaagggggcccctggcctggctggcaagaacgggaccgatggacagaagggcaagctggggcgcatcggacctcctggctgcaagggagaccctggaaaccggggccccgacggttacccgggggaagcagggagtccaggggagcgaggagaccaaggcggcaagggggaccctggccgcccaggacgcagagggcccccgggagaaatcggggccaagggaagcaaggggtatcaaggcaacaatggagccccaggaagtcctggtgtgaaaggagccaagggcgggcctgggccccgcggacccaaaggcgagccggggcgcaggggagaccccggcaccaagggcagcccaggcagcgatggccccaagggggagaagggggaccctggccctgaggggccccgcggcctggctggagaggttggcaacaaaggagccaagggagaccgaggcttgcctggacccagaggcccccagggagctcttggggagcccggaaagcagggatctcggggagaccccggtgatgcaggaccccgtggagactcaggacagccaggccccaagggagaccccggcaggcctggattcagctacccaggaccccgaggagcacccggagaaaaaggcgagcccggcccacgcggccccgagggaggccgaggcgactttggcttgaaaggagaacctgggaggaaaggagagaaaggagagcctgcggatcctggtccccctggtgagccaggccctcgggggccaagaggagtcccaggacccgagggtgagcccggcccccctggagaccccggtctcacggagtgtgacgtcatgacctacgtgagggagacctgcgggtgctgcgactgtgagaagcgctgtggcgccctggacgtggtcttcgtcatcgacagctccgagagcattgggtacaccaacttcacactggagaagaacttcgtcatcaacgtggtcaacaggctgggtgccatcgctaaggaccccaagtccgagacagggacgcgtgtgggcgtggtgcagtacagccacgagggcacctttgaggccatccagctggacgacgaacgtatcgactccctgtcgagcttcaaggaggctgtcaagaacctcgagtggattgcgggcggcacctggacaccctcagccctcaagtttgcctacgaccgcctcatcaaggagagccggcgccagaagacacgtgtgtttgcggtggtcatcacggacgggcgccacgaccctcgggacgatgacctcaacttgcgggcgctgtgcgaccgcgacgtcacagtgacggccatcggcatcggggacatgttccacgagaagcacgagagtgaaaacctctactccatcgcctgcgacaagccacagcaggtgcgcaacatgacgctgttctccgacctggtcgctgagaagttcatcgatgacatggaggacgtcctctgcccggaccctcagatcgtgtgcccagaccttccctgccaaacagagctgtccgtggcacagtgcacgcagcggcccgtggacatcgtcttcctgctggacggctccgagcggctgggtgagcagaacttccacaaggcccggcgcttcgtggagcaggtggcgcggcggctgacgctggcccggagggacgacgaccctctcaacgcacgcgtggcgctgctgcagtttggtggccccggcgagcagcaggtggccttcccgctgagccacaacctcacggccatccacgaggcgctggagaccacacaatacctgaactccttctcgcacgtgggcgcaggcgtggtgcacgccatcaatgccatcgtgcgcagcccgcgtggcggggcccggaggcacgcagagctgtccttcgtgttcctcacggacggcgtcacgggcaacgacagtctgcacgagtcggcgcactccatgcgcaagcagaacgtggtacccaccgtgctggccttgggcagcgacgtggacatggacgtgctcaccacgctcagcctgggtgaccgcgccgccgtgttccacgagaaggactatgacagcctggcgcaacccggcttcttcgaccgcttcatccgctggatctgctagcgccgccgcccgggccccgcagtcgagggtcgtgagcccaccccgtccatggtgctaagcgggcccgggtcccacacggccagcaccgctgctcactcggacgacgccctgggcctgcacctctccagctcctcccacggggtccccgtagccccggcccccgcccagccccaggtctccccaggccctccgcaggctgcccggcctccctccccctgcagccatcccaaggctcctgacctacctggcccctgagctctggagcaagccctgacccaataaaggctttgaacccaaaaaaaanaacaaaaaagggcggccg

SEQ ID NO: 342153 - DNA, 865 bp, Homo sapiens
  misc_feature (4)..(4): n is a, c, g, or t
  misc_feature (9)..(9): n is a, c, g, or t
  misc_feature (21)..(21): n is a, c, g, or t
gaangtaantctagaggatcncgaacgggtgatgcggctgggtgagcagaacttccacaaggcccggcgcttcgtggagcaggtggcgcggcggctgacgctggcccggagggacgacgaccctctcaacgcacgcgtggcgctgctgcagtttggtggccccggcgagcagcaggtggccttcccgctgagccacaacctcacggccatccacgaggcgctggagaccacacaatacctgaactccttctcgcacgtgggcgcaggcgtggtgcacgccatcaatgccatcgtgcgcagcccgcgtggcggggcccggaggcacgcagagctgtccttcgtgttcctcacggacggcgtcacgggcaacgacagtctgcacgagtcggcgcactccatgcgcaagcagaacgtggtacccaccgtgctggccttgggcagcgacgtggacatggacgtgctcaccacgctcagcctgggtgaccgcgccgccgtgttccacgagaaggactatgacagcctggcgcaacccggcttcttcgaccgcttcatccgctggatctgctagcgccgccgcccgggccccgcagtcgagggtcgtgagcccaccccgtccatggtgctaagcgggcccgggtcccacacggccagcaccgctgctcactcggacgacgccctgggcctgcacctctccagctcctcccacggggtccccgtagccccggcccccgcccagccccaggtctccccaggccctccgcaggctgcccggcctccctccccctgcagccatcccaaggctcctgacctacctggcccctgagctctggagcaagccctgacccaataaaggctttgaacccaa

SEQ ID NO: 342154 - DNA, 3798 bp, Homo sapiens
ccatgttgccgcaacatgctcgggagcggagcctcctcgggaccaggacttcagggccacaggtgctgccaagatgctccagggcacctgctccgtgctcctgctctggggaatcctgggggccatccaggcccagcagcaggaggtcatctcgccggacactaccgagagaaacaacaactgcccagagaagaccgactgccccatccacgtgtacttcgtgctggacacctcggagagcgtcaccatgcagtcccccacggacatcctgctcttccacatgaagcagttcgtgccgcagttcatcagccagctgcagaacgagttctacctggaccaggtggcgctgagctggcgctacggcggcctgcacttctctgaccaggtggaggtgttcagcccaccgggcagcgaccgggcctccttcatcaagaacctgcagggcatcagctccttccgccgcggcaccttcaccgactgcgcgctggccaacatgacggagcagatccggcaggaccgcagcaagggcaccgtccacttcgccgtggtcatcaccgacggccacgtcaccggcagcccctgcgggggcatcaagctgcaggccgagcgggcccgcgaggagggcatccggctcttcgccgtggcccccaaccagaacctgaaggagcagggcctgcgggacatcgccagcacgccgcacgagctctaccgcaacgactacgccaccatgctgcccgactccaccgagatcgaccaggacaccatcaaccgcatcatcaaggtcatgaaacacgaagcctacggagagtgctacaaggtgagctgcctggaaatccctgggccctctggccccaagggctaccgtggacagaagggtgccaagggcaacatgggtgagccgggagagcctggccagaagggaagacagggagacccgggcatcgaaggccccattggattcccaggacccaagggcgttcctggcttcaaaggagagaagggtgaatttggagccgacggtcgcaagggggcccctggcctggctggcaagaacgggaccgatggacagaagggcaagctggggcgcatcggacctcctggctgcaagggagaccctggaaaccggggccccgacggttacccgggggaagcagggagtccaggggagcgaggagaccaaggcggcaagggggaccctggccgcccaggacgcagagggcccccgggagaaatcggggccaagggaagcaaggggtatcaaggcaacaatggagccccaggaagtcctggtgtgaaaggagccaagggcgggcctgggccccgcggacccaaaggcgagccggggcgcaggggagaccccggcaccaagggcagcccaggcagcgatggccccaagggggagaagggggaccctggccctgaggggccccgcggcctggctggagaggttggcaacaaaggagccaagggagaccgaggcttgcctggacccagaggcccccagggagctcttggggagcccggaaagcagggatctcggggagaccccggtgatgcaggaccccgtggagactcaggacagccaggccccaagggagaccccggcaggcctggattcagctacccaggaccccgaggagcacccggagaaaaaggcgagcccggcccacgcggccccgagggaggccgaggcgactttggcttgaaaggagaacctgggaggaaaggagagaaaggagagcctgcggatcctggtccccctggtgagccaggccctcgggggccaagaggagtcccaggacccgagggtgagcccggcccccctggagaccccggtctcacggagtgtgacgtcatgacctacgtgagggagacctgcgggtgctgcgactgtgagaagcgctgtggcgccctggacgtggtcttcgtcatcgacagctccgagagcattgggtacaccaacttcacactggagaagaacttcgtcatcaacgtggtcaacaggctgggtgccatcgctaaggaccccaagtccgagacagggacgcgtgtgggcgtggtgcagtacagccacgagggcacctttgaggccatccagctggacgacgaacgtatcgactccctgtcgagcttcaaggaggctgtcaagaacctcgagtggattgcgggcggcacctggacaccctcagccctcaagtttgcctacgaccgcctcatcaaggagagccggcgccagaagacacgtgtgtttgcggtggtcatcacggacgggcgccacgaccctcgggacgatgacctcaacttgcgggcgctgtgcgaccgcgacgtcacagtgacggccatcggcatcggggacatgttccacgagaagcacgagagtgaaaacctctactccatcgcctgcgacaagccacagcaggtgcgcaacatgacgctgttctccgacctggtcgctgagaagttcatcgatgacatggaggacgtcctctgcccggaccctcagatcgtgtgcccagaccttccctgccaaacagagctgtccgtggcacagtgcacgcagcggcccgtggacatcgtcttcctgctggacggctccgagcggctgggtgagcagaacttccacaaggcccggcgcttcgtggagcaggtggcgcggcggctgacgctggcccggagggacgacgaccctctcaacgcacgcgtggcgctgctgcagtttggtggccccggcgagcagcaggtggccttcccgctgagccacaacctcacggccatccacgaggcgctggagaccacacaatacctgaactccttctcgcacgtgggcgcaggcgtggtgcacgccatcaatgccatcgtgcgcagcccgcgtggcggggcccggaggcacgcagagctgtccttcgtgttcctcacggacggcgtcacgggcaacgacagtctgcacgagtcggcgcactccatgcgcaagcagaacgtggtacccaccgtgctggccttgggcagcgacgtggacatggacgtgctcaccacgctcagcctgggtgaccgcgccgccgtgttccacgagaaggactatgacagcctggcgcaacccggcttcttcgaccgcttcatccgctggatctgctagcgccgccgcccgggccccgcagtcgagggtcgtgagcccaccccgtccatggtgctaagcgggcccgggtcccacacggccagcaccgctgctcactcggacgacgccctgggcctgcacctctccagctcctcccacggggtccccgtagccccggcccccgcccagccccaggtctccccaggccctccgcaggctgcccggcctccctccccctgcagccatcccaaggctcctgacctacctggcccctgagctctggagcaagccctgacccaataaaggctttgaacccaaaaacacaaaacaaacaaaaaacaaacaaaaaacaaaaaacaaaacaaaaaacaaaaaaacaaaacaaacaaaacaaaaaagaaggggggccccaccaaacaacccccccaaggggccaccacacacaataagcaaccagacacacacaaagattattatatagaagaacagcaagggtgctccccacaaagagagaggcacacacaaatataatatataacaaaccagaagcatacggaggcccgctactcataatacaaaataacagcagacgaagacaaactgagaacaaaacagacccagcgacgacaagtagaaggaataataatttggaaaacagcaaaaaccacaacaaaaaccaatagaaa

SEQ ID NO: 342155 - DNA, 3579 bp, Homo sapiens
ccatgttgccgcaacatgctcgggagcggagcctcctcgggaccaggacttcagggccacaggtgctgccaagatgctccagggcacctgctccgtgctcctgctctggggaatcctgggggccatccaggcccagcagcaggaggtcatctcgccggacactaccgagagaaacaacaactgcccagagaagaccgactgccccatccacgtgtacttcgtgctggacacctcggagagcgtcaccatgcagtcccccacggacatcctgctcttccacatgaagcagttcgtgccgcagttcatcagccagctgcagaacgagttctacctggaccaggtggcgctgagctggcgctacggcggcctgcacttctctgaccaggtggaggtgttcagcccaccgggcagcgaccgggcctccttcatcaagaacctgcagggcatcagctccttccgccgcggcaccttcaccgactgcgcgctggccaacatgacggagcagatccggcaggaccgcagcaagggcaccgtccacttcgccgtggtcatcaccgacggccacgtcaccggcagcccctgcgggggcatcaagctgcaggccgagcgggcccgcgaggagggcatccggctcttcgccgtggcccccaaccagaacctgaaggagcagggcctgcgggacatcgccagcacgccgcacgagctctaccgcaacgactacgccaccatgctgcccgactccaccgagatcgaccaggacaccatcaaccgcatcatcaaggtcatgaaacacgaagcctacggagagtgctacaaggtgagctgcctggaaatccctgggccctctggccccaagggctaccgtggacagaagggtgccaagggcaacatgggtgagccgggagagcctggccagaagggaagacagggagacccgggcatcgaaggccccattggattcccaggacccaagggcgttcctggcttcaaaggagagaagggtgaatttggagccgacggtcgcaagggggcccctggcctggctggcaagaacgggaccgatggacagaagggcaagctggggcgcatcggacctcctggctgcaagggagaccctggaaaccggggccccgacggttacccgggggaagcagggagtccaggggagcgaggagaccaaggcggcaagggggaccctggccgcccaggacgcagagggcccccgggagaaatcggggccaagggaagcaaggggtatcaaggcaacaatggagccccaggaagtcctggtgtgaaaggagccaagggcgggcctgggccccgcggacccaaaggcgagccggggcgcaggggagaccccggcaccaagggcagcccaggcagcgatggccccaagggggagaagggggaccctggccctgaggggccccgcggcctggctggagaggttggcaacaaaggagccaagggagaccgaggcttgcctggacccagaggcccccagggagctcttggggagcccggaaagcagggatctcggggagaccccggtgatgcaggaccccgtggagactcaggacagccaggccccaagggagaccccggcaggcctggattcagctacccaggaccccgaggagcacccggagaaaaaggcgagcccggcccacgcggccccgagggaggccgaggcgactttggcttgaaaggagaacctgggaggaaaggagagaaaggagagcctgcggatcctggtccccctggtgagccaggccctcgggggccaagaggagtcccaggacccgagggtgagcccggcccccctggagaccccggtctcacggagtgtgacgtcatgacctacgtgagggagacctgcgggtgctgcgactgtgagaagcgctgtggcgccctggacgtggtcttcgtcatcgacagctccgagagcattgggtacaccaacttcacactggagaagaacttcgtcatcaacgtggtcaacaggctgggtgccatcgctaaggaccccaagtccgagacagggacgcgtgtgggcgtggtgcagtacagccacgagggcacctttgaggccatccagctggacgacgaacgtatcgactccctgtcgagcttcaaggaggctgtcaagaacctcgagtggattgcgggcggcacctggacaccctcagccctcaagtttgcctacgaccgcctcatcaaggagagccggcgccagaagacacgtgtgtttgcggtggtcatcacggacgggcgccacgaccctcgggacgatgacctcaacttgcgggcgctgtgcgaccgcgacgtcacagtgacggccatcggcatcggggacatgttccacgagaagcacgagagtgaaaacctctactccatcgcctgcgacaagccacagcaggtgcgcaacatgacgctgttctccgacctggtcgctgagaagttcatcgatgacatggaggacgtcctctgcccggaccctcagatcgtgtgcccagaccttccctgccaaacagagctgtccgtggcacagtgcacgcagcggcccgtggacatcgtcttcctgctggacggctccgagcggctgggtgagcagaacttccacaaggcccggcgcttcgtggagcaggtggcgcggcggctgacgctggcccggagggacgacgaccctctcaacgcacgcgtggcgctgctgcagtttggtggccccggcgagcagcaggtggccttcccgctgagccacaacctcacggccatccacgaggcgctggagaccacacaatacctgaactccttctcgcacgtgggcgcaggcgtggtgcacgccatcaatgccatcgtgcgcagcccgcgtggcggggcccggaggcacgcagagctgtccttcgtgttcctcacggacggcgtcacgggcaacgacagtctgcacgagtcggcgcactccatgcgcaagcagaacgtggtacccaccgtgctggccttgggcagcgacgtggacatggacgtgctcaccacgctcagcctgggtgaccgcgccgccgtgttccacgagaaggactatgacagcctggcgcaacccggcttcttcgaccgcttcatccgctggatctgctagcgccgccgcccgggccccgcagtcgagggtcgtgagcccaccccgtccatggtgctaagcgggcccgggtcccacacggccagcaccgctgctcactcggacgacgccctgggcctgcacctctccagctcctcccacggggtccccgtagccccggcccccgcccagccccaggtctccccaggccctccgcaggctgcccggcctccctccccctgcagccatcccaaggctcctgacctacctggcccctgagctctggagcaagccctgacccaataaaggctttgaacccaattgcgtgccgcttgcgagcttctgtgcgcaggagagacctcaaaggtgtcttgtggccaggagggaaacactgcagctgtcgctcgcccaccagggtcaatggctcccccgggcccagcctgacctcctaggacatcaactgcaggtgc

SEQ ID NO: 342156 - DNA, 3439 bp, Homo sapiens
  misc_feature (3414)..(3414): n is a, c, g, or t
  misc_feature (3421)..(3421): n is a, c, g, or t
  misc_feature (3427)..(3427): n is a, c, g, or t
  misc_feature (3435)..(3435): n is a, c, g, or t
ccatgttgccgcaacatgctcgggagcggagcctcctcgggaccaggacttcagggccacaggtgctgccaagatgctccagggcacctgctccgtgctcctgctctggggaatcctgggggccatccaggcccagcagcaggaggtcatctcgccggacactaccgagagaaacaacaactgcccagagaagaccgactgccccatccacgtgtacttcgtgctggacacctcggagagcgtcaccatgcagtcccccacggacatcctgctcttccacatgaagcagttcgtgccgcagttcatcagccagctgcagaacgagttctacctggaccaggtggcgctgagctggcgctacggcggcctgcacttctctgaccaggtggaggtgttcagcccaccgggcagcgaccgggcctccttcatcaagaacctgcagggcatcagctccttccgccgcggcaccttcaccgactgcgcgctggccaacatgacggagcagatccggcaggaccgcagcaagggcaccgtccacttcgccgtggtcatcaccgacggccacgtcaccggcagcccctgcgggggcatcaagctgcaggccgagcgggcccgcgaggagggcatccggctcttcgccgtggcccccaaccagaacctgaaggagcagggcctgcgggacatcgccagcacgccgcacgagctctaccgcaacgactacgccaccatgctgcccgactccaccgagatcgaccaggacaccatcaaccgcatcatcaaggtcatgaaacacgaagcctacggagagtgctacaaggtgagctgcctggaaatccctgggccctctggccccaagggctaccgtggacagaagggtgccaagggcaacatgggtgagccgggagagcctggccagaagggaagacagggagacccgggcatcgaaggccccattggattcccaggacccaagggcgttcctggcttcaaaggagagaagggtgaatttggagccgacggtcgcaagggggcccctggcctggctggcaagaacgggaccgatggacagaagggcaagctggggcgcatcggacctcctggctgcaagggagaccctggaaaccggggccccgacggttacccgggggaagcagggagtccaggggagcgaggagaccaaggcggcaagggggaccctggccgcccaggacgcagagggcccccgggagaaatcggggccaagggaagcaaggggtatcaaggcaacaatggagccccaggaagtcctggtgtgaaaggagccaagggcgggcctgggccccgcggacccaaaggcgagccggggcgcaggggagaccccggcaccaagggcagcccaggcagcgatggccccaagggggagaagggggaccctggccctgaggggccccgcggcctggctggagaggttggcaacaaaggagccaagggagaccgaggcttgcctggacccagaggcccccagggagctcttggggagcccggaaagcagggatctcggggagaccccggtgatgcaggaccccgtggagactcaggacagccaggccccaagggagaccccggcaggcctggattcagctacccaggaccccgaggagcacccggagaaaaaggcgagcccggcccacgcggccccgagggaggccgaggcgactttggcttgaaaggagaacctgggaggaaaggagagaaaggagagcctgcggatcctggtccccctggtgagccaggccctcgggggccaagaggagtcccaggacccgagggtgagcccggcccccctggagaccccggtctcacggagtgtgacgtcatgacctacgtgagggagacctgcgggtgctgcgactgtgagaagcgctgtggcgccctggacgtggtcttcgtcatcgacagctccgagagcattgggtacaccaacttcacactggagaagaacttcgtcatcaacgtggtcaacaggctgggtgccatcgctaaggaccccaagtccgagacagggacgcgtgtgggcgtggtgcagtacagccacgagggcacctttgaggccatccagctggacgacgaacgtatcgactccctgtcgagcttcaaggaggctgtcaagaacctcgagtggattgcgggcggcacctggacaccctcagccctcaagtttgcctacgaccgcctcatcaaggagagccggcgccagaagacacgtgtgtttgcggtggtcatcacggacgggcgccacgaccctcgggacgatgacctcaacttgcgggcgctgtgcgaccgcgacgtcacagtgacggccatcggcatcggggacatgttccacgagaagcacgagagtgaaaacctctactccatcgcctgcgacaagccacagcaggtgcgcaacatgacgctgttctccgacctggtcgctgagaagttcatcgatgacatggaggacgtcctctgcccggaccctcagatcgtgtgcccagaccttccctgccaaacagagctgtccgtggcacagtgcacgcagcggcccgtggacatcgtcttcctgctggacggctccgagcggctgggtgagcagaacttccacaaggcccggcgcttcgtggagcaggtggcgcggcggctgacgctggcccggagggacgacgaccctctcaacgcacgcgtggcgctgctgcagtttggtggccccggcgagcagcaggtggccttcccgctgagccacaacctcacggccatccacgaggcgctggagaccacacaatacctgaactccttctcgcacgtgggcgcaggcgtggtgcacgccatcaatgccatcgtgcgcagcccgcgtggcggggcccggaggcacgcagagctgtccttcgtgttcctcacggacggcgtcacgggcaacgacagtctgcacgagtcggcgcactccatgcgcaagcagaacgtggtacccaccgtgctggccttgggcagcgacgtggacatggacgtgctcaccacgctcagcctgggtgaccgcgccgccgtgttccacgagaaggactatgacagcctggcgcaacccggcttcttcgaccgcttcatccgctggatctgctagcgccgccgcccgggccccgcagtcgagggtcgtgagcccaccccgtccatggtgctaagcgggcccgggtcccacacggccagcaccgctgctcactcggacgacgccctgggcctgcacctctccagctcctcccacggggtccccgtagccccggcccccgcccagccccaggtctccccaggccctccgcaggctgcccggcctccctccccctgcagccatcccaaggctcctgacctacctgttagtctggctcgtgcgaattcgaatcagcttangaaccgngacctnaggggggncggt

SEQ ID NO: 342157 - DNA, 3392 bp, Homo sapiens
ccatgttgccgcaacatgctcgggagcggagcctcctcgggaccaggacttcagggccacaggtgctgccaagatgctccagggcacctgctccgtgctcctgctctggggaatcctgggggccatccaggcccagcagcaggaggtcatctcgccggacactaccgagagaaacaacaactgcccagagaagaccgactgccccatccacgtgtacttcgtgctggacacctcggagagcgtcaccatgcagtcccccacggacatcctgctcttccacatgaagcagttcgtgccgcagttcatcagccagctgcagaacgagttctacctggaccaggtggcgctgagctggcgctacggcggcctgcacttctctgaccaggtggaggtgttcagcccaccgggcagcgaccgggcctccttcatcaagaacctgcagggcatcagctccttccgccgcggcaccttcaccgactgcgcgctggccaacatgacggagcagatccggcaggaccgcagcaagggcaccgtccacttcgccgtggtcatcaccgacggccacgtcaccggcagcccctgcgggggcatcaagctgcaggccgagcgggcccgcgaggagggcatccggctcttcgccgtggcccccaaccagaacctgaaggagcagggcctgcgggacatcgccagcacgccgcacgagctctaccgcaacgactacgccaccatgctgcccgactccaccgagatcgaccaggacaccatcaaccgcatcatcaaggtcatgaaacacgaagcctacggagagtgctacaaggtgagctgcctggaaatccctgggccctctggccccaagggctaccgtggacagaagggtgccaagggcaacatgggtgagccgggagagcctggccagaagggaagacagggagacccgggcatcgaaggccccattggattcccaggacccaagggcgttcctggcttcaaaggagagaagggtgaatttggagccgacggtcgcaagggggcccctggcctggctggcaagaacgggaccgatggacagaagggcaagctggggcgcatcggacctcctggctgcaagggagaccctggaaaccggggccccgacggttacccgggggaagcagggagtccaggggagcgaggagaccaaggcggcaagggggaccctggccgcccaggacgcagagggcccccgggagaaatcggggccaagggaagcaaggggtatcaaggcaacaatggagccccaggaagtcctggtgtgaaaggagccaagggcgggcctgggccccgcggacccaaaggcgagccggggcgcaggggagaccccggcaccaagggcagcccaggcagcgatggccccaagggggagaagggggaccctggccctgaggggccccgcggcctggctggagaggttggcaacaaaggagccaagggagaccgaggcttgcctggacccagaggcccccagggagctcttggggagcccggaaagcagggatctcggggagaccccggtgatgcaggaccccgtggagactcaggacagccaggccccaagggagaccccggcaggcctggattcagctacccaggaccccgaggagcacccggagaaaaaggcgagcccggcccacgcggccccgagggaggccgaggcgactttggcttgaaaggagaacctgggaggaaaggagagaaaggagagcctgcggatcctggtccccctggtgagccaggccctcgggggccaagaggagtcccaggacccgagggtgagcccggcccccctggagaccccggtctcacggagtgtgacgtcatgacctacgtgagggagacctgcgggtgctgcgactgtgagaagcgctgtggcgccctggacgtggtcttcgtcatcgacagctccgagagcattgggtacaccaacttcacactggagaagaacttcgtcatcaacgtggtcaacaggctgggtgccatcgctaaggaccccaagtccgagacagggacgcgtgtgggcgtggtgcagtacagccacgagggcacctttgaggccatccagctggacgacgaacgtatcgactccctgtcgagcttcaaggaggctgtcaagaacctcgagtggattgcgggcggcacctggacaccctcagccctcaagtttgcctacgaccgcctcatcaaggagagccggcgccagaagacacgtgtgtttgcggtggtcatcacggacgggcgccacgaccctcgggacgatgacctcaacttgcgggcgctgtgcgaccgcgacgtcacagtgacggccatcggcatcggggacatgttccacgagaagcacgagagtgaaaacctctactccatcgcctgcgacaagccacagcaggtgcgcaacatgacgctgttctccgacctggtcgctgagaagttcatcgatgacatggaggacgtcctctgcccggaccctcagatcgtgtgcccagaccttccctgccaaacagagctgtccgtggcacagtgcacgcagcggcccgtggacatcgtcttcctgctggacggctccgagcggctgggtgagcagaacttccacaaggcccggcgcttcgtggagcaggtggcgcggcggctgacgctggcccggagggacgacgaccctctcaacgcacgcgtggcgctgctgcagtttggtggccccggcgagcagcaggtggccttcccgctgagccacaacctcacggccatccacgaggcgctggagaccacacaatacctgaactccttctcgcacgtgggcgcaggcgtggtgcacgccatcaatgccatcgtgcgcagcccgcgtggcggggcccggaggcacgcagagctgtccttcgtgttcctcacggacggcgtcacgggcaacgacagtctgcacgagtcggcgcactccatgcgcaagcagaacgtggtacccaccgtgctggccttgggcagcgacgtggacatggacgtgctcaccacgctcagcctgggtgaccgcgccgccgtgttccacgagaaggactatgacagcctggcgcaacccggcttcttcgaccgcttcatccgagggtcgtgagcccaccccgtccatggtgctaagcgggcccgggtcccacacggccagcaccgctgctcactcggacgacgccctgggcctgcacctctccagctcctcccacggggtccccgtagccccggcccccgcccagccccaggtctccccaggccctccgcaggctgcccggcctccctccccctgcagccatcccaaggctcctgacctacctggcccctgagctctggagcaagccctgacccaataaaggctttgaacccaa

SEQ ID NO: 342158 - DNA, 3261 bp, Homo sapiens
ccatgttgccgcaacatgctcgggagcggagcctcctcgggaccaggacttcagggccacaggtgctgccaagatgctccagggcacctgctccgtgctcctgctctggggaatcctgggggccatccaggcccagcagcaggaggtcatctcgccggacactaccgagagaaacaacaactgcccagagaagaccgactgccccatccacgtgtacttcgtgctggacacctcggagagcgtcaccatgcagtcccccacggacatcctgctcttccacatgaagcagttcgtgccgcagttcatcagccagctgcagaacgagttctacctggaccaggtggcgctgagctggcgctacggcggcctgcacttctctgaccaggtggaggtgttcagcccaccgggcagcgaccgggcctccttcatcaagaacctgcagggcatcagctccttccgccgcggcaccttcaccgactgcgcgctggccaacatgacggagcagatccggcaggaccgcagcaagggcaccgtccacttcgccgtggtcatcaccgacggccacgtcaccggcagcccctgcgggggcatcaagctgcaggccgagcgggcccgcgaggagggcatccggctcttcgccgtggcccccaaccagaacctgaaggagcagggcctgcgggacatcgccagcacgccgcacgagctctaccgcaacgactacgccaccatgctgcccgactccaccgagatcgaccaggacaccatcaaccgcatcatcaaggtcatgaaacacgaagcctacggagagtgctacaaggtgagctgcctggaaatccctgggccctctggccccaagggctaccgtggacagaagggtgccaagggcaacatgggtgagccgggagagcctggccagaagggaagacagggagacccgggcatcgaaggccccattggattcccaggacccaagggcgttcctggcttcaaaggagagaagggtgaatttggagccgacggtcgcaagggggcccctggcctggctggcaagaacgggaccgatggacagaagggcaagctggggcgcatcggacctcctggctgcaagggagaccctggaaaccggggccccgacggttacccgggggaagcagggagtccaggggagcgaggagaccaaggcggcaagggggaccctggccgcccaggacgcagagggcccccgggagaaatcggggccaagggaagcaaggggtatcaaggcaacaatggagccccaggaagtcctggtgtgaaaggagccaagggcgggcctgggccccgcggacccaaaggcgagccggggcgcaggggagaccccggcaccaagggcagcccaggcagcgatggccccaagggggagaagggggaccctggccctgaggggccccgcggcctggctggagaggttggcaacaaaggagccaagggagaccgaggcttgcctggacccagaggcccccagggagctcttggggagcccggaaagcagggatctcggggagaccccggtgatgcaggaccccgtggagactcaggacagccaggccccaagggagaccccggcaggcctggattcagctacccaggaccccgaggagcacccggagaaaaaggcgagcccggcccacgcggccccgagggaggccgaggcgactttggcttgaaaggagaacctgggaggaaaggagagaaaggagagcctgcggatcctggtccccctggtgagccaggccctcgggggccaagaggagtcccaggacccgagggtgagcccggcccccctggagaccccggtctcacggagtgtgacgtcatgacctacgtgagggagacctgcgggtgctgcgactgtgagaagcgctgtggcgccctggacgtggtcttcgtcatcgacagctccgagagcattgggtacaccaacttcacactggagaagaacttcgtcatcaacgtggtcaacaggctgggtgccatcgctaaggaccccaagtccgagacagggacgcgtgtgggcgtggtgcagtacagccacgagggcacctttgaggccatccagctggacgacgaacgtatcgactccctgtcgagcttcaaggaggctgtcaagaacctcgagtggattgcgggcggcacctggacaccctcagccctcaagtttgcctacgaccgcctcatcaaggagagccggcgccagaagacacgtgtgtttgcggtggtcatcacggacgggcgccacgaccctcgggacgatgacctcaacttgcgggcgctgtgcgaccgcgacgtcacagtgacggccatcggcatcggggacatgttccacgagaagcacgagagtgaaaacctctactccatcgcctgcgacaagccacagcaggtgcgcaacatgacgctgttctccgacctggtcgctgagaagttcatcgatgacatggaggacgtcctctgcccggaccctcagatcgtgtgcccagaccttccctgccaaacagagctgtccgtggcacagtgcacgcagcggcccgtggacatcgtcttcctgctggacggctccgagcggctgggtgagcagaacttccacaaggcccggcgcttcgtggagcaggtggcgcggcggctgacgctggcccggagggacgacgaccctctcaacgcacgcgtggcgctgctgcagtttggtggccccggcgagcagcaggtggccttcccgctgagccacaacctcacggccatccacgaggcgctggagaccacacaatacctgaactccttctcgcacgtgggcgcaggcgtggtgcacgccatcaatgccatcgtgcgcagcccgcgtggcggggcccggaggcacgcagagctgtccttcgtgttcctcacggacggcaacccggcttcttcgaccgcttcatccgctggatctgctagcgccgccgcccgggccccgcagtcgagggtcgtgagcccaccccgtccatggtgctaagcgggcccgggtcccacacggccagcaccgctgctcactcggacgacgccctgggcctgcacctctccagctcctcccacggggtccccgtagccccggcccccgcccagccccaggtctccccaggccctccgcaggctgcccggcctccctccccctgcagccatcccaaggctcctgacctacctggcccctgagctctggagcaagccctgacccaataaaggctttgaacccaa

SEQ ID NO: 342159 - DNA, 3189 bp, Homo sapiens
ccatgttgccgcaacatgctcgggagcggagcctcctcgggaccaggacttcagggccacaggtgctgccaagatgctccagggcacctgctccgtgctcctgctctggggaatcctgggggccatccaggcccagcagcaggaggtcatctcgccggacactaccgagagaaacaacaactgcccagagaagaccgactgccccatccacgtgtacttcgtgctggacacctcggagagcgtcaccatgcagtcccccacggacatcctgctcttccacatgaagcagttcgtgccgcagttcatcagccagctgcagaacgagttctacctggaccaggtggcgctgagctggcgctacggcggcctgcacttctctgaccaggtggaggtgttcagcccaccgggcagcgaccgggcctccttcatcaagaacctgcagggcatcagctccttccgccgcggcaccttcaccgactgcgcgctggccaacatgacggagcagatccggcaggaccgcagcaagggcaccgtccacttcgccgtggtcatcaccgacggccacgtcaccggcagcccctgcgggggcatcaagctgcaggccgagcgggcccgcgaggagggcatccggctcttcgccgtggcccccaaccagaacctgaaggagcagggcctgcgggacatcgccagcacgccgcacgagctctaccgcaacgactacgccaccatgctgcccgactccaccgagatcgaccaggacaccatcaaccgcatcatcaaggtcatgaaacacgaagcctacggagagtgctacaaggtgagctgcctggaaatccctgggccctctggccccaagggctaccgtggacagaagggtgccaagggcaacatgggtgagccgggagagcctggccagaagggaagacagggagacccgggcatcgaaggccccattggattcccaggacccaagggcgttcctggcttcaaaggagagaagggtgaatttggagccgacggtcgcaagggggcccctggcctggctggcaagaacgggaccgatggacagaagggcaagctggggcgcatcggacctcctggctgcaagggagaccctggaaaccggggccccgacggttacccgggggaagcagggagtccaggggagcgaggagaccaaggcggcaagggggaccctggccgcccaggacgcagagggcccccgggagaaatcggggccaagggaagcaaggggtatcaaggcaacaatggagccccaggaagtcctggtgtgaaaggagccaagggcgggcctgggccccgcggacccaaaggcgagccggggcgcaggggagaccccggcaccaagggcagcccaggcagcgatggccccaagggggagaagggggaccctggccctgaggggccccgcggcctggctggagaggttggcaacaaaggagccaagggagaccgaggcttgcctggacccagaggcccccagggagctcttggggagcccggaaagcagggatctcggggagaccccggtgatgcaggaccccgtggagactcaggacagccaggccccaagggagaccccggcaggcctggattcagctacccaggaccccgaggagcacccggagaaaaaggcgagcccggcccacgcggccccgagggaggccgaggcgactttggcttgaaaggagaacctgggaggaaaggagagaaaggagagcctgcggatcctggtccccctggtgagccaggccctcgggggccaagaggagtcccaggacccgagggtgagcccggcccccctggagaccccggtctcacggagtgtgacgtcatgacctacgtgagggagacctgcgggtgctgcgactgtgagaagcgctgtggcgccctggacgtggtcttcgtcatcgacagctccgagagcattgggtacaccaacttcacactggagaagaacttcgtcatcaacgtggtcaacaggctgggtgccatcgctaaggaccccaagtccgagacagggacgcgtgtgggcgtggtgcagtacagccacgagggcacctttgaggccatccagctggacgacgaacgtatcgactccctgtcgagcttcaaggaggctgtcaagaacctcgagtggattgcgggcggcacctggacaccctcagccctcaagtttgcctacgaccgcctcatcaaggagagccggcgccagaagacacgtgtgtttgcggtggtcatcacggacgggcgccacgaccctcgggacgatgacctcaacttgcgggcgctgtgcgaccgcgacgtcacagtgacggccatcggcatcggggacatgttccacgagaagcacgagagtgaaaacctctactccatcgcctgcgacaagccacagcaggtgcgcaacatgacgctgttctccgacctggtcgctgagaagttcatcgatgacatggaggacgtcctctgcccggaccctcagatcgtgtgcccagaccttccctgccaaacagagctgtccgtggcacagtgcacgcagcggcccgtggacatcgtcttcctgctggacggctccgagcggctgggtgagcagaacttccacaaggcccggcgcttcgtggagcaggtggcgcggcggctgacgctggcccggagggacgacgaccctctcaacgcacgcgtggcgctgctgcagtttggtggccccggcgagcagcaggtggccttcccgctgagccacaacctcacggccatccacgaggcgctggagaccacacaatacctgaactccttctcgcacgtgggcgcaggcgtggtgcacgccatcaatgccatcgtgcgcagcccgcgtggcggggcccggaggcacgcagagctgtccttcgtgttcctcacggacggcgtcacgggcaacgacagtctgcacgagtcggcgcactccatgcgcaagcagaacgtggtacccaccgtgctggccttgggcagcgacgtggacatggacgtgctcaccacgctcagcctgggtgaccgcgccgccgtgttccacgagaaggactatgacagcctggcgcccggcctccctccccctgcagccatcccaaggctcctgacctacctggcccctgagctctggagcaagccctgacccaataaaggctttgaacccaa

SEQ ID NO: 342160 - DNA, 3154 bp, Homo sapiens
ccatgttgccgcaacatgctcgggagcggagcctcctcgggaccaggacttcagggccacaggtgctgccaagatgctccagggcacctgctccgtgctcctgctctggggaatcctgggggccatccaggcccagcagcaggaggtcatctcgccggacactaccgagagaaacaacaactgcccagagaagaccgactgccccatccacgtgtacttcgtgctggacacctcggagagcgtcaccatgcagtcccccacggacatcctgctcttccacatgaagcagttcgtgccgcagttcatcagccagctgcagaacgagttctacctggaccaggtggcgctgagctggcgctacggcggcctgcacttctctgaccaggtggaggtgttcagcccaccgggcagcgaccgggcctccttcatcaagaacctgcagggcatcagctccttccgccgcggcaccttcaccgactgcgcgctggccaacatgacggagcagatccggcaggaccgcagcaagggcaccgtccacttcgccgtggtcatcaccgacggccacgtcaccggcagcccctgcgggggcatcaagctgcaggccgagcgggcccgcgaggagggcatccggctcttcgccgtggcccccaaccagaacctgaaggagcagggcctgcgggacatcgccagcacgccgcacgagctctaccgcaacgactacgccaccatgctgcccgactccaccgagatcgaccaggacaccatcaaccgcatcatcaaggtcatgaaacacgaagcctacggagagtgctacaaggtgagctgcctggaaatccctgggccctctggccccaagggctaccgtggacagaagggtgccaagggcaacatgggtgagccgggagagcctggccagaagggaagacagggagacccgggcatcgaaggccccattggattcccaggacccaagggcgttcctggcttcaaaggagagaagggtgaatttggagccgacggtcgcaagggggcccctggcctggctggcaagaacgggaccgatggacagaagggcaagctggggcgcatcggacctcctggctgcaagggagaccctggaaaccggggccccgacggttacccgggggaagcagggagtccaggggagcgaggagaccaaggcggcaagggggaccctggccgcccaggacgcagagggcccccgggagaaatcggggccaagggaagcaaggggtatcaaggcaacaatggagccccaggaagtcctggtgtgaaaggagccaagggcgggcctgggccccgcggacccaaaggcgagccggggcgcaggggagaccccggcaccaagggcagcccaggcagcgatggccccaagggggagaagggggaccctggccctgaggggccccgcggcctggctggagaggttggcaacaaaggagccaagggagaccgaggcttgcctggacccagaggcccccagggagctcttggggagcccggaaagcagggatctcggggagaccccggtgatgcaggaccccgtggagactcaggacagccaggccccaagggagaccccggcaggcctggattcagctacccaggaccccgaggagcacccggagaaaaaggcgagcccggcccacgcggccccgagggaggccgaggcgactttggcttgaaaggagaacctgggaggaaaggagagaaaggagagcctgcggatcctggtccccctggtgagccaggccctcgggggccaagaggagtcccaggacccgagggtgagcccggcccccctggagaccccggtctcacggagtgtgacgtcatgacctacgtgagggagacctgcgggtgctgcgactgtgagaagcgctgtggcgccctggacgtggtcttcgtcatcgacagctccgagagcattgggtacaccaacttcacactggagaagaacttcgtcatcaacgtggtcaacaggctgggtgccatcgctaaggaccccaagtccgagacagggacgcgtgtgggcgtggtgcagtacagccacgagggcacctttgaggccatccagctggacgacgaacgtatcgactccctgtcgagcttcaaggaggctgtcaagaacctcgagtggattgcgggcggcacctggacaccctcagccctcaagtttgcctacgaccgcctcatcaaggagagccggcgccagaagacacgtgtgtttgcggtggtcatcacggacgggcgccacgaccctcgggacgatgacctcaacttgcgggcgctgtgcgaccgcgacgtcacagtgacggccatcggcatcggggacatgttccacgagaagcacgagagtgaaaacctctactccatcgcctgcgacaagccacagcaggtgcgcaacatgacgctgttctccgacctggtcgctgagaagttcatcgatgacatggaggacgtcctctgcccggaccctcagatcgtgtgcccagaccttccctgccaaacagagctgtccgtggcacagtgcacgcagcggcccgtggacatcgtcttcctgctggacggctccgagcggctgggtgagcagaacttccacaaggcccggcgcttcgtggagcaggtggcgcggcggctgacgctggcccggagggacgacgaccctctcaacgcacgcgtggcgctgctgcagtttggtggccccggcgagcagcaggtggccttcccgctgagccacaacctcacggccatccacgaggcgctggagaccacacaatacctgaactccttctcgcacgtgggcgcaggcgtggtgcacgccatcaatgccatcgtgcgcagcccgcgtggcggggcccagggtcgtgagcccaccccgtccatggtgctaagcgggcccgggtcccacacggccagcaccgctgctcactcggacgacgccctgggcctgcacctctccagctcctcccacggggtccccgtagccccggcccccgcccagccccaggtctccccaggccctccgcaggctgcccggcctccctccccctgcagccatcccaaggctcctgacctacctggcccctgagctctggagcaagccctgacccaataaaggctttgaacccaa

SEQ ID NO: 342161 - DNA, 3432 bp, Homo sapiens
ccatgttgccgcaacatgctcgggagcggagcctcctcgggaccaggacttcagggccacaggtgctgccaagatgctccagggcacctgctccgtgctcctgctctggggaatcctgggggccatccaggcccagcagcaggaggtcatctcgccggacactaccgagagaaacaacaactgcccagagaagaccgactgccccatccacgtgtacttcgtgctggacacctcggagagcgtcaccatgcagtcccccacggacatcctgctcttccacatgaagcagttcgtgccgcagttcatcagccagctgcagaacgagttctacctggaccaggtggcgctgagctggcgctacggcggcctgcacttctctgaccaggtggaggtgttcagcccaccgggcagcgaccgggcctccttcatcaagaacctgcagggcatcagctccttccgccgcggcaccttcaccgactgcgcgctggccaacatgacggagcagatccggcaggaccgcagcaagggcaccgtccacttcgccgtggtcatcaccgacggccacgtcaccggcagcccctgcgggggcatcaagctgcaggccgagcgggcccgcgaggagggcatccggctcttcgccgtggcccccaaccagaacctgaaggagcagggcctgcgggacatcgccagcacgccgcacgagctctaccgcaacgactacgccaccatgctgcccgactccaccgagatcgaccaggacaccatcaaccgcatcatcaaggtcatgaaacacgaagcctacggagagtgctacaaggtgagctgcctggaaatccctgggccctctggccccaagggctaccgtggacagaagggtgccaagggcaacatgggtgagccgggagagcctggccagaagggaagacagggagacccgggcatcgaaggccccattggattcccaggacccaagggcgttcctggcttcaaaggagagaagggtgaatttggagccgacggtcgcaagggggcccctggcctggctggcaagaacgggaccgatggacagaagggcaagctggggcgcatcggacctcctggctgcaagggagaccctggaaaccggggccccgacggttacccgggggaagcagggagtccaggggagcgaggagaccaaggcggcaagggggaccctggccgcccaggacgcagagggcccccgggagaaatcggggccaagggaagcaaggggtatcaaggcaacaatggagccccaggaagtcctggtgtgaaaggagccaagggcgggcctgggccccgcggacccaaaggcgagccggggcgcaggggagaccccggcaccaagggcagcccaggcagcgatggccccaagggggagaagggggaccctggccctgaggggccccgcggcctggctggagaggttggcaacaaaggagccaagggagaccgaggcttgcctggacccagaggcccccagggagctcttggggagcccggaaagcagggatctcggggagaccccggtgatgcaggaccccgtggagactcaggacagccaggccccaagggagaccccggcaggcctggattcagctacccaggaccccgaggagcacccggagaaaaaggcgagcccggcccacgcggccccgagggaggccgaggcgactttggcttgaaaggagaacctgggaggaaaggagagaaaggagagcctgcggatcctggtccccctggtgagccaggccctcgggggccaagaggagtcccaggacccgagggtgagcccggcccccctggagaccccggtctcacggagtgtgacgtcatgacctacgtgagggagacctgcgggtgctgcgactgtgagaagcgctgtggcgccctggacgtggtcttcgtcatcgacagctccgagagcattgggtacaccaacttcacactggagaagaacttcgtcatcaacgtggtcaacaggctgggtgccatcgctaaggaccccaagtccgagacagggacgcgtgtgggcgtggtgcagtacagccacgagggcacctttgaggccatccagctggacgacgaacgtatcgactccctgtcgagcttcaaggaggctgtcaagaacctcgagtggattgcgggcggcacctggacaccctcagccctcaagtttgcctacgaccgcctcatcaaggagagccggcgccagaagacacgtgtgtttgcggtggtcatcacggacgggcgccacgaccctcgggacgatgacctcaacttgcgggcgctgtgcgaccgcgacgtcacagtgacggccatcggcatcggggacatgttccacgagaagcacgagagtgaaaacctctactccatcgcctgcgacaagccacagcaggtgcgcaacatgacgctgttctccgacctggtcgctgagaagttcatcgatgacatggaggacgtcctctgcccggaccctcagatcgtgtgcccagaccttccctgccaaacaggtttggacggagctgttttgtgctgaaaggttttctcggggtccgtggtgtcccccaaaggtgccaccgtgcgggtctcctagctccctgccagcttcctgtccctgtgctcactgcccccacgcctcctgccaaggccgagccacacacccgctccacctgcatttcctctaccgactcgccagcccaaatgccgctcttcactctggcctcgctgagcggctgcccgaggaggagctctaggccgacgcccaccgcaggccttacagtcttctctggacgctcccttgcagatgcaccgtggcctggcggcgagcccccggtcaccttcctccgcacggaagaggggccggacgccaccttccccaggaccattcccctgatccaacagttgctaaacgccacggagctcacgcaggacccggccgcctactcccagctggtggccgtgctggtctacaccgccgagcgggccaagttcgccaccggggtagagcggcaggactggatggagctgttcattgacacctttaagctggtgcacagggacatcgtgggggaccccgagaccgcgctggccctctgctaaagcccgggcacccgcccagccgggctgggccctccctgccacactagcttcccagggctgcccccgacaggctggctctcagtggaggccagagatctggaatcggggtcagcggggctacagtccttccaggggctctggggcagctcccagcctcttcccatgctggtggccaccgtgtcccttgctgcggctgcatcttccagtctctcctccgtcttcctgtggccgctctctttataagaaccctggtcattgaatttaaggcccaccccaagtccagaatgacctcgcaagacccttaactca

SEQ ID NO: 342162 - DNA, 3152 bp, Homo sapiens
ccatgttgccgcaacatgctcgggagcggagcctcctcgggaccaggacttcagggccacaggtgctgccaagatgctccagggcacctgctccgtgctcctgctctggggaatcctgggggccatccaggcccagcagcaggaggtcatctcgccggacactaccgagagaaacaacaactgcccagagaagaccgactgccccatccacgtgtacttcgtgctggacacctcggagagcgtcaccatgcagtcccccacggacatcctgctcttccacatgaagcagttcgtgccgcagttcatcagccagctgcagaacgagttctacctggaccaggtggcgctgagctggcgctacggcggcctgcacttctctgaccaggtggaggtgttcagcccaccgggcagcgaccgggcctccttcatcaagaacctgcagggcatcagctccttccgccgcggcaccttcaccgactgcgcgctggccaacatgacggagcagatccggcaggaccgcagcaagggcaccgtccacttcgccgtggtcatcaccgacggccacgtcaccggcagcccctgcgggggcatcaagctgcaggccgagcgggcccgcgaggagggcatccggctcttcgccgtggcccccaaccagaacctgaaggagcagggcctgcgggacatcgccagcacgccgcacgagctctaccgcaacgactacgccaccatgctgcccgactccaccgagatcgaccaggacaccatcaaccgcatcatcaaggtcatgaaacacgaagcctacggagagtgctacaaggtgagctgcctggaaatccctgggccctctggccccaagggctaccgtggacagaagggtgccaagggcaacatgggtgagccgggagagcctggccagaagggaagacagggagacccgggcatcgaaggccccattggattcccaggacccaagggcgttcctggcttcaaaggagagaagggtgaatttggagccgacggtcgcaagggggcccctggcctggctggcaagaacgggaccgatggacagaagggcaagctggggcgcatcggacctcctggctgcaagggagaccctggaaaccggggccccgacggttacccgggggaagcagggagtccaggggagcgaggagaccaaggcggcaagggggaccctggccgcccaggacgcagagggcccccgggagaaatcggggccaagggaagcaaggggtatcaaggcaacaatggagccccaggaagtcctggtgtgaaaggagccaagggcgggcctgggccccgcggacccaaaggcgagccggggcgcaggggagaccccggcaccaagggcagcccaggcagcgatggccccaagggggagaagggggaccctggccctgaggggccccgcggcctggctggagaggttggcaacaaaggagccaagggagaccgaggcttgcctggacccagaggcccccagggagctcttggggagcccggaaagcagggatctcggggagaccccggtgatgcaggaccccgtggagactcaggacagccaggccccaagggagaccccggcaggcctggattcagctacccaggaccccgaggagcacccggagaaaaaggcgagcccggcccacgcggccccgagggaggccgaggcgactttggcttgaaaggagaacctgggaggaaaggagagaaaggagagcctgcggatcctggtccccctggtgagccaggccctcgggggccaagaggagtcccaggacccgagggtgagcccggcccccctggagaccccggtctcacggagtgtgacgtcatgacctacgtgagggagacctgcgggtgctgcgactgtgagaagcgctgtggcgccctggacgtggtcttcgtcatcgacagctccgagagcattgggtacaccaacttcacactggagaagaacttcgtcatcaacgtggtcaacaggctgggtgccatcgctaaggaccccaagtccgagacagggacgcgtgtgggcgtggtgcagtacagccacgagggcacctttgaggccatccagctggacgacgaacgtatcgactccctgtcgagcttcaaggaggctgtcaagaacctcgagtggattgcgggcggcacctggacaccctcagccctcaagtttgcctacgaccgcctcatcaaggagagccggcgccagaagacacgtgtgtttgcggtggtcatcacggacgggcgccacgaccctcgggacgatgacctcaacttgcgggcgctgtgcgaccgcgacgtcacagtgacggccatcggcatcggggacatgttccacgagaagcacgagagtgaaaacctctactccatcgcctgcgacaagccacagcaggtgcgcaacatgacgctgttctccgacctggtcgctgagaagttcatcgatgacatggaggacgtcctctgcccggaccctcagatcgtgtgcccagaccttccctgccaaacagatgcaccgtggcctggcggcgagcccccggtcaccttcctccgcacggaagaggggccggacgccaccttccccaggaccattcccctgatccaacagttgctaaacgccacggagctcacgcaggacccggccgcctactcccagctggtggccgtgctggtctacaccgccgagcgggccaagttcgccaccggggtagagcggcaggactggatggagctgttcattgacacctttaagctggtgcacagggacatcgtgggggaccccgagaccgcgctggccctctgctaaagcccgggcacccgcccagccgggctgggccctccctgccacactagcttcccagggctgcccccgacaggctggctctcagtggaggccagagatctggaatcggggtcagcggggctacagtccttccaggggctctggggcagctcccagcctcttcccatgctggtggccaccgtgtcccttgctgcggctgcatcttccagtctctcctccgtcttcctgtggccgctctctttataagaaccctggtcattgaatttctggagctaacgcagcacgagtctgtggccggcggtggtttctctacagtctgcctgca

SEQ ID NO: 342163 - DNA, 2628 bp, Homo sapiens
ccatgttgccgcaacatgctcgggagcggagcctcctcgggaccaggacttcagggccacaggtgctgccaagatgctccagggcacctgctccgtgctcctgctctggggaatcctgggggccatccaggcccagcagcaggaggtcatctcgccggacactaccgagagaaacaacaactgcccagagaagaccgactgccccatccacgtgtacttcgtgctggacacctcggagagcgtcaccatgcagtcccccacggacatcctgctcttccacatgaagcagttcgtgccgcagttcatcagccagctgcagaacgagttctacctggaccaggtggcgctgagctggcgctacggcggcctgcacttctctgaccaggtggaggtgttcagcccaccgggcagcgaccgggcctccttcatcaagaacctgcagggcatcagctccttccgccgcggcaccttcaccgactgcgcgctggccaacatgacggagcagatccggcaggaccgcagcaagggcaccgtccacttcgccgtggtcatcaccgacggccacgtcaccggcagcccctgcgggggcatcaagctgcaggccgagcgggcccgcgaggagggcatccggctcttcgccgtggcccccaaccagaacctgaaggagcagggcctgcgggacatcgccagcacgccgcacgagctctaccgcaacgactacgccaccatgctgcccgactccaccgagatcgaccaggacaccatcaaccgcatcatcaaggtcatgaaacacgaagcctacggagagtgctacaaggtgagctgcctggaaatccctgggccctctggccccaagggctaccgtggacagaagggtgccaagggcaacatgggtgagccgggagagcctggccagaagggaagacagggagacccgggcatcgaaggccccattggattcccaggacccaagggcgttcctggcttcaaaggagagaagggtgaatttggagccgacggtcgcaagggggcccctggcctggctggcaagaacgggaccgatggacagaagggcaagctggggcgcatcggacctcctggctgcaagggagaccctggaaaccggggccccgacggttacccgggggaagcagggagtccaggggagcgaggagaccaaggcggcaagggggaccctggccgcccaggacgcagagggcccccgggagaaatcggggccaagggaagcaaggggtatcaaggcaacaatggagccccaggaagtcctggtgtgaaaggagccaagggcgggcctgggccccgcggacccaaaggcgagccggggcgcaggggagaccccggcaccaagggcagcccaggcagcgatggccccaagggggagaagggggaccctggccctgaggggccccgcggcctggctggagaggttggcaacaaaggagccaagggagaccgaggcttgcctggacccagaggcccccagggagctcttggggagcccggaaagcagggatctcggggagaccccggtgatgcaggaccccgtggagactcaggacagccaggccccaagggagaccccggcaggcctggattcagctacccaggaccccgaggagcacccggagaaaaaggcgagcccggcccacgcggccccgagggaggccgaggcgactttggcttgaaaggagaacctgggaggaaaggagagaaaggagagcctgcggatcctggtccccctggtgagccaggccctcgggggccaagaggagtcccaggacccgagggtgagcccggcccccctggagaccccggtctcacggagtgtgacgtcatgacctacgtgagggagacctgcgggtgctgcgactgtgagaagcgctgtggcgccctggacgtggtcttcgtcatcgacagctccgagagcattgggtacaccaacttcacactggagaagaacttcgtcatcaacgtggtcaacaggctgggtgccatcgctaaggaccccaagtccgagacagggacgcgtgtgggcgtggtgcagtacagccacgagggcacctttgaggccatccagctggacgacgaacgtatcgactccctgtcgagcttcaaggaggctgtcaagaacctcgagtggattgcgggcggcacctggacaccctcagccctcaagtttgcctacgaccgcctcatcaaggagagccggcgccagaagacacgtgtgtttgcggtggtcatcacggacgggcgccacgaccctcgggacgatgacctcaacttgcgggcgctgtgcgaccgcgacgtcacagtgacggccatcggcatcggggacatgttccacgagaagcacgagagtgaaaacctctactccatcgcctgcgacaagccacagcaggtgcgcaacatgacgctgttctccgacctggtcgctgagaagttcatcgatgacatggaggacgtcctctgcccggcgtgtcccttgctgcggctgcatcttccagtctctcctccgtcttcctgtggccgctctctttataagaaccctggtcattgaatttaaggcccaccccaagtccagaatgacctcgcaagacccttaactca

SEQ ID NO: 342164 - DNA, 1475 bp, Homo sapiens
ccatgttgccgcaacatgctcgggagcggagcctcctcgggaccaggacttcagggccacaggtgctgccaagatgctccagggcacctgctccgtgctcctgctctggggaatcctgggggccatccaggcccagcagcaggaggtcatctcgccggacactaccgagagaaacaacaactgcccagagaagaccgactgccccatccacgtgtacttcgtgctggacacctcggagagcgtcaccatgcagtcccccacggacatcctgctcttccacatgaagcagttcgtgccgcagttcatcagccagctgcagaacgagttctacctggaccaggtggcgctgagctggcgctacggcggcctgcacttctctgaccaggtggaggtgttcagcccaccgggcagcgaccgggcctccttcatcaagaacctgcagggcatcagctccttccgccgcggcaccttcaccgactgcgcgctggccaacatgacggagcagatccggcaggaccgcagcaagggcaccgtccacttcgccgtggtcatcaccgacggccacgtcaccggcagcccctgcgggggcatcaagctgcaggccgagcgggcccgcgaggagggcatccggctcttcgccgtggcccccaaccagaacctgaaggagcagggcctgcgggacatcgccagcacgccgcacgagctctaccgcaacgactacgccaccatgctgcccgactccaccgagatcgaccaggacaccatcaaccgcatcatcaaggtcatgaaacacgaagcctacggagagtgctacaaggtgagctgcctggaaatccctgggccctctggccccaagggctaccgtggacagaagggtgccaagggcaacatgggtgagccgggagagcctggccagaagggaagacagggagacccgggcatcgaaggccccattggattcccaggacccaagggcgttcctggcttcaaaggagagaagggtgaatttggagccgacggtcgcaagggggcccctggcctggctggcaagaacgggaccgatggacagaagggcaagctggggcgcatcggacctcctggctgcaagggagaccctggaaaccggggccccgacggttacccgggggaagcagggagtccaggggagcgaggagaccaaggcggcaagggggaccctggccgcccaggacgcagagggcccccgggagaaatcggggccaagggaagcaaggggtatcaaggcaacaatggagccccaggaagtcctggtgtgaaaggagccaagggcgggcctgggcctccccgtagccccggcccccgcccagccccaggtctccccaggccctccgcaggctgcccggcctccctccccctgcagccatcccaaggctcctgacctacctggcccctgagctctggagcaagccctgacccaataaaggctttgaacccaa

SEQ ID NO: 342165 - DNA, 1541 bp, Homo sapiens
ccatgttgccgcaacatgctcgggagcggagcctcctcgggaccaggacttcagggccacaggtgctgccaagatgctccagggcacctgctccgtgctcctgctctggggaatcctgggggccatccaggcccagcagcaggaggtcatctcgccggacactaccgagagaaacaacaactgcccagagaagaccgactgccccatccacgtgtacttcgtgctggacacctcggagagcgtcaccatgcagtcccccacggacatcctgctcttccacatgaagcagttcgtgccgcagttcatcagccagctgcagaacgagttctacctggaccaggtggcgctgagctggcgctacggcggcctgcacttctctgaccaggtggaggtgttcagcccaccgggcagcgaccgggcctccttcatcaagaacctgcagggcatcagctccttccgccgcggcaccttcaccgactgcgcgctggccaacatgacggagcagatccggcaggaccgcagcaagggcaccgtccacttcgccgtggtcatcaccgacggccacgtcaccggcagcccctgcgggggcatcaagctgcaggccgagcgggcccgcgaggagggcatccggctcttcgccgtggcccccaaccagaacctgaaggagcagggcctgcgggacatcgccagcacgccgcacgagctctaccgcaacgactacgccaccatgctgcccgactccaccgagatcgaccaggacaccatcaaccgcatcatcaaggtcatgaaacacgaagcctacggagagtgctacaaggtgagctgcctggaaatccctgggccctctggccccaagggctaccgtggacagaagggtgccaagggcaacatgggtgagccgggagagcctggccagaagggaagacagggagacccgggcatcgaaggccccattggattcccaggacccaagggcgttcctggcttcaaaggagagaaggtgagattggagccgacggtcgcaagggggcccctggcctggcctggcaagaacgggaccgactggcacagaagggccagctggggcgcatcgcgacctcctggctgccagggagaccctggaaaccggggccccgacagggatacccgcgcggaagcagtgcgaagcttccaggggacgcgagcgacgaccaaactgcggcaacaggggacccctggccgcccaggacgcagacggccccccgggatgcaagtcggggccacgggacgcaaggcgctatcaacggcccacccttggctcccccaggcaagatcctggctgtggcaaggagcccaatggccgggcctggggccccgcgggaccccaacaggcagagccgcagcagcccggggaacaccccggcacccaaaggccaagccaggccgacgatgggccccacacggcgacaaggccggtccttggcctcacgcgccccgcgcactgccaggaaaagcggcacctcggaccccgcgccacccggcctgccccgaccacagccccg

SEQ ID NO: 342166 - DNA, 933 bp, Homo sapiens
ccatgttgccgcaacatgctcgggagcggagcctcctcgggaccaggacttcagggccacaggtgctgccaagatgctccagggcacctgctccgtgctcctgctctggggaatcctgggggccatccaggcccagcagcaggaggtcatctcgccggacactaccgagagaaacaacaactgcccagagaagaccgactgccccatccacgtgtacttcgtgctggacacctcggagagcgtcaccatgcagtcccccacggacatcctgctcttccacatgaagcagttcgtgccgcagttcatcagccagctgcagaacgagttctacctggaccaggtggcgctgagctggcgctacggcggcctgcacttctctgaccaggtggaggtgttcagcccaccgggcagcgaccgggcctccttcatcaagaacctgcagggcatcagctccttccgccgcggcaccttcaccgactgcgcgctggccaacatgacggagcagatccggcaggaccgcagcaagggcaccgtccacttcgccgtggtcatcaccgacggccacgtcaccggcagcccctgcgggggcatcaagctgcaggccgagcgggcccgcgaggagggcatccggctcttcgccgtggcccccaaccagaacctgaaggagcagggcctgcgggacatcgccagcacgccgcacgagctctaccgcaacgactacgccaccatgctgcccgactccaccgagatcgaccaggacaccatcaaccgcatcatcaaggtcatgaaacacgaagcctacggagaggtgagtggcgcttcccttcctgccagtgctggccggcagctgacccagcagagatgaccgcgccaggctgccgactcctggcgcctccaggctggaacagatgagaggagagggagtcacctgct

SEQ ID NO: 342167 - DNA, 506 bp, Homo sapiens
acacggggagggacaggaagaacaggccatgtgccctgagccaccagcccctctgacctgtgccctcctcacgaggctgaacaagttccaggggaccctgcagggcccccatgtgcctggcaagcagattccgctggaagataataggggctccacaccacacaccgcacaggcgtgaccatgcctcagggcccctgcctctgggtgactgtgctgtcctctccttcttcaggggtatcaaggcaacaatggagccccaggaagtcctggtgtgaaaggagccaagggcgggcctgggccccgcggacccaaaggcgagccggtgagtccctcctgcccctgcctcagggccccgctctgggcatcctccttgcagcttgaggaggaccatgggggaagggcacctgggctgtaggcaggatcccctgctggcaaggcacagccaggcccccatcctcccaagaagtggacccggaccaccccacgggaccccccagagctggact

SEQ ID NO: 342168 - DNA, 1765 bp, Homo sapiens
ggcacgagggtcccaggacccgagggtgagcccggcccccctggagaaaaaggcgagcccggcccacgcggccccgagggaggccgaggcgactttggcttgaaaggagaacctgggaggaaaggagagaaaggagagcctgcggatcctggtccccctggtgagccaggccctcggggagtgtgacgtcatgacctacgtgagggagacctgcgggtgctgcgactgtgagaagcgctgtggcgccctggacgtggtcttcgtcatcgacagctccgagagcattgggtacaccaacttcacactggagaagaacttcgtcatcaacgtggtcaacaggctgggtgccatcgctaaggaccccaagtccgagacagggacgcgtgtgggcgtggtgcagtacagccacgagggcacctttgaggccatccagctggacgacgaacgtatcgactccctgtcgagcttcaaggaggctgtcaagaacctcgagtggattgcgggcggcacctggacaccctcagccctcaagtttgcctacgaccgcctcatcaaggagagccggcgccagaagacacgtgtgtttgcggtggtcatcacggacgggcgccacgaccctcgggacgatgacctcaacttgcgggcgctgtgcgaccgcgacgtcacagtgacggccatcggcatcggggacatgttccacgagaagcacgagagtgaaaacctctactccatcgcctgcgacaagccacagcaggtgcgcaacatgacgctgttctccgacctggtcgctgagaagttcatcgatgacatggaggacgtcctctgcccggaccctcagatcgtgtgcccagaccttccctgccaaacagagctgtccgtggcacagtgcacgcagcggcccgtggacatcgtcttcctgctggacggctccgagcggctgggtgagcagaacttccacaaggcccggcgcttcgtggagcaggtggcgcggcggctgacgctggcccggagggacgacgaccctctcaacgcacgcgtggcgctgctgcagtttggtggccccggcgagcagcaggtggccttcccgctgagccacaacctcacggccatccacgaggcgctggagaccacacaatacctgaactccttctcgcacgtgggcgcaggcgtggtgcacgccatcaatgccatcgtgcgcagcccgcgtggcggggcccggaggcacgcagagctgtccttcgtgttcctcacggacggcgtcacgggcaacgacagtctgcacgagtcggcgcactccatgcgcaagcagaacgtggtacccaccgtgctggccttgggcagcgacgtggacatggacgtgctcaccacgctcagcctgggtgaccgcgccgccgtgttccacgagaaggactatgacagcctggcgcaacccggcttcttcgaccgcttcatccgctggatctgctagcgccgccgcccgggccccgcagtcgagggtcgtgagcccaccccgtccatggtgctaagcgggcccgggtcccacacggccagcaccgctgctcactcggacgacgccctgggcctgcacctctccagctcctcccacggggtccccgtagccccggcccccgcccagccccaggtctccccaggccctccgcaggctgcccggcctccctccccctgcagccatcccaaggctcctgacctacctggcccctgagctctggagcaagccctgacccaataaaggctttgaacccaa

SEQ ID NO: 342169 - DNA, 535 bp, Homo sapiens
  misc_feature (41)..(41): n is a, c, g, or t
gcaagcgacgtgaacatgaacgtgctcaccacgctcagccntgggtgaccgtcccgccgtgttccacgaaaaggactatgacagcctggcgcaacccggcttcttcgaccgcttcatccgggaggcacgcagagctgtccttcgtgttcctcacggacggcgtcacgggcaacgacagtctgcacgagtcggcgcactccatgcgcaagcagaacgtggtacccaccgtgctggccttgggcagcgacgtggacatggacgtgagggtcgtgagcccaccccgtccatggtgctaagcgggcccgggtcccacacggccagcaccgctgctcactcggacgacgccctgggcctgcacctctccagctcctcccacggggtccccgtagccccggcccccgcccagccccaggtctccccaggccctccgcaggctgcccggcctccctccccctgcagccatcccaaggctcctgacctacctggcccctgagctctggagcaagccctgacccaataaaggctttgaacccaa

SEQ ID NO: 342170 - DNA, 2146 bp, Homo sapiens
  misc_feature (50)..(50): n is a, c, g, or t
  misc_feature (465)..(465): n is a, c, g, or t
  misc_feature (469)..(469): n is a, c, g, or t
  misc_feature (1461)..(1461): n is a, c, g, or t
  misc_feature (1885)..(1885): n is a, c, g, or t
  misc_feature (1933)..(1934): n is a, c, g, or t
  misc_feature (1967)..(1967): n is a, c, g, or t
  misc_feature (1984)..(1984): n is a, c, g, or t
  misc_feature (2014)..(2014): n is a, c, g, or t
  misc_feature (2074)..(2076): n is a, c, g, or t
  misc_feature (2078)..(2079): n is a, c, g, or t
  misc_feature (2081)..(2082): n is a, c, g, or t
  misc_feature (2084)..(2084): n is a, c, g, or t
  misc_feature (2086)..(2088): n is a, c, g, or t
  misc_feature (2090)..(2095): n is a, c, g, or t
  misc_feature (2097)..(2100): n is a, c, g, or t
  misc_feature (2102)..(2102): n is a, c, g, or t
  misc_feature (2105)..(2108): n is a, c, g, or t
  misc_feature (2110)..(2110): n is a, c, g, or t
  misc_feature (2112)..(2113): n is a, c, g, or t
  misc_feature (2115)..(2119): n is a, c, g, or t
  misc_feature (2121)..(2121): n is a, c, g, or t
  misc_feature (2125)..(2125): n is a, c, g, or t
  misc_feature (2127)..(2131): n is a, c, g, or t
  misc_feature (2133)..(2133): n is a, c, g, or t
  misc_feature (2135)..(2135): n is a, c, g, or t
tgtccggaccccagccagactgctgtgaactcttctgggcccggggactnccctgcctgccgtgtgcattgcaggagtgtgacgtcatgacctacgtgagggagacctgcgggtgctgcggtgaggcactgcccacggcagggtcggggcccatgcaccgggtggagggcgggagtgcagcagggctgggtcatcgctgggtcctgcatgtgcacgtgaccctagggtctgaggtctcccggtaccccccgatgaccctgccacccccccagactgtgagaagcgctgtggcgccctggacgtggtcttcgtcatcgacagctccgagagcattgggtacaccaacttcacactggagaagaacttcgtcatcaacgtggtcaacaggctgggtgccatcgctaaggaccccaagtccgagacaggtcagcggggcagggcgggtgcagcattgcggggggccgngggngcgtgggaggcgatgagatgggagaagtccagacgcgtccctccaacgagggcctctgcatggctggggatgccccagaccccgaggcctctggcaacgacctcacgcgtgcggcttgcagggacgcgtgtgggcgtggtgcagtacagccacgagggcacctttgaggccatccagctggacgacgaacgtatcgactccctgtcgagcttcaaggaggctgtcaagaacctcgagtggattgcgggcggcacctggacaccctcagccctcaagtttgcctacgaccgcctcatcaaggagagccggcgccagaagacacgtgtgtttgcggtggtcatcacggacgggcgccacgaccctcgggacgatgacctcaacttgcgggcgctgtgcgaccgcgacgtcacagtgacggccatcggcatcggggacatgttccacgagaagcacgagagtgaaaacctctactccatcgcctgcgacaagccacagcaggtgcgcaacatgacgctgttctccgacctggtcgctgagaagttcatcgatgacatggaggacgtcctctgcccggggtgagcgtgtgggcgcggggcagtcggccgaggagcagcaggccccagccgctgtctagcgtgagccccagggacacccctcacctgagggacgaatgtgcagcccaggatcttgggctgtgggtgggaaggggtcgggccctctcggggctgcagggcagaggccagctgcaccctgagcctgtctaggcagatcagtgaacggccgctgagggttcgctagggactgaccctggcctggcccggcctctctcctctcttccagaccctcagatcgtgtgcccagaccttccctgccaaacaggtaatgcagggacctgagccaccaccccagactagcaaagcagccctggtgtccttcctcctcgagggccgggctgggggaggggccgtgcagggacccgggggcggcggacnactgcggaggctgctccttagggagatggccccaggatggcagcacaggggaggaggggcttggggaaggcaggctcccaggaacgcaggaacagcatcacgaggccatgaggtgggtgctgctagcctggcgctgtgctcggcatgtggccactggtcttgaaggcccaccatgggcttgcagtctccctcagctgccgcccagctcccatgggctggccgtgcatgtgccaccggaggaagccctggatcagtgagtgaaaccatcccggggtggaagcactgacaccccccagcaccagcaggtcttgctccaaccctggcctgcctcggagctgcagctgcggctctcatctctgggagtgggggagcccatgtccggatgtggcccacgtggtgtgaagctggagctgggggtgccgtncagctctgctggactggtgctgcccccatggtgcactgctgcaccgtnnctgggcccacaggaggtccccgggggcgttagnagctgagtccccctcantgagccgtcccctccaggagtgtgagggtngggatgccatggagacagggtgggagggtccgactggaggaccacagggaggaaacctcnnngnntnngntnnnannnnnncnnnncntcnnnncncnngnnnnngngtgngnnnnngngntccatggggag

SEQ ID NO: 342171 - DNA, 2510 bp, Homo sapiens
ggggagcggcagggatcaccatccaaagggagcggcccccacggcgagctgaccccgacgttctgactgcaggagccctcatccaggctgggctcctgccgggcacggctgtgaccatttctcagggccaggttctcgtccccacacccactgcacagggcaggccaggctggtcttcccactgtggggatgaaggatcctccacaggaggaggagagcagagtccacagacatcccaacagcctcagcctccctgtgcctggccggcccccacagcttccccgtctcctccaggccccacagacactgatgaatggacagagacccccaaaaccagctgccccttgcatgtctgtctccatatgtttggtgacagcagtgaaaatgttattagttttgagggggtttgggaagcccagcggtacctgaggagtttctggacatttaagccggttcctaggtgtggccttaacagggaggctgcccttcctttcactgaatgagctgcgtcactcataagctcactgagggaaccccatctgccagctcgtgcgtgctcagacgacgtccatgtctcaagcgttctgtgaaggctgcggtgcagcgtgaggtcaccctgctgtgttcagagctttgctcactgcctgcggggctggaccgttgcacctccagggcccccagaaaccgagtttcgggtcagggtcctctgtgtgcattcctgggggtccatgtaccagctgtgacgacgtccaggggttgggctgagaagcagacacccttggggaaactggctctgtccctcccctcccccatcccaggagctgaggtcttggtgaggccacagggccaggtccacgcaaggactgtccgtgtcctgtcctgtggtctctggccccacgtgacacccacacgtgtggtaggcagcctggcctgggttgtggctatggccaggcccccaagctgtccccgatgcccagggctggtgaccacccaggcaggtgggggccccacttggtaacagagtcatagggcagaacccacctgggctgccacagaaggtctggctgcccctgtgcccactgctccccaccatggccaatcagaagagtcaggggctcctggtctttccgggagggacgtggcccagccagctctaggtgttctgagcagctctgggacccagcgattgaggggtcaggctgggggtgtcagagccagggtcctccttaagtacctcccacactacacagacagtggcccttttgtgggcagcaaattcttgagccatgaaaggatgctttgggccccttccctcccaggagggcagcctgtgcagggatggtgctcagcaggtggacagggcctggggcctgtgtcagggtctcaggcctgggagcaccagcagaggagatggcggctcccagcagtgccgcctgaaagtgtcttgggctaaggacccacacccagggctgccctgcagaaacgcccccgcagagcccagtggtctgtgaggttgcaggcagggtgcgaatggaagggcacaggtgcggggctggcacctgcccggtcctgcccacctcccctccgcccagcccgcacctgcgtctccccacaagctgtccgtggcacagtgcacgcagcggcccgtggacatcgtcttcctgctggacggctccgagcggctgggtgagcagaacttccacaaggcccggcgcttcgtggagcaggtggcgcggcggctgacgctggcccggagggacgacgaccctctcaacgcacgcgtggcgctgctgcagtttggtggccccggcgagcagcaggtggccttcccgctgagccacaacctcacggccatccacgaggcgctggagaccacacaatacctgaactccttctcgcacgtgggcgcaggcgtggtgcacgccatcaatgccatcgtgcgcagcccgcgtggcggggcccggaggcacgcagagctgtccttcgtgttcctcacggacggcgtcacgggcaacgacagtctgcacgagtcggcgcactccatgcgcaagcagaacgtggtacccaccgtgctggccttgggcagcgacgtggacatggacgtgctcaccacgctcagcctgggtgaccgcgccgccgtgttccacgagaaggactatgacagcctggcgcaacccggcttcttcgaccgcttcatccgctggatctgctagcgccgccgcccgggccccgcagtcgagggtcgtgagcccaccccgtccatggtgctaagcgggcccgggtcccacacggccagcaccgctgctcactcggacgacgccctgggcctgcacctctccagctcctcccacggggtccccgtagccccggcccccgcccagccccaggtctccccaggccctccgcaggctgcccggcctccctccccctgcagccatcccaaggctcctgacctacctggcccctgagctctggagcaagccctgacccaataaaggctttgaacccaa

SEQ ID NO: 342172 - DNA, 1893 bp, Homo sapiens
  misc_feature (908)..(909): n is a, c, g, or t
agccagccctgcgtgcccgggataaacccacctggccgtggtgtgtggccctgttatgcacgtgggccctgattcgctgatgcctgcctgagggtttgcgcttatcggcgacatcagcctgcacttttcttttctcgtgatctctctggttctggcctcagggtgacgtgggcctcgtagggtcccgtggtggctcctccccagacggtgacatggagtgagcccattctccctcctgggagtgggtcactcaggccaccagagcaccacagggaaagcagccagggaggacacggaggcccttgaagctctggcctcttctgaggcctccaggacctgacagtgagtgggagcagccctggcagaacccctcccctcctctcggccgccctgacacctcatccccgacactcagagctcatcctccttcccagctgtttccaatttcaaagtgaactcgaccttgtggctccaggagatgcagcagggacagtgttaaatcggctttcaccagcccacacagccaggcatcctcctcggccctcctgggcactgggtggacaccactggctgtggcctgctggcctggccctggccttctccagacagccctgtccaccccaaagcccagccaccctgggcctgcagcaggcctgtggagttctcagttgcgtggggaccagagggtgctggagaaacaaaccagacgcagctgaaggcagtcagggcagggcgcaatcagcgataagagctgcataggggccacagcgtaacctgagctccagtcggtggaaagaaaaggcagagacgttgcagaggccaggtctgctcaggggaagacagttctgggtgtagaggactcacatcccagagaggctgaggaagggtttaccacgcaagcttctcanncgggctcttgaggggtggctggggtcttcctggcgacgggctgcggcactgaagccctactggagtttggcctgtctccggcacaggtttggacggagctgttttgtgctgaaaggttttctcggggtccgtggtgtcccccaaaggtgccaccgtgcgggtctcctagctccctgccagcttcctgtccctgtgctcactgcccccacgcctcctgccaaggccgagccacacacccgctccacctgcatttcctctaccgactcgccagcccaaatgccgctcttcactctggcctcgctgagcggctgcccgaggaggagctctaggccgacgcccaccgcaggccttacagtcttctctggacgctcccttgcagatgcaccgtggcctggcggcgagcccccggtcaccttcctccgcacggaagaggggccggacgccaccttccccaggaccattcccctgatccaacagttgctaaacgccacggagctcacgcaggacccggccgcctactcccagctggtggccgtgctggtctacaccgccgagcgggccaagttcgccaccggggtagagcggcaggactggatggagctgttcattgacacctttaagctggtgcacagggacatcgtgggggaccccgagaccgcgctggccctctgctaaagcccgggcacccgcccagccgggctgggccctccctgccacactagcttcccagggctgcccccgacaggctggctctcagtggaggccagagatctggaatcggggtcagcggggctacagtccttccaggggctctggggcagctcccagcctcttcccatgctggtggccaccgtgtcccttgctgcggctgcatcttccagtctctcctccgtcttcctgtggccgctctctttataagaaccctggtcattgaatttaaggcccaccccaagtccagaatgacctcgcaagacccttaactca

SEQ ID NO: 342173 - DNA, 3430 bp, Homo sapiens
ccatgttgccgcaacatgctcgggagcggagcctcctcgggaccaggacttcagggccacaggtgctgccaagatgctccagggcacctgctccgtgctcctgctctggggaatcctgggggccatccaggcccagcagcaggaggtcatctcgccggacactaccgagagaaacaacaactgcccagagaagaccgactgccccatccacgtgtacttcgtgctggacacctcggagagcgtcaccatgcagtcccccacggacatcctgctcttccacatgaagcagttcgtgccgcagttcatcagccagctgcagaacgagttctacctggaccaggtggcgctgagctggcgctacggcggcctgcacttctctgaccaggtggaggtgttcagcccaccgggcagcgaccgggcctccttcatcaagaacctgcagggcatcagctccttccgccgcggcaccttcaccgactgcgcgctggccaacatgacggagcagatccggcaggaccgcagcaagggcaccgtccacttcgccgtggtcatcaccgacggccacgtcaccggcagcccctgcgggggcatcaagctgcaggccgagcgggcccgcgaggagggcatccggctcttcgccgtggcccccaaccagaacctgaaggagcagggcctgcgggacatcgccagcacgccgcacgagctctaccgcaacgactacgccaccatgctgcccgactccaccgagatcgaccaggacaccatcaaccgcatcatcaaggtcatgaaacacgaagcctacggagagtgctacaaggtgagctgcctggaaatccctgggccctctggccccaagggctaccgtggacagaagggtgccaagggcaacatgggtgagccgggagagcctggccagaagggaagacagggagacccgggcatcgaaggccccattggattcccaggacccaagggcgttcctggcttcaaaggagagaagggtgaatttggagccgacggtcgcaagggggcccctggcctggctggcaagaacgggaccgatggacagaagggcaagctggggcgcatcggacctcctggctgcaagggagaccctggaaaccggggccccgacggttacccgggggaagcagggagtccaggggagcgaggagaccaaggcggcaagggggaccctggccgcccaggacgcagagggcccccgggagaaatcggggccaagggaagcaaggggtatcaaggcaacaatggagccccaggaagtcctggtgtgaaaggagccaagggcgggcctgggccccgcggacccaaaggcgagccggggcgcaggggagaccccggcaccaagggcagcccaggcagcgatggccccaagggggagaagggggaccctggccctgaggggccccgcggcctggctggagaggttggcaacaaaggagccaagggagaccgaggcttgcctggacccagaggcccccagggagctcttggggagcccggaaagcagggatctcggggagaccccggtgatgcaggaccccgtggagactcaggacagccaggccccaagggagaccccggcaggcctggattcagctacccaggaccccgaggagcacccggagaaaaaggcgagcccggcccacgcggccccgagggaggccgaggcgactttggcttgaaaggagaacctgggaggaaaggagagaaaggagagcctgcggatcctggtccccctggtgagccaggccctcgggggccaagaggagtcccaggacccgagggtgagcccggcccccctggagaccccggtctcacggagtgtgacgtcatgacctacgtgagggagacctgcgggtgctgcgactgtgagaagcgctgtggcgccctggacgtggtcttcgtcatcgacagctccgagagcattgggtacaccaacttcacactggagaagaacttcgtcatcaacgtggtcaacaggctgggtgccatcgctaaggaccccaagtccgagacagggacgcgtgtgggcgtggtgcagtacagccacgagggcacctttgaggccatccagctggacgacgaacgtatcgactccctgtcgagcttcaaggaggctgtcaagaacctcgagtggattgcgggcggcacctggacaccctcagccctcaagtttgcctacgaccgcctcatcaaggagagccggcgccagaagacacgtgtgtttgcggtggtcatcacggacgggcgccacgaccctcgggacgatgacctcaacttgcgggcgctgtgcgaccgcgacgtcacagtgacggccatcggcatcggggacatgttccacgagaagcacgagagtgaaaacctctactccatcgcctgcgacaagccacagcaggtgcgcaacatgacgctgttctccgacctggtcgctgagaagttcatcgatgacatggaggacgtcctctgcccggaccctcagatcgtgtgcccagaccttccctgccaaacagagctgtccgtggcacagtgcacgcagcggcccgtggacatcgtcttcctgctggacggctccgagcggctgggtgagcagaacttccacaaggcccggcgcttcgtggagcaggtggcgcggcggctgacgctggcccggagggacgacgaccctctcaacgcacgcgtggcgctgctgcagtttggtggccccggcgagcagcaggtggccttcccgctgagccacaacctcacggccatccacgaggcgctggagaccacacaatacctgaactccttctcgcacgtgggcgcaggcgtggtgcacgccatcaatgccatcgtgcgcagcccgcgtggcggggcccggaggcacgcagagctgtccttcgtgttcctcacggacggcgtcacgggcaacgacagtctgcacgagtcggcgcactccatgcgcaagcagaacgtggtacccaccgtgctggccttgggcagcgacgtggacatggacgtgctcaccacgctcagcctgggtgaccgcgccgccgtgttccacgagaaggactatgacagcctggcgcaacccggcttcttcgaccgcttcatccgctggatctgctagcgccgccgcccgggccccgcagtcgagggtcgtgagcccaccccgtccatggtgctaagcgggcccgggtcccacacggccagcaccgctgctcactcggacgacgccctgggcctgcacctctccagctcctcccacggggtccccgtagccccggcccccgcccagccccaggtctccccaggccctccgcaggctgcccggcctccctccccctgcagccatcccaaggctcctgacctacctggcccctgagctctggagcaagccctgacccaataaaggctttgaacccaa

SEQ ID NO: 342174 - DNA, 3331 bp, Homo sapiens
ccatgttgccgcaacatgctcgggagcggagcctcctcgggaccaggacttcagggccacaggtgctgccaagatgctccagggcacctgctccgtgctcctgctctggggaatcctgggggccatccaggcccagcagcaggaggtcatctcgccggacactaccgagagaaacaacaactgcccagagaagaccgactgccccatccacgtgtacttcgtgctggacacctcggagagcgtcaccatgcagtcccccacggacatcctgctcttccacatgaagcagttcgtgccgcagttcatcagccagctgcagaacgagttctacctggaccaggtggcgctgagctggcgctacggcggcctgcacttctctgaccaggtggaggtgttcagcccaccgggcagcgaccgggcctccttcatcaagaacctgcagggcatcagctccttccgccgcggcaccttcaccgactgcgcgctggccaacatgacggagcagatccggcaggaccgcagcaagggcaccgtccacttcgccgtggtcatcaccgacggccacgtcaccggcagcccctgcgggggcatcaagctgcaggccgagcgggcccgcgaggagggcatccggctcttcgccgtggcccccaaccagaacctgaaggagcagggcctgcgggacatcgccagcacgccgcacgagctctaccgcaacgactacgccaccatgctgcccgactccaccgagatcgaccaggacaccatcaaccgcatcatcaaggtcatgaaacacgaagcctacggagagtgctacaaggtgagctgcctggaaatccctgggccctctggccccaagggctaccgtggacagaagggtgccaagggcaacatgggtgagccgggagagcctggccagaagggaagacagggagacccgggcatcgaaggccccattggattcccaggacccaagggcgttcctggcttcaaaggagagaagggtgaatttggagccgacggtcgcaagggggcccctggcctggctggcaagaacgggaccgatggacagaagggcaagctggggcgcatcggacctcctggctgcaagggagaccctggaaaccggggccccgacggttacccgggggaagcagggagtccaggggagcgaggagaccaaggcggcaagggggaccctggccgcccaggacgcagagggcccccgggagaaatcggggccaagggaagcaaggggtatcaaggcaacaatggagccccaggaagtcctggtgtgaaaggagccaagggcgggcctgggccccgcggacccaaaggcgagccggggcgcaggggagaccccggcaccaagggcagcccaggcagcgatggccccaagggggagaagggggaccctggccctgaggggccccgcggcctggctggagaggttggcaacaaaggagccaagggagaccgaggcttgcctggacccagaggcccccagggagctcttggggagcccggaaagcagggatctcggggagaccccggtgatgcaggaccccgtggagactcaggacagccaggccccaagggagaccccggcaggcctggattcagctacccaggaccccgaggagcacccggagaaaaaggcgagcccggcccacgcggccccgagggaggccgaggcgactttggcttgaaaggagaacctgggaggaaaggagagaaaggagagcctgcggatcctggtccccctggtgagccaggccctcgggggccaagaggagtcccaggacccgagggtgagcccggcccccctggagaccccggtctcacggagtgtgacgtcatgacctacgtgagggagacctgcgggtgctgcgactgtgagaagcgctgtggcgccctggacgtggtcttcgtcatcgacagctccgagagcattgggtacaccaacttcacactggagaagaacttcgtcatcaacgtggtcaacaggctgggtgccatcgactccctgtcgagcttcaaggaggctgtcaagaacctcgagtggattgcgggcggcacctggacaccctcagccctcaagtttgcctacgaccgcctcatcaaggagagccggcgccagaagacacgtgtgtttgcggtggtcatcacggacgggcgccacgaccctcgggacgatgacctcaacttgcgggcgctgtgcgaccgcgacgtcacagtgacggccatcggcatcggggacatgttccacgagaagcacgagagtgaaaacctctactccatcgcctgcgacaagccacagcaggtgcgcaacatgacgctgttctccgacctggtcgctgagaagttcatcgatgacatggaggacgtcctctgcccggaccctcagatcgtgtgcccagaccttccctgccaaacagagctgtccgtggcacagtgcacgcagcggcccgtggacatcgtcttcctgctggacggctccgagcggctgggtgagcagaacttccacaaggcccggcgcttcgtggagcaggtggcgcggcggctgacgctggcccggagggacgacgaccctctcaacgcacgcgtggcgctgctgcagtttggtggccccggcgagcagcaggtggccttcccgctgagccacaacctcacggccatccacgaggcgctggagaccacacaatacctgaactccttctcgcacgtgggcgcaggcgtggtgcacgccatcaatgccatcgtgcgcagcccgcgtggcggggcccggaggcacgcagagctgtccttcgtgttcctcacggacggcgtcacgggcaacgacagtctgcacgagtcggcgcactccatgcgcaagcagaacgtggtacccaccgtgctggccttgggcagcgacgtggacatggacgtgctcaccacgctcagcctgggtgaccgcgccgccgtgttccacgagaaggactatgacagcctggcgcaacccggcttcttcgaccgcttcatccgctggatctgctagcgccgccgcccgggccccgcagtcgagggtcgtgagcccaccccgtccatggtgctaagcgggcccgggtcccacacggccagcaccgctgctcactcggacgacgccctgggcctgcacctctccagctcctcccacggggtccccgtagccccggcccccgcccagccccaggtctccccaggccctccgcaggctgcccggcctccctccccctgcagccatcccaaggctcctgacctacctggcccctgagctctggagcaagccctgacccaataaaggctttgaacccaa

SEQ ID NO: 342175 - DNA, 1014 bp, Homo sapiens
ttatctagagatcccccatgttggccgcatctggtcgctgagaagttcatcgatgacatggaggacgtcctctgcccggaccctcagatcgtgtgcccagaccttccctgccaaacagagctgtccgtggcacagtgcacgcagcggcccgtggacatcgtcttcctgctggacggctccgagcggctgggtgagcagaacttccacaaggcccggcgcttcgtggagcaggtggcgcggcggctgacgctggcccggagggacgacgaccctctcaacgcacgcgtggcgctgctgcagtttggtggccccggcgagcagcaggtggccttcccgctgagccacaacctcacggccatccacgaggcgctggagaccacacaatacctgaactccttctcgcacgtgggcgcaggcgtggtgcacgccatcaatgccatcgtgcgcagcccgcgtggcggggcccggaggcacgcagagctgtccttcgtgttcctcacggacggcgtcacgggcaacgacagtctgcacgagtcggcgcactccatgcgcaagcagaacgtggtacccaccgtgctggccttgggcagcgacgtggacatggacgtgctcaccacgctcagcctgggtgaccgcgccgccgtgttccacgagaaggactatgacagcctggcgcaacccggcttcttcgaccgcttcatccgctggatctgctagcgccgccgcccgggccccgcagtcgagggtcgtgagcccaccccgtccatggtgctaagcgggcccgggtcccacacggccagcaccgctgctcactcggacgacgccctgggcctgcacctctccagctcctcccacggggtccccgtagccccggcccccgcccagccccaggtctccccaggccctccgcaggctgcccggcctccctccccctgcagccatcccaaggctcctgacctacctggcccctgagctctggagcaagccctgacccaataaaggctttgaacccaa

SEQ ID NO: 342176 - DNA, 948 bp, Homo sapiens
  misc_feature (4)..(4): n is a, c, g, or t
  misc_feature (9)..(9): n is a, c, g, or t
  misc_feature (21)..(21): n is a, c, g, or t
gaangtaantctagaggatcncgaacgggtgatgcggttggggactgggcaggaggctccctgtaaacatttggacttgggctggggcagggtgctggtgttggggaacgggtgatgcggctgggtgagcagaacttccacaaggcccggcgcttcgtggagcaggtggcgcggcggctgacgctggcccggagggacgacgaccctctcaacgcacgcgtggcgctgctgcagtttggtggccccggcgagcagcaggtggccttcccgctgagccacaacctcacggccatccacgaggcgctggagaccacacaatacctgaactccttctcgcacgtgggcgcaggcgtggtgcacgccatcaatgccatcgtgcgcagcccgcgtggcggggcccggaggcacgcagagctgtccttcgtgttcctcacggacggcgtcacgggcaacgacagtctgcacgagtcggcgcactccatgcgcaagcagaacgtggtacccaccgtgctggccttgggcagcgacgtggacatggacgtgctcaccacgctcagcctgggtgaccgcgccgccgtgttccacgagaaggactatgacagcctggcgcaacccggcttcttcgaccgcttcatccgctggatctgctagcgccgccgcccgggccccgcagtcgagggtcgtgagcccaccccgtccatggtgctaagcgggcccgggtcccacacggccagcaccgctgctcactcggacgacgccctgggcctgcacctctccagctcctcccacggggtccccgtagccccggcccccgcccagccccaggtctccccaggccctccgcaggctgcccggcctccctccccctgcagccatcccaaggctcctgacctacctggcccctgagctctggagcaagccctgacccaataaaggctttgaacccaa

SEQ ID NO: 342177 - DNA, 3453 bp, Homo sapiens
ccatgttgccgcaacatgctcgggagcggagcctcctcgggaccaggacttcagggccacaggtgctgccaagatgctccagggcacctgctccgtgctcctgctctggggaatcctgggggccatccaggcccagcagcaggaggtcatctcgccggacactaccgagagaaacaacaactgcccagagaagaccgactgccccatccacgtgtacttcgtgctggacacctcggagagcgtcaccatgcagtcccccacggacatcctgctcttccacatgaagcagttcgtgccgcagttcatcagccagctgcagaacgagttctacctggaccaggtggcgctgagctggcgctacggcggcctgcacttctctgaccaggtggaggtgttcagcccaccgggcagcgaccgggcctccttcatcaagaacctgcagggcatcagctccttccgccgcggcaccttcaccgactgcgcgctggccaacatgacggagcagatccggcaggaccgcagcaagggcaccgtccacttcgccgtggtcatcaccgacggccacgtcaccggcagcccctgcgggggcatcaagctgcaggccgagcgggcccgcgaggagggcatccggctcttcgccgtggcccccaaccagaacctgaaggagcagggcctgcgggacatcgccagcacgccgcacgagctctaccgcaacgactacgccaccatgctgcccgactccaccgagatcgaccaggacaccatcaaccgcatcatcaaggtcatgaaacacgaagcctacggagagtgctacaaggtgagctgcctggaaatccctgggccctctggccccaagggctaccgtggacagaagggtgccaagggcaacatgggtgagccgggagagcctggccagaagggaagacagggagacccgggcatcgaaggccccattggattcccaggacccaagggcgttcctggcttcaaaggagagaagggtgaatttggagccgacggtcgcaagggggcccctggcctggctggcaagaacgggaccgatggacagaagggcaagctggggcgcatcggacctcctggctgcaagggagaccctggaaaccggggccccgacggttacccgggggaagcagggagtccaggggagcgaggagaccaaggcggcaagggggaccctggccgcccaggacgcagagggcccccgggagaaatcggggccaagggaagcaaggggtatcaaggcaacaatggagccccaggaagtcctggtgtgaaaggagccaagggcgggcctgggccccgcggacccaaaggcgagccggggcgcaggggagaccccggcaccaagggcagcccaggcagcgatggccccaagggggagaagggggaccctggccctgaggggccccgcggcctggctggagaggttggcaacaaaggagccaagggagaccgaggcttgcctggacccagaggcccccagggagctcttggggagcccggaaagcagggatctcggggagaccccggtgatgcaggaccccgtggagactcaggacagccaggccccaagggagaccccggcaggcctggattcagctacccaggaccccgaggagcacccggagaaaaaggcgagcccggcccacgcggccccgagggaggccgaggcgactttggcttgaaaggagaacctgggaggaaaggagagaaaggagagcctgcggatcctggtccccctggtgagccaggccctcgggggccaagaggagtcccaggacccgagggtgagcccggcccccctggagaccccggtctcacggagtgtgacgtcatgacctacgtgagggagacctgcgggtgctgcgactgtgagaagcgctgtggcgccctggacgtggtcttcgtcatcgacagctccgagagcattgggtacaccaacttcacactggagaagaacttcgtcatcaacgtggtcaacaggctgggtgccatcgctaaggaccccaagtccgagacagggacgcgtgtgggcgtggtgcagtacagccacgagggcacctttgaggccatccagctggacgacgaacgtatcgactccctgtcgagcttcaaggaggctgtcaagaacctcgagtggattgcgggcggcacctggacaccctcagccctcaagtttgcctacgaccgcctcatcaaggagagccggcgccagaagacacgtgtgtttgcggtggtcatcacggacgggcgccacgaccctcgggacgatgacctcaacttgcgggcgctgtgcgaccgcgacgtcacagtgacggccatcggcatcggggacatgttccacgagaagcacgagagtgaaaacctctactccatcgcctgcgacaagccacagcaggtgcgcaacatgacgctgttctccgacctggtcgctgagaagttcatcgatgacatggaggacgtcctctgcccggaccctcagatcgtgtgcccagaccttccctgccaaacagagctgtccgtggcacagtgcacgcagcggcccgtggacatcgtcttcctgctggacggctccgagcggctgggtgagcagaacttccacaaggcccggcgcttcgtggagcaggtggcgcggcggctgacgctggcccggagggacgacgaccctctcaacgcacgcgtggcgctgctgcagtttggtggccccggcgagcagcaggtggccttcccgctgagccacaacctcacggccatccacgaggcgctggagaccacacaatacctgaactccttctcgcacgtgggcgcaggcgtggtgcacgccatcaatgccatcgtgcgcagcccgcgtggcggggcccggaggcacgcagagctgtccttcgtgttcctcacggacggcgtcacgggcaacgacagtctgcacgagtcggcgcactccatgcgcaagcagaacgtggtacccaccgtgctggccttgggcagcgacgtggacatggacgtgctcaccacgctcagcctgggtgaccgcgccgccgtgttccacgagaaggactatgacagcctggcgcaacccggcttcttcgaccgcttcatccgctggatctgctagcgccgccgcccgggccccgcagtcgagggtcgtgagcccaccccgtccatggtgctaagcgggcccgggtcccacacggccagcaccgctgctcactcggacgacgccctgggcctgcacctctccagctcctcccacggggtccccgtagccccggcccccgcccagccccaggtctccccaggccctccgcaggctgcccggcctccctccccctgcagccatcccaaggctcctgacctacctgtaactcgcacctctgtgagattttaaaagacccggcgaaggccctttgatcccacaataaaacggcctaagtc

SEQ ID NO: 342178 - DNA, 3139 bp, Homo sapiens
ccatgttgccgcaacatgctcgggagcggagcctcctcgggaccaggacttcagggccacaggtgctgccaagatgctccagggcacctgctccgtgctcctgctctggggaatcctgggggccatccaggcccagcagcaggaggtcatctcgccggacactaccgagagaaacaacaactgcccagagaagaccgactgccccatccacgtgtacttcgtgctggacacctcggagagcgtcaccatgcagtcccccacggacatcctgctcttccacatgaagcagttcgtgccgcagttcatcagccagctgcagaacgagttctacctggaccaggtggcgctgagctggcgctacggcggcctgcacttctctgaccaggtggaggtgttcagcccaccgggcagcgaccgggcctccttcatcaagaacctgcagggcatcagctccttccgccgcggcaccttcaccgactgcgcgctggccaacatgacggagcagatccggcaggaccgcagcaagggcaccgtccacttcgccgtggtcatcaccgacggccacgtcaccggcagcccctgcgggggcatcaagctgcaggccgagcgggcccgcgaggagggcatccggctcttcgccgtggcccccaaccagaacctgaaggagcagggcctgcgggacatcgccagcacgccgcacgagctctaccgcaacgactacgccaccatgctgcccgactccaccgagatcgaccaggacaccatcaaccgcatcatcaaggtcatgaaacacgaagcctacggagagtgctacaaggtgagctgcctggaaatccctgggccctctggccccaagggctaccgtggacagaagggtgccaagggcaacatgggtgagccgggagagcctggccagaagggaagacagggagacccgggcatcgaaggccccattggattcccaggacccaagggcgttcctggcttcaaaggagagaagggtgaatttggagccgacggtcgcaagggggcccctggcctggctggcaagaacgggaccgatggacagaagggcaagctggggcgcatcggacctcctggctgcaagggagaccctggaaaccggggccccgacggttacccgggggaagcagggagtccaggggagcgaggagaccaaggcggcaagggggaccctggccgcccaggacgcagagggcccccgggagaaatcggggccaagggaagcaaggggtatcaaggcaacaatggagccccaggaagtcctggtgtgaaaggagccaagggcgggcctgggccccgcggacccaaaggcgagccggggcgcaggggagaccccggcaccaagggcagcccaggcagcgatggccccaagggggagaagggggaccctggccctgaggggccccgcggcctggctggagaggttggcaacaaaggagccaagggagaccgaggcttgcctggacccagaggcccccagggagctcttggggagcccggaaagcagggatctcggggagaccccggtgatgcaggaccccgtggagactcaggacagccaggccccaagggagaccccggcaggcctggattcagctacccaggaccccgaggagcacccggagaaaaaggcgagcccggcccacgcggccccgagggaggccgaggcgactttggcttgaaaggagaacctgggaggaaaggagagaaaggagagcctgcggatcctggtccccctggtgagccaggccctcgggggccaagaggagtcccaggacccgagggtgagcccggcccccctggagaccccggtctcacggagtgtgacgtcatgacctacgtgagggagacctgcgggtgctgcgactgtgagaagcgctgtggcgccctggacgtggtcttcgtcatcgacagctccgagagcattgggtacaccaacttcacactggagaagaacttcgtcatcaacgtggtcaacaggctgggtgccatcgctaaggaccccaagtccgagacagggacgcgtgtgggcgtggtgcagtacagccacgagggcacctttgaggccatccagctggacgacgaacgtatcgactccctgtcgagcttcaaggaggctgtcaagaacctcgagtggattgcgggcggcacctggacaccctcagccctcaagtttgcctacgaccgcctcatcaaggagagccggcgccagaagacacgtgtgtttgcggtggtcatcacggacgggcgccacgaccctcgggacgatgacctcaacttgcgggcgctgtgcgaccgcgacgtcacagtgacggccatcggcatcggggacatgttccacgagaagcacgagagtgaaaacctctactccatcgcctgcgacaagccacagcaggtgcgcaacatgacgctgttctccgacctggtcgctgagaagttcatcgatgacatggaggacgtcctctgcccggaccctcagatcgtgtgcccagaccttccctgccaaacagatgcaccgtggcctggcggcgagcccccggtcaccttcctccgcacggaagaggggccggacgccaccttccccaggaccattcccctgatccaacagttgctaaacgccacggagctcacgcaggacccggccgcctactcccagctggtggccgtgctggtctacaccgccgagcgggccaagttcgccaccggggtagagcggcaggactggatggagctgttcattgacacctttaagctggtgcacagggacatcgtgggggaccccgagaccgcgctggccctctgctaaagcccgggcacccgcccagccgggctgggccctccctgccacactagcttcccagggctgcccccgacaggctggctctcagtggaggccagagatctggaatcggggtcagcggggctacagtccttccaggggctctggggcagctcccagcctcttcccatgctggtggccaccgtgtcccttgctgcggctgcatcttccagtctctcctccgtcttcctgtggccgctctctttataagaaccctggtcattgaatttaaggcccaccccaagtccagaatgacctcgcaagacccttaactca

SEQ ID NO: 342179 - DNA, 2832 bp, Homo sapiens
ccatgttgccgcaacatgctcgggagcggagcctcctcgggaccaggacttcagggccacaggtgctgccaagatgctccagggcacctgctccgtgctcctgctctggggaatcctgggggccatccaggcccagcagcaggaggtcatctcgccggacactaccgagagaaacaacaactgcccagagaagaccgactgccccatccacgtgtacttcgtgctggacacctcggagagcgtcaccatgcagtcccccacggacatcctgctcttccacatgaagcagttcgtgccgcagttcatcagccagctgcagaacgagttctacctggaccaggtggcgctgagctggcgctacggcggcctgcacttctctgaccaggtggaggtgttcagcccaccgggcagcgaccgggcctccttcatcaagaacctgcagggcatcagctccttccgccgcggcaccttcaccgactgcgcgctggccaacatgacggagcagatccggcaggaccgcagcaagggcaccgtccacttcgccgtggtcatcaccgacggccacgtcaccggcagcccctgcgggggcatcaagctgcaggccgagcgggcccgcgaggagggcatccggctcttcgccgtggcccccaaccagaacctgaaggagcagggcctgcgggacatcgccagcacgccgcacgagctctaccgcaacgactacgccaccatgctgcccgactccaccgagatcgaccaggacaccatcaaccgcatcatcaaggtcatgaaacacgaagcctacggagagtgctacaaggtgagctgcctggaaatccctgggccctctggccccaagggctaccgtggacagaagggtgccaagggcaacatgggtgagccgggagagcctggccagaagggaagacagggagacccgggcatcgaaggccccattggattcccaggacccaagggcgttcctggcttcaaaggagagaagggtgaatttggagccgacggtcgcaagggggcccctggcctggctggcaagaacgggaccgatggacagaagggcaagctggggcgcatcggacctcctggctgcaagggagaccctggaaaccggggccccgacggttacccgggggaagcagggagtccaggggagcgaggagaccaaggcggcaagggggaccctggccgcccaggacgcagagggcccccgggagaaatcggggccaagggaagcaaggggtatcaaggcaacaatggagccccaggaagtcctggtgtgaaaggagccaagggcgggcctgggccccgcggacccaaaggcgagccggggcgcaggggagaccccggcaccaagggcagcccaggcagcgatggccccaagggggagaagggggaccctggccctgaggggccccgcggcctggctggagaggttggcaacaaaggagccaagggagaccgaggcttgcctggacccagaggcccccagggagctcttggggagcccggaaagcagggatctcggggagaccccggtgatgcaggaccccgtggagactcaggacagccaggccccaagggagaccccggcaggcctggattcagctacccaggaccccgaggagcacccggagaaaaaggcgagcccggcccacgcggccccgagggaggccgaggcgactttggcttgaaaggagaacctgggaggaaaggagagaaaggagagcctgcggatcctggtccccctggtgagccaggccctcgggggccaagaggagtcccaggacccgagggtgagcccggcccccctggagaccccggtctcacggagtgtgacgtcatgacctacgtgagggagacctgcgggtgctgcgactgtgagaagcgctgtggcgccctggacgtggtcttcgtcatcgacagctccgagagcattgggtacaccaacttcacactggagaagaacttcgtcatcaacgtggtcaacaggctgggtgccatcgctaaggaccccaagtccgagacagggacgcgtgtgggcgtggtgcagtacagccacgagggcacctttgaggccatccagctggacgacgaacgtatcgactccctgtcgagcttcaaggaggctgtcaagaacctcgagtggattgcgggcggcacctggacaccctcagccctcaagtttgcctacgaccgcctcatcaaggagagccggcgccagaagacacgtgtgtttgcggtggtcatcacggacgggcgccacgaccctcgggacgatgacctcaacttgcgggcgctgtgcgaccgcgacgtcacagtgacggccatcggcatcggggacatgttccacgagaagcacgagagtgaaaacctctactccatcgcctgcgacaagccacagcaggtgcgcaacatgacgctgttctccgacctggtcgctgagaagttcatcgatgacatggaggacgtcctctgcccggaccctcagatcgtgtgcccagaccttccctgccaaacagagctgtccgtggcacagtgcacgcagcggcccgtggacatcgtcttcctgctggacggctccgagcggctgggtgagcagaacttccacaaggcccggcgcttcgtggagcaggtggcgcggcggctgacgctggcccggagggacgacgaccctctcaacgcacgcgtggcgctgctgcagtttggtgggccacgcggtggctcccgtgacaaactccggctccagagcttgggccgacgtgtcctcgcagggcggggtgtccaacctcgccccttggcggacaatcttcccgggcg

SEQ ID NO: 342180 - DNA, 2816 bp, Homo sapiens
ccatgttgccgcaacatgctcgggagcggagcctcctcgggaccaggacttcagggccacaggtgctgccaagatgctccagggcacctgctccgtgctcctgctctggggaatcctgggggccatccaggcccagcagcaggaggtcatctcgccggacactaccgagagaaacaacaactgcccagagaagaccgactgccccatccacgtgtacttcgtgctggacacctcggagagcgtcaccatgcagtcccccacggacatcctgctcttccacatgaagcagttcgtgccgcagttcatcagccagctgcagaacgagttctacctggaccaggtggcgctgagctggcgctacggcggcctgcacttctctgaccaggtggaggtgttcagcccaccgggcagcgaccgggcctccttcatcaagaacctgcagggcatcagctccttccgccgcggcaccttcaccgactgcgcgctggccaacatgacggagcagatccggcaggaccgcagcaagggcaccgtccacttcgccgtggtcatcaccgacggccacgtcaccggcagcccctgcgggggcatcaagctgcaggccgagcgggcccgcgaggagggcatccggctcttcgccgtggcccccaaccagaacctgaaggagcagggcctgcgggacatcgccagcacgccgcacgagctctaccgcaacgactacgccaccatgctgcccgactccaccgagatcgaccaggacaccatcaaccgcatcatcaaggtcatgaaacacgaagcctacggagagtgctacaaggtgagctgcctggaaatccctgggccctctggccccaagggctaccgtggacagaagggtgccaagggcaacatgggtgagccgggagagcctggccagaagggaagacagggagacccgggcatcgaaggccccattggattcccaggacccaagggcgttcctggcttcaaaggagagaagggtgaatttggagccgacggtcgcaagggggcccctggcctggctggcaagaacgggaccgatggacagaagggcaagctggggcgcatcggacctcctggctgcaagggagaccctggaaaccggggccccgacggttacccgggggaagcagggagtccaggggagcgaggagaccaaggcggcaagggggaccctggccgcccaggacgcagagggcccccgggagaaatcggggccaagggaagcaaggggtatcaaggcaacaatggagccccaggaagtcctggtgtgaaaggagccaagggcgggcctgggccccgcggacccaaaggcgagccggggcgcaggggagaccccggcaccaagggcagcccaggcagcgatggccccaagggggagaagggggaccctggccctgaggggccccgcggcctggctggagaggttggcaacaaaggagccaagggagaccgaggcttgcctggacccagaggcccccagggagctcttggggagcccggaaagcagggatctcggggagaccccggtgatgcaggaccccgtggagactcaggacagccaggccccaagggagaccccggcaggcctggattcagctacccaggaccccgaggagcacccggagaaaaaggcgagcccggcccacgcggccccgagggaggccgaggcgactttggcttgaaaggagaacctgggaggaaaggagagaaaggagagcctgcggatcctggtccccctggtgagccaggccctcgggggccaagaggagtcccaggacccgagggtgagcccggcccccctggagaccccggtctcacggagtgtgacgtcatgacctacgtgagggagacctgcgggtgctgcgactgtgagaagcgctgtggcgccctggacgtggtcttcgtcatcgacagctccgagagcattgggtacaccaacttcacactggagaagaacttcgtcatcaacgtggtcaacaggctgggtgccatcgctaaggaccccaagtccgagacagggacgcgtgtgggcgtggtgcagtacagccacgagggcacctttgaggccatccagctggacgacgaacgtatcgactccctgtcgagcttcaaggaggctgtcaagaacctcgagtggattgcgggcggcacctggacaccctcagccctcaagtttgcctacgaccgcctcatcaaggagagccggcgccagaagacacgtgtgtttgcggtggtcatcacggacgggcgccacgaccctcgggacgatgacctcaacttgcgggcgctgtgcgaccgcgacgtcacagtgacggccatcggcatcggggacatgttccacgagaagcacgagagtgaaaacctctactccatcgcctgcgacaagccacagcaggtgcgcaacatgacgctgttctccgacctggtcgctgagaagttcatcgatgacatggaggacgtcctctgcccgggccctctgctaaagcccgggcacccgcccagccgggctgggccctccctgccacactagcttcccagggctgcccccgacaggctggctctcagtggaggccagagatctggaatcggggtcagcggggctacagtccttccaggggctctggggcagctcccagcctcttcccatgctggtggccaccgtgtcccttgctgcggctgcatcttccagtctctcctccgtcttcctgtggccgctctctttataagaaccctggtcattgaatttaaggcccaccccaagtccagaatgacctcgcaagacccttaactca

SEQ ID NO: 342181 - DNA, 3598 bp, Homo sapiens
  misc_feature (2913)..(2913): n is a, c, g, or t
  misc_feature (3337)..(3337): n is a, c, g, or t
  misc_feature (3385)..(3386): n is a, c, g, or t
  misc_feature (3419)..(3419): n is a, c, g, or t
  misc_feature (3436)..(3436): n is a, c, g, or t
  misc_feature (3466)..(3466): n is a, c, g, or t
  misc_feature (3526)..(3528): n is a, c, g, or t
  misc_feature (3530)..(3531): n is a, c, g, or t
  misc_feature (3533)..(3534): n is a, c, g, or t
  misc_feature (3536)..(3536): n is a, c, g, or t
  misc_feature (3538)..(3540): n is a, c, g, or t
  misc_feature (3542)..(3547): n is a, c, g, or t
  misc_feature (3549)..(3552): n is a, c, g, or t
  misc_feature (3554)..(3554): n is a, c, g, or t
  misc_feature (3557)..(3560): n is a, c, g, or t
  misc_feature (3562)..(3562): n is a, c, g, or t
  misc_feature (3564)..(3565): n is a, c, g, or t
  misc_feature (3567)..(3571): n is a, c, g, or t
  misc_feature (3573)..(3573): n is a, c, g, or t
  misc_feature (3577)..(3577): n is a, c, g, or t
  misc_feature (3579)..(3583): n is a, c, g, or t
  misc_feature (3585)..(3585): n is a, c, g, or t
  misc_feature (3587)..(3587): n is a, c, g, or t
ccatgttgccgcaacatgctcgggagcggagcctcctcgggaccaggacttcagggccacaggtgctgccaagatgctccagggcacctgctccgtgctcctgctctggggaatcctgggggccatccaggcccagcagcaggaggtcatctcgccggacactaccgagagaaacaacaactgcccagagaagaccgactgccccatccacgtgtacttcgtgctggacacctcggagagcgtcaccatgcagtcccccacggacatcctgctcttccacatgaagcagttcgtgccgcagttcatcagccagctgcagaacgagttctacctggaccaggtggcgctgagctggcgctacggcggcctgcacttctctgaccaggtggaggtgttcagcccaccgggcagcgaccgggcctccttcatcaagaacctgcagggcatcagctccttccgccgcggcaccttcaccgactgcgcgctggccaacatgacggagcagatccggcaggaccgcagcaagggcaccgtccacttcgccgtggtcatcaccgacggccacgtcaccggcagcccctgcgggggcatcaagctgcaggccgagcgggcccgcgaggagggcatccggctcttcgccgtggcccccaaccagaacctgaaggagcagggcctgcgggacatcgccagcacgccgcacgagctctaccgcaacgactacgccaccatgctgcccgactccaccgagatcgaccaggacaccatcaaccgcatcatcaaggtcatgaaacacgaagcctacggagagtgctacaaggtgagctgcctggaaatccctgggccctctggccccaagggctaccgtggacagaagggtgccaagggcaacatgggtgagccgggagagcctggccagaagggaagacagggagacccgggcatcgaaggccccattggattcccaggacccaagggcgttcctggcttcaaaggagagaagggtgaatttggagccgacggtcgcaagggggcccctggcctggctggcaagaacgggaccgatggacagaagggcaagctggggcgcatcggacctcctggctgcaagggagaccctggaaaccggggccccgacggttacccgggggaagcagggagtccaggggagcgaggagaccaaggcggcaagggggaccctggccgcccaggacgcagagggcccccgggagaaatcggggccaagggaagcaaggggtatcaaggcaacaatggagccccaggaagtcctggtgtgaaaggagccaagggcgggcctgggccccgcggacccaaaggcgagccggggcgcaggggagaccccggcaccaagggcagcccaggcagcgatggccccaagggggagaagggggaccctggccctgaggggccccgcggcctggctggagaggttggcaacaaaggagccaagggagaccgaggcttgcctggacccagaggcccccagggagctcttggggagcccggaaagcagggatctcggggagaccccggtgatgcaggaccccgtggagactcaggacagccaggccccaagggagaccccggcaggcctggattcagctacccaggaccccgaggagcacccggagaaaaaggcgagcccggcccacgcggccccgagggaggccgaggcgactttggcttgaaaggagaacctgggaggaaaggagagaaaggagagcctgcggatcctggtccccctggtgagccaggccctcgggggccaagaggagtcccaggacccgagggtgagcccggcccccctggagaccccggtctcacggagtgtgacgtcatgacctacgtgagggagacctgcgggtgctgcgactgtgagaagcgctgtggcgccctggacgtggtcttcgtcatcgacagctccgagagcattgggtacaccaacttcacactggagaagaacttcgtcatcaacgtggtcaacaggctgggtgccatcgctaaggaccccaagtccgagacagggacgcgtgtgggcgtggtgcagtacagccacgagggcacctttgaggccatccagctggacgacgaacgtatcgactccctgtcgagcttcaaggaggctgtcaagaacctcgagtggattgcgggcggcacctggacaccctcagccctcaagtttgcctacgaccgcctcatcaaggagagccggcgccagaagacacgtgtgtttgcggtggtcatcacggacgggcgccacgaccctcgggacgatgacctcaacttgcgggcgctgtgcgaccgcgacgtcacagtgacggccatcggcatcggggacatgttccacgagaagcacgagagtgaaaacctctactccatcgcctgcgacaagccacagcaggtgcgcaacatgacgctgttctccgacctggtcgctgagaagttcatcgatgacatggaggacgtcctctgcccggggtgagcgtgtgggcgcggggcagtcggccgaggagcagcaggccccagccgctgtctagcgtgagccccagggacacccctcacctgagggacgaatgtgcagcccaggatcttgggctgtgggtgggaaggggtcgggccctctcggggctgcagggcagaggccagctgcaccctgagcctgtctaggcagatcagtgaacggccgctgagggttcgctagggactgaccctggcctggcccggcctctctcctctcttccagaccctcagatcgtgtgcccagaccttccctgccaaacaggtaatgcagggacctgagccaccaccccagactagcaaagcagccctggtgtccttcctcctcgagggccgggctgggggaggggccgtgcagggacccgggggcggcggacnactgcggaggctgctccttagggagatggccccaggatggcagcacaggggaggaggggcttggggaaggcaggctcccaggaacgcaggaacagcatcacgaggccatgaggtgggtgctgctagcctggcgctgtgctcggcatgtggccactggtcttgaaggcccaccatgggcttgcagtctccctcagctgccgcccagctcccatgggctggccgtgcatgtgccaccggaggaagccctggatcagtgagtgaaaccatcccggggtggaagcactgacaccccccagcaccagcaggtcttgctccaaccctggcctgcctcggagctgcagctgcggctctcatctctgggagtgggggagcccatgtccggatgtggcccacgtggtgtgaagctggagctgggggtgccgtncagctctgctggactggtgctgcccccatggtgcactgctgcaccgtnnctgggcccacaggaggtccccgggggcgttagnagctgagtccccctcantgagccgtcccctccaggagtgtgagggtngggatgccatggagacagggtgggagggtccgactggaggaccacagggaggaaacctcnnngnntnngntnnnannnnnncnnnncntcnnnncncnngnnnnngngtgngnnnnngngntccatggggag

SEQ ID NO: 342182 - DNA, 1083 bp, Homo sapiens
ccatgttgccgcaacatgctcgggagcggagcctcctcgggaccaggacttcagggccacaggtgctgccaagatgctccagggcacctgctccgtgctcctgctctggggaatcctgggggccatccaggcccagcagcaggaggtcatctcgccggacactaccgagagaaacaacaactgcccagagaagaccgactgccccatccacgtgtacttcgtgctggacacctcggagagcgtcaccatgcagtcccccacggacatcctgctcttccacatgaagcagttcgtgccgcagttcatcagccagctgcagaacgagttctacctggaccaggtggcgctgagctggcgctacggcggcctgcacttctctgaccaggtggaggtgttcagcccaccgggcagcgaccgggcctccttcatcaagaacctgcagggcatcagctccttccgccgcggcaccttcaccgactgcgcgctggccaacatgacggagcagatccggcaggaccgcagcaagggcaccgtccacttcgccgtggtcatcaccgacggccacgtcaccggcagcccctgcgggggcatcaagctgcaggccgagcgggcccgcgaggagggcatccggctcttcgccgtggcccccaaccagaacctgaaggagcagggcctgcgggacatcgccagcacgccgcacgagctctaccgcaacgactacgccaccatgctgcccgactccaccgagatcgaccaggacaccatcaaccgcatcatcaaggtcatgaaacacgaagcctacggagagtgctacaaggtgagctgcctggaaatccctgggccctctggccccaagggctaccgtggacagaagggtgccaagggcaacatgggtgagccgggagagcctggccagaagggaagacagtccccgtagccccggcccccgcccagccccaggtctccccaggccctccgcaggctgcccggcctccctccccctgcagccatcccaaggctcctgacctacctggcccctgagctctggagcaagccctgacccaataaaggctttgaacccaa

SEQ ID NO: 342183 - DNA, 528 bp, Homo sapiens
aatatatatatagttgttttaaatggtgataagaagaaatggctggtcacagtggctcatgcctttaatcccaccacgtactttgggaggcaaaggtgtgtggattgctggagatatatatatattatcagagcatggaagcacatgcctgtagtcccaactgctcaggaggctgaggtgagggctcacttgagcccaggaggttgaggctgcagtgagccaagatcataccactgcactccatcctgggtgacagtgagaccctgtctcaaaaagaaaagaaaagaaaaagatacggagaaataactcatggtaagagactaggaaggagtggactgggtcagggagggcttctccaagaaggtgacatttgaggaaggaactgagtgttccaggcatagtcaagcctctgatatttgtggcatgtgcctgtagtcccagctacttgggaggccaaggtgggaggattgcttgaggctaggagtttgagaccagcctgggcaacatagcaagatccccatctcttaa

SEQ ID NO: 342184 - DNA, 420 bp, Homo sapiens
tgtgattatccaaaaccctctgggttcttctacgttggaactgttgtcatggagacctcctgagatgcctcactgacctctcgcttccaatatgacttcagatagagatgtagaatcaatgggtgtctcttctaaatggctgcagagggtgctgacctgggcctgcctagactctgcccttctaggagcatctcaagattgtcttattttgggtgtgagtctcactctgttgtcacccaggctggagtccagtggcaggatctcaactcactgcagcctcgacccccaagactcaagtgattctcccaactgctcaggaggctgaggtgagggctcacttgagcccaggaggttgaggctgcagtgagccaagatcataccactgcactccatcctgggtgacagtgagaccctgtctca

SEQ ID NO: 342185 - DNA, 391 bp, Homo sapiens
gggctcccccaaagcatgggcctctccatttcactttgactcggacaccccactccctgtatccagcagctccaccccatgtgtcctggagactggaactggggaaaggcaggatttctcctacaaatgggaatggctgaacaccccacagcatcaagggaagaccctctcaatgcccaccaggtagcaaagccacccacgtgtcccgtgttgcgctattagtttcttcatgcaaaggactatctgtgctcacacctgcactggctccagaggctgcctgcatgacggccacccccgagagaaaggtccttcttatgggaagagcacatccctccagccacttcaactcccgggcagaagcccctggcaggagcaacgtgcagaaccaccg

SEQ ID NO: 342186 - DNA, 521 bp, Homo sapiens
ccactggtaccaatgggaggggacgggaaatgtgggatggagacagctggggactgggccatggagggagtcagtgttcacctgagggctctggatagaagccaaggagcactgagtacatgagccgatacgtggccacccatgcaccagccctcacctttgccccataggagggaagccctgaaccctctagaaggaaagtgtggtctcaggtgataccccacacagagaggagatgcaggggtgtcggcaaagaggaacagcccaggcagcaggagtcaaaaaggaaaggggaggggacacaatgccaggctgcaggcccaagctggccaccgctgagctaagtggagtctgtcctactgggatctaattctcatatctctcccacccagagacccaagaggggaatgcatttttccatctgtttctgtcctccattggtcaaggattgtccccacagagcagtaacccccctgctcttgctcttccaggctatgcatgtgagagtgccaagtgggtgc

SEQ ID NO: 342187 - DNA, 512 bp, Homo sapiens
ccagacacaaaagatcacgttgtatgcctcaagttataagaggtattcataagaggtaaattcatagagaaaaaaagcaaactggtgttactagagactgttgggagggtggaatgcgggtgactgcttagagacagttttcttttggggtgatgaaaacattctggaacttgatagaggtggaggcttgaaaacactatgaatgtactaaatgccaatgaattgtatgctttaagtgattaactttatgtgatgttatttttactttaataaaagtaagtagagtactatattataatctcttgaataaattaaaaaacataaatccagataaatataaataaatgtatgtaaatttaggaaacaggttattctataatttctaagtacctcattcccccaaaaaattaattgcagctttgcagtgaaatagcctggcaaatgcacccttaatcaacaaattaaagtgaacaacatcagtaacaggtcaaactgatattgtgtgcctgaac

SEQ ID NO: 342188 - DNA, 349 bp, Homo sapiens
tttattttttgagatgcggtctcgctgtgttggccaggttggtcttgaattcttggcctcaagcagtcctcctgtctcggcctccgaaagtgctaggattacaggcatgagccaccatgcccggcatctgaaatttttttaaaaaaaaactagaaatagggtgttactgcgttggccagagtggtctccaactcttggcctccatcaatcttctcacctaggcctcccaaagtgctgggattgcaggcatgagctaccatgcccagccaagagtttgtttagtaaatgttacaggcagcaaacatttgagtgctccccaggtgtgagacactgtgtcatagactagtaa

SEQ ID NO: 342189 - DNA, 427 bp, Homo sapiens
atgagaggcgtaagggccatctgtaccatttacgttttgtgatgtagagttacccttggtactgcttgtctctctcccaattctgaggactccatagagggcagagctacacctcctccatcagagttagaaattcccatgataggtaggaggtatacttccttcccacctctgtcattgcacctgtcttagagatagttactattgcagctaaaaccccttgtgaaacatggattacatcagaagtgatgcagtgcacaataaagatcacagcaggtggctgtgtgctcgtgagagaacaaacgtgagttaccactgtggctgatgataacccaagtagaccctaaacccaatctaagactggtgctatttgccagcttcccgagcttaaaggcagtggctaccagttgcctgagagaagactaaa

SEQ ID NO: 342190 - DNA, 467 bp, Homo sapiens
ggccgggcatggtggctcacacctgtaatcccatcactttgggaggccgaggcaggtagatcacctgaggtcaggagtttgagaccagcctggccaacatggcaaaaccctgtctgaaaaacacaaaaattagccaggcgtggtggtgcatgcctgtaatcccagctacttggaagctgaggcaggaaaattgcttgaacccaggaggcggaggttgcagtaagccgattgcacctctgcactccagcctgggcgacagaaagagactccatctcagaaaaacatttgttttatgacccaggttctggtaaatcttgctgaatcttccatgggcaaagaatgtgtaccctgctgttagtgtgtgaagtctcctgtaaatgtcagttaggttccattggtcgatgatggtgttcagttattgtattgtttgctgattttctttgctgtttttttcctgtgaatggtct

SEQ ID NO: 342191 - DNA, 690 bp, Homo sapiens
caaggcctgcacagcgaggaggccaggtcactcagtgcacctggacatcttcaagtgtgattggagcccgcagtgacgctgtttcagctagaagattgtgacccacttccatatcctctcccacatggagagctggggaggaggctttgagagccagctccaattaaggtgtttttttcaggcccgagtagcacccaagtgtctaacccacatgttttctgctgctggaatcctgtggtcaatgtccttgacctgaaccgaataaccaccccagggcagatgaagttaccacccctgaagtcctagattccaccagcaaggcttcctgcaaagatcaggatcccttgtggatcaaacacctcacataatatgggccccacccctgttcttcctgatcaatcaccaagcaaaccttggaccagtttccaaggagatacttagccttgacctccctgcccagacaggcctcacagccacctgcctcaggcagccctggcttcccagagacccatcctgaccctgacttgcacccttgccaaatatcctaaatatccttctgctgcaggaatatgaaatgagacctgtttctgaacttctaggtttctgttattctttccaggtagatgacattttaatgcttctctgtaattttacatttcttttttgtgtgttggggaggggcctggggta

SEQ ID NO: 342192 - DNA, 559 bp, Homo sapiens
ggttctttcttccccaagcaccaggccttcagctctcttcaaagaccaaggtcagggaggtctagcaatgtctaacccacatgttttctgctgctggaatcctgtggtcaatgtccttgacctgaaccgaataaccaccccagggcagatgaagttaccacccctgaagtcctagattccaccagcaaggcttcctgcaaagatcaggatcccttgtggatcaaacacctcacataatatgggccccacccctgttcttcctgatcaatcaccaagcaaaccttggaccagtttccaaggagatacttagccttgacctccctgcccagacaggcctcacagccacctgcctcaggcagccctggcttcccagagacccatcctgaccctgacttgcacccttgccaaatatcctaaatatccttctgctgcaggaatatgaaatgagacctgtttctgaacttctaggtttctgttattctttccaggtagatgacattttaatgcttctctgtaattttacatttcttttttgtgtgttggggaggggcctggggta

SEQ ID NO: 342193 - DNA, 416 bp, Homo sapiens
gaggagggagggctctagggttcaagccgccaagataaaaagatgtttcattcatcacatggtgtgcttgagagtcacttaaagttgggctgtgacagactggcagggaaggggagattgcaggaagagcatacagaaagatgtggtctgaaaaagcaaaccaaaatgttggaggtgtaattcagagcaggaattggagtaggaagaatgtccgtttgtgtatcgagtgaaagtttgagaccccatctctactatagatagaaaaattagccaggcatggtggcatgcacatgtaatccaagttactcaggaggctgagtcaggagaatctcttgaacttgggaggcggaggttgcagtgagccaagatcgtgccactgcactccagcctggacaagagtgagaccccatctcaaa

SEQ ID NO: 342194 - DNA, 639 bp, Homo sapiens
gaggagggagggctctagggttcaagccgccaagataaaaagatgtttcattcatcacatggtgtgcttgagagtcacttaaagttgggctgtgacagactggcagggaaggggagattgcaggaagagcatacagaaagatgtggtctgaaaaagcaaaccaaaatgttggaggtgtaattcagagcaggaattggagtaggaagaatgtccgtttgtgtatcgagtgaaagtttgagaccccatctcaagaaaaaaatcatcctcctttgaatgacccaggtaatggctgaaatctccataaccctggtgtgtaatatgctgtcggctgcatttctatttttagagtcaatctacagacatattgtggggtgtgatgatgggattgtggctatgttaaagggtccttacctttttcttaatgactttgagatacaatgcacgtaccatacaactcaccctcgtacacttaaaatgtacagttcagtgatttctagttgcaaagttcatgagtctccaagaccatcctcacttctgacacccactgcgagtttgggagtccccgtgaccacctttagggtaagagttcgctagaagtactacaggactcagaaaaggctttctacagcagtacccccg

SEQ ID NO: 342195 - DNA, 732 bp, Homo sapiens
gaggagggagggctctagggttcaagccgccaagataaaaagatgtttcattcatcacatggtgtgcttgagagtcacttaaagttgggctgtgacagactggcagggaaggggagattgcaggaagagcatacagaaagatgtggtctgaaaaagcaaaccaaaatgttggaggtgtaattcagagcaggaattggagtaggaagaatgtccgtttgtgtatcgagtgaaagtttgagaccccatctcaagaaaaaaatcatcctcctttgaatgacccaggtaatggctgaaatctccataaccctggtgtgtaatatgctgtcggctgcatttctatttttagagtcaatctacagacatattgtggggtgtgatgatgggattgtggctatgttaaagggtccttacctttttcttaatgactttgagatacaatgcacgtaccatacaactcaccctcgtacacttaaaatgtacagttcagtgatttctagttgcaaagttcatgagtctccaagaccatcctcacttctgacacccactgcgagtttgggagtccccgtgaccacctttagggtaagagttcgctagaagaaaaaaaaaaacacgttcaacatgaaaagcctcaaaaagtttaccgtcatgcacctttcctgaggcgtgttacacagggtcatccgtcagcagaataagtgagcacaccaagaaggaacacttgggaatccagaa

SEQ ID NO: 342196 - DNA, 372 bp, Homo sapiens
agatgatgcagatacacccagagctgcagagaaccccagacttcggctttgagatccagacttatggccttcaccaccgggaggagcagcgtgtggaaatggtgacctttgtctgccgagttcatgagtctagccctgcccagctggctgggctcacaccaggtggggcctgagcccaggacacccaggtctgggaaggggatatgaccttactcccaagcaaagggggtgagcaatctctcctgaaatcaattcctcttccttttccttctttgagaaggccagaaagaagaatggatagaatctgggctttggatctaggcaaatttgccatgtactgtgtgatcttgcacagccccatctacaaaatga

SEQ ID NO: 342197 - DNA, 1421 bp, Homo sapiens
cagagaaccatgaggagttggaggagggagttcaggagtattccctggagttactacccacccttctcccctttctggctaaggtaggaggctggtattctagcatgccccatggagcaaatctaacccccttgtctgcctggcaggggacaccatcgccagcgtcaatggcctgaatgtggaaggcatccggcatcgagagattgtggacatcattaaggcgtcaggcaatgttctcaggtatgtctgggagccgaggtgcctgaattcctgagctcagcctcttggtatttcctcagcctgtggctcactcaggctttgattctccaacctcagactggaaactctatatgggacatcaattcggaaggcagaactggaggctcgtctgcagtacctgaagcaaaccctgtatgagaagtggggagagtacaggtccctaatggtgcaggagcagcggctggtgcatggtgagtagatcccggggtgtgaggggccacttgttctgctacagacaccccatctgcgcttccccctcagaactggcgggttctagtaaagaacggtttactagtaaacctccacagtaaagcaaggtttgttgagctactactactttgggtactgccgcagccacatttctggttattctcacactagccctctgcaggtaagtaacagatagtgtcatcttcactttacagaggggaacaccagggctcaaagagtttgtgtcaattatttccgaggcccgtttgtgctaagcggcccccataaggatctgagtgataattcctgatttgcgggtgagggaagtagggtctcaggtttgtgcctggccagggccacagagatggtcagcaggacggagcggggacgccccgcccatgccctccgaccctttgcagaggccaccacggtccaggcctgacccgccccctacctctcccgtctctgcgcaggcctggtggtgaaggaccccagcatctacgacacgctggagtcggtgcgctcctgcctctacggcgcgggcctgctcccgggctcgctgcccttcgggcctctgctcgccgtgcccgggcgtccccgcggaggcgcccgacgggccaggggcgacgccgacgacgccgtctaccacacgtgcttcttcggggactccgagccgccggcgctgccgcccccgccgcccccggcccgcgccttcggcccgggccccgccgagacccctgccgtggggccgggccctgggccgcgggccgcgctgagccgcagcgccagtgtgcggtgcgcgggccctggcgggggcggaggcgggggcgcgccgggcgcgctctggactgaggctcgcgagcaggccctatgcggccccggcctgcgcaaaaccaagtaccgcagcttccgccggcggctgctcaagttca

SEQ ID NO: 342198 - DNA, 1446 bp, Homo sapiens
ggaggctccaggctgtggctgaatttcgggccttagctagtcagaaagtgctgacgttggagaaggaggataaccagaccttcggctttgagatccagacttatggccttcaccaccgggaggagcagcgtgtggaaatggtgacctttgtctgccgagttcatgagtctagccctgcccagctggctgggctcacaccaggtggggcctgagcccaggacacccaggtctgggaaggggatatgaccttactcccaagcaaagggggggacaccatcgccagcgtcaatggcctgaatgtggaaggcatccggcatcgagagattgtggacatcattaaggcgtcaggcaatgttctcagactggaaactctatatgggacatcaattcggaaggcagaactggaggctcgtctgcagtacctgaagcaaaccctgtatgagaagtggggagagtacaggtccctaatggtgcaggagcagcggctggtgcatggtgagtagatcccggggtgtgaggggccacttgttctgctacagacaccccatctgcgcttccccctcagaactggcgggttctagtaaagaacggtttactagtaaacctccacagtaaagcaaggtttgttgagctactactactttgggtactgccgcagccacatttctggttattctcacactagccctctgcaggtaagtaacagatagtgtcatcttcactttacagaggggaacaccagggctcaaagagtttgtgtcaattatttccgaggcccgtttgtgctaagcggcccccataaggatctgagtgataattcctgatttgcgggtgagggaagtagggtctcaggtttgtgcctggccagggccacagagatggtcagcaggacggagcggggacgccccgcccatgccctccgaccctttgcagaggccaccacggtccaggcctgacccgccccctacctctcccgtctctgcgcaggcctggtggtgaaggaccccagcatctacgacacgctggagtcggtgcgctcctgcctctacggcgcgggcctgctcccgggctcgctgcccttcgggcctctgctcgccgtgcccgggcgtccccgcggaggcgcccgacgggccaggggcgacgccgacgacgccgtctaccacacgtgcttcttcggggactccgagccgccggcgctgccgcccccgccgcccccggcccgcgccttcggcccgggccccgccgagacccctgccgtggggccgggccctgggccgcgggccgcgctgagccgcagcgccagtgtgcggtgcgcgggccctggcgggggcggaggcgggggcgcgccgggcgcgctctggactgaggctcgcgagcaggccctatgcggccccggcctgcgcaaaaccaagtaccgcagcttccgccggcggctgctcaagttca

SEQ ID NO: 342199 - DNA, 954 bp, Homo sapiens
ggaggctccaggctgtggctgaatttcgggccttagctagtcagaaagtgctgacgttggagaaggaggataaccagaccttcggctttgagatccagacttatggccttcaccaccgggaggagcagcgtgtggaaatggtgacctttgtctgccgagttcatgagtctagccctgcccagctggctgggctcacaccaggtggggcctgagcccaggacacccaggtctgggaaggggatatgaccttactcccaagcaaagggggggacaccatcgccagcgtcaatggcctgaatgtggaaggcatccggcatcgagagattgtggacatcattaaggcgtcaggcaatgttctcagactggaaactctatatgggacatcaattcggaaggcagaactggaggctcgtctgcagtacctgaagcaaaccctgtatgagaagtggggagagtacaggtccctaatggtgcaggagcagcggctggtgcatggcctggtggtgaaggaccccagcatctacgacacgctggagtcggtgcgctcctgcctctacggcgcgggcctgctcccgggctcgctgcccttcgggcctctgctcgccgtgcccgggcgtccccgcggaggcgcccgacgggccaggggcgacgccgacgacgccgtctaccacacgtgcttcttcggggactccgagccgccggcgctgccgcccccgccgcccccggcccgcgccttcggcccgggccccgccgagacccctgccgtggggccgggccctgggccgcgggccgcgctgagccgcagcgccagtgtgcggtgcgcgggccctggcgggggcggaggcgggggcgcgccgggcgcgctctggactgaggctcgcgagcaggccctatgcggccccggcctgcgcaaaaccaagtaccgcagcttccgccggcggctgctcaagttca

SEQ ID NO: 342200 - DNA, 1322 bp, Homo sapiens
caagaacaagaagcactgtgtctgtccgtcgaggtcaaggaatggtgctactgtgtggcccgccaccccattctggagagctgagttatgcctggatcttcaatgaatacccttcctatcaggataatcgccgctttgtttctcaagagactgggaatctgtatattgccaaagtagaaaaatcagatgttgggaattatacctgtgtggttaccaataccgtgacaaaccacaaggtcctggggccacctacaccactaatattgagaaatgatggagtgatgggtgaatatgagcccaaaatagaagtgcagttcccagaaacagttccgactgcaaaaggagcaacggtgaagctggaatgctttgctttaggaaatccagtaccaactattatctggcgaagagctgatggaaagccaatagcaaggaaagccagaagacacaagtcaaatggaattcttgagatccctaattttcagcaggaggatgctggtttatatgaatgtgtagctgaaaattccagagggaaaaatgtagcaaggggacagctaactttctatgctcaacctaattggattcaaaaaataaatgatattcacgtggccatggaagaaaatgtcttttgggaatgtaaagcaaatggaaggcctaagcctacatacaagtggctaaaaaatggcgaacctctgctaactcgggatagaattcaaattgagcaaggaacactcaacataacaatagtgaacctctcagatgctggcatgtatcagtgtttggcagagaataaacatggagttatcttttccaacgcagagcttagtgttatagctgtaggtccagatttttcaagaacactcttgaaaagagtaactcttgtcaaagtgggaggtgaagttgtcattgagtgtaagccaaaagcgtctccaaaacctgtttacacctggaagaaaggaagggatatattaaaagaaaatgaaagtgtacatcaggggtttggtagtggctctgctcctctctaaggccagcctggtggaccaagatgctctggacgttgccattgcagaaggaaaagatccaaacatgcatgggttcttaaagcctctacttagaagtgcaacacttgcactttcactcacatttcattggccaaaacaggtcacatgttcctgcaactcagcagggaaatataatcttgctatgtgcctggaagaaaagagacaacctaatattttgaacagtattaatgactgcttacaactgctacagcttaaccattgttacaagctaattaaattacctttggggaaatagtaaaaaaa

SEQ ID NO: 342201 - DNA, 1409 bp, Homo sapiens
caagaacaagaagcactgtgtctgtccgtcgaggtcaaggaatggtgctactgtgtggcccgccaccccattctggagagctgagttatgcctggatcttcaatgaatacccttcctatcaggataatcgccgctttgtttctcaagagactgggaatctgtatattgccaaagtagaaaaatcagatgttgggaattatacctgtgtggttaccaataccgtgacaaaccacaaggtcctggggccacctacaccactaatattgagaaatgatggagtgatgggtgaatatgagcccaaaatagaagtgcagttcccagaaacagttccgactgcaaaaggagcaacggtgaagctggaatgctttgctttaggaaatccagtaccaactattatctggcgaagagctgatggaaagccaatagcaaggaaagccagaagacacaagtcaaatggaattcttgagatccctaattttcagcaggaggatgctggtttatatgaatgtgtagctgaaaattccagagggaaaaatgtagcaaggggacagctaactttctatgctcaacctaattggattcaaaaaataaatgatattcacgtggccatggaagaaaatgtcttttgggaatgtaaagcaaatggaaggcctaagcctacatacaagtggctaaaaaatggcgaacctctgctaactcgggatagaattcaaattgagcaaggaacactcaacataacaatagtgaacctctcagatgctggcatgtatcagtgtttggcagagaataaacatggagttatcttttccaacgcagagcttagtgttatagctgtaggtccagatttttcaagaacactcttgaaaagagtaactcttgtcaaagtgggaggtgaagttgtcattgagtgtaagccaaaagcgtctccaaaacctgtttacacctggaagaaaggaagggatatattaaaagaaaatgaaagaattaccatttctgaagatggaaacctcagaatcatcaacgttactaaatcagacgctgggagttatacctgtatagccactaaccattttggaactgctagcagtactggaaacttggtagtgaaagatccaacaagggtaatggtacccccttccagtatggatgtcactgttggagagagtattgttttaccgtgccaggtaacgcatgatcactcgctagacatcgtgtttacttggtcatttaatggacacctgatagactttgacagagatggggaccactttgaaagagttggagggcaggattcagctggtgatttgatgatccgaaacatccaactgaagcatgctgggaaatatgtctgcatggtccaaacaagtgtggacaggctatctgctgctgcagacctgattgtaagaggt

SEQ ID NO: 342202 - DNA, 1207 bp, Homo sapiens
caagaacaagaagcactgtgtctgtccgtcgaggtcaaggaatggtgctactgtgtggcccgccaccccattctggagagctgagttatgcctggatcttcaatgaatacccttcctatcaggataatcgccgctttgtttctcaagagactgggaatctgtatattgccaaagtagaaaaatcagatgttgggaattatacctgtgtggttaccaataccgtgacaaaccacaaggtcctggggccacctacaccactaatattgagaaatgatggagtgatgggtgaatatgagcccaaaatagaagtgcagttcccagaaacagttccgactgcaaaaggagcaacggtgaagctggaatgctttgctttaggaaatccagtaccaactattatctggcgaagagctgatggaaagccaatagcaaggaaagccagaagacacaagtcaaatggaattcttgagatccctaattttcagcaggaggatgctggtttatatgaatgtgtagctgaaaattccagagggaaaaatgtagcaaggggacagctaactttctatgctcaacctaattggattcaaaaaataaatgatattcacgtggccatggaagaaaatgtcttttgggaatgtaaagcaaatggaaggcctaagcctacatacaagtggctaaaaaatggcgaacctctgctaactcgggatagaattcaaattgagcaaggaacactcaacataacaatagtgaacctctcagatgctggcatgtatcagtgtttggcagagaataaacatggagttatcttttccaacgcagagcttagtgttatagctgtaggtccagatttttcaagaacactcttgaaaagagtaactcttgtcaaagtgggaggtgaagttgtcattgagtgtaagccaaaagcgtctccaaaacctgtttacacctggaagaaaggaagggatatattaaaagaaaatgaaagaattaccatttctgaagatggaaacctcagaatcatcaacgttactaaatcagacgctgggagttatacctgtatagccactaaccattttggaactgctagcagtactggaaacttggtagtgaaagaattacatccaggctgtattcaatccatatctacatctgtatcttaactgtgtatgtatctgttctcagatctgtaaataaatatccttatcacaaa

SEQ ID NO: 342203 - DNA, 280 bp, Homo sapiens
aggaatcaacaattttgtcactatgaaaaatattttggaaaatgaattgggggcggggcatgtttggttgagattattaagggctgtggaatttttacaagtttttgagacacaatggaacactcgtctttctggaggagtatggcaatgctcacttgcatctattttagaatgtttaccaaggacctattatgtgtcaaacgtacctatgggaaaataagatgaccacatcaatcaaacatgatttttcttagaagatagtgctaaggatatggttttt

SEQ ID NO: 342204 - DNA, 337 bp, Homo sapiens
aatataaaggatggtgtgaaaagggaagacattggagacgaaagattattaaggactgttaaaatgttccaggtgggagtcttaaactttggcagtggttattggaaaggatgggttagaaccaaaggatattttagaatacagattttgaaaaactcgagaatttggaaaagaacgcagtcacaaatgaccaaggattgtagcctgagtggttgaaaagggttgtgtcggtaatggaactagagatcaaaaaaggagcagcagataagaatttggaacgggcagctgtatttgtctacaaataaagacaacactacactgagctcaagattaaaat

SEQ ID NO: 342205 - DNA, 574 bp, Homo sapiens
  misc_feature (427)..(427): n is a, c, g, or t
  misc_feature (446)..(446): n is a, c, g, or t
tctacaagccactggcaattcctccttccaaatgttctaactggtggtgatctacatatctttccagatactacaggttacccactcctgccactcacgtgggaggctatttcttttacccttctgtagagcttaggatacttcacccagccacctggagctggaaatggactctaaaaagctcaaaaagtgcaaatctgccaatttttcacttgagttccagaacaaagattttatgcgcacagtttgaccctgccagtcttagtttcactaagcattttaaacatccaaattcaacctgtccttcaaaaccacatgcaattttaaaaagcaaattgtctaatgcgcaatcccatggcaattctttcgattcctttttccatctcttgtatttgcctatttcttttttttttttttttggactgangttatgattctgcacctanaaaacccagagacagccaggcacgggggtccatgcctgtgagcccagcactttgagaggccgaggcatgcggatcacctgaggccccccaaagtgcggggatacaggcgtgaaccacagggcccaacc

SEQ ID NO: 342206 - DNA, 620 bp, Homo sapiens
tctacaagccactggcaattcctccttccaaatgttctaactggtggtgatctacatatctttccagatactacaggttacccactcctgccactcacgtgggaggctatttcttttacccttctgtagagcttaggatacttcacccagccacctggagctggaaatggactctaaaaagctcaaaaagtgcaaatctgccaatttttcacttgagttccagaacaaagattttatgcgcacagtttgaccctgccagtcttagtttcactaagcattttaaacatccaaattcaacctgtccttcaaaaccacatgcaattttaaaaagcaaattgtctaatgcgcaatcccatggcaattctttcgattcctttttccatctcttgtatttgcctatttcttttttttttgagacaggctctgactctgtcacccaggctggagtacagtggcatgatcagggctcacggcagcctcaacctgccaggatcaagcaatcttcccacctcagcctcccaagtagctggaactacaggcacacaccacgatgtctggctaattttcgtttatttttttgtagagacggggtctcacaatgttgcccaggctggtttcga

SEQ ID NO: 342207 - DNA, 328 bp, Homo sapiens
ctttgtgcctcactcttctcttacacctggggagtcaagtctggatcctctgctccatatttatttagcaaataaaacactgatctcaaacagcaacggaacctgtgtacttgaggtgttttttgaaaactaatcagaagaggaatgcttatctcccaagaaaattgaaaccatctgtaaaagaatcttggctgtgctgtgttttgattagattgaagcttggtgtaaagagaaaacacaaaagaccgcagaatatttacaacatttgaattcctgtttctccatcaaagcacattgtcatcaaagctactttgggtatagaaaaaag

SEQ ID NO: 342208 - DNA, 244 bp, Homo sapiens
ttattaaaaatttgtaactatctgaaaactgattactatggaaatgaacactgtatggcctacctaacattagctttctaagcttattgtttatgagaaaatatagtggctgaaatcatccgagtgccaggaaactcactgctgagctattatttctgagaaaaatttataagaactgacatgcttttgtcattatttgtttggtgtgagattccttgagttctgaaggagagagtgctatttt

SEQ ID NO: 342209 - DNA, 435 bp, Homo sapiens
agctgggaatacaatcttcaggcaaatgactggaaagcctccttcaggcccctaacatctcccagcagtaagtatgagcactaagtgtgtgcattcagccacactaggatacagcagagctgcatgtaccccaggactcagccagtttcctacaggagcatagaagaaagtaccactaaaggagagcaaggagaaggaagaggaagagggcagtgattggcaaggcttgaggcatgaagaaagtgcactttcactgttgcagtagtcttagaaaacaaatatttctgcatggtgacacggttcttactagaaccccagaacatctccatggtatgacctaccacatttcctccccaccaaaataataataataataaggctacacagtatctggaatttcttgctcattaaaatctgattactaccacactcaaa

SEQ ID NO: 342210 - DNA, 446 bp, Homo sapiens
tcttggtaaattcctttactgcccacaacaccagccccagctagtcacacccacaagaaagcagatgtcacaggaagtagcaagtaagctaggccaaaccagagctaaagaggtaacaaaatcataagggaaaatttggaaaatgtcacgttagccttgtgtgcccatctgaagaacttcctgaggttctcctgctctaaccagggacttttaaacctcagttttgtctttcctctcttgcagcatgaagaaagtgcactttcactgttgcagtagtcttagaaaacaaatatttctgcatggtgacacggttcttactagaaccccagaacatctccatggtatgacctaccacatttcctccccaccaaaataataataataataaggctacacagtatctggaatttcttgctcattaaaatctgattactaccacactcaaa

SEQ ID NO: 342211 - DNA, 347 bp, Homo sapiens
agctgggaatacaatcttcaggcaaatgactggaaagcctccttcaggcccctaacatctcccagcagagcatagaagaaagtaccactaaaggagagcaaggagaaggaagaggaagagggcagtgattggcaaggcttgaggcatgaagaaagtgcactttcactgttgcagtagtcttagaaaacaaatatttctgcatggtgacacggttcttactagaaccccagaacatctccatggtatgacctaccacatttcctccccaccaaaataataataataataaggctacacagtatctggaatttcttgctcattaaaatctgattactaccacactcaaa

SEQ ID NO: 342212 - DNA, 256 bp, Homo sapiens
ccttcattcattcattcattcattctaccaacacattttcactgagcatctgctccatgccaggcaacagattaggttctaaggattcagaaacaatgcaatggacatgactcttgccctcatggacataataggccctcccctctaactccagttgagctctatcaacttcaggtatgttaaccatttttttttttttttttttttttttttttttttttttttttttttttttttttttttttttttttttttt

SEQ ID NO: 342213 - DNA, 488 bp, Homo sapiens
aactagtgatgtctttgaatatgaatctactactatgtcccaaggtaacatctcaaaggttattttgtttagttttaagaaaatgacttctatattcttccccactcctcctattcacatcactggagatacaaatactgcttatccagccatgataatctataaaacatttattttttatcttccaattcatccagtttttctgaagcttattgattggggtgtaaagctggtgactaatatcaaagatatactgtaaaccattttgattacaaatagttaacatccaggatagtatatatgattgttacttaaaattaaaattatcttagcaaggatgaaaatcccttagtaaaaaataaatatgtattagttcagctaaccctattcaattagatcattaattaattttccagttgattttgaatttaatgttggaaacataaaatattggagtggagggatctctttttcatcatccagcctgg

SEQ ID NO: 342214 - DNA, 357 bp, Homo sapiens
aggcatccgccaccacgcccggctaatttttttgtatttttagtagagacggtttcaccgtcttagccaggatggtctcgatctcctgacctcgtgatccgcccgcctgggcctcccaaagtgctgggattacaggtgtgagccaccgtacccggccatagagcagcctcttccttttcctgttgggtctctgctcagatgtcatgtcagagaggcagacctctggggcggtctatctgagggaatgcacccatctcccttcctctgaccagttagttaccttgcttattctttcaaagctcttaccaccacctgaagtcatctatctggtttggttattttattgtttagtagcag

SEQ ID NO: 342215 - DNA, 425 bp, Homo sapiens
ggagagggagagggagagaagattttcttataaaaccattgcacagaagtgtaacttagcctttccttacaatttttatcaccaactaagcaataatgcaaaacataaaacaaaacaataacaaaacagtgtttggttcatttattcattcaacagactatactaagctaggcagtgtgggtttgataattaataaaacttgtattagttgtccacataatgattacaggcaatgcaggcaacagcaacatgcaattaaataaacaattaacgtcaaagaatagagcttttagaggcgtatagcagtgacatctgactcaaaatgagattgtgcaccaaatgaagcagtgcaaagaagagatcctgaggatggatctaatgtgatctagtaagctggcacatctttgattctgtcatttagtgag

SEQ ID NO: 342216 - DNA, 250 bp, Homo sapiens
agaataataatgtaaatccaaaattagtgtaaaaaattcagggtaaaatagtcaacctgtttgggctttctgtactcctgttcccattcattctaacaaatttttaactatttagccaaatgtgttcatttttgtttgataacaagttatttctctctgttatggctacttgcagttgtcttgtttcttcatcataagggcatttaatagttttctgcaaatgtgctcatctaagaacatgatgccaacc

SEQ ID NO: 342217 - DNA, 2480 bp, Homo sapiens
ctgtcctgccgtcctacctgcaggacaggtgtctcccaggcgtgctagcctcccccgagctccgttcttacccgtatgcattttctgtggcccggcctctgacttcggattccaagctggtatctctggaggtgaacaggctcccctgcacttccccatccggtagcaccaccacccagcctgcacccgatggggtccctgggcctttggcagatacctcccttgttactgcttctgccaaggtgcttccaactccacagcctctgctgccagcccccagtgggagctcagccccaccgcaccccgccaagatgcccagtggcaccgagcagcaaacagaagggacttccgttaccttctctcctcttaagtcaccgccacagctggaacgagagatggcctctccacctgagtgcagcgagatgccccttgatctgtcctccaagtccaaccgccagaagcttccattgccgaaccagcgcaagacaccccccatgcctgtgttgacccccgtgcacaccagcagcaaggccctcctctccacagtcctgtctaggtctcagcgcacaacccaggctgccggtggcaatgtcacctcctgcctgggctccacttcctcgccctttgtcatctttcccgagatcgtgaggaatggggacccgagcacctgggtgaagaactcaactgcactgatcagcaccattcctggcacctacgtgggagtggccaacccagtgcctgcatccctgctgctgaacaaagaccccaacctgggcctcaaccgtgacccccgccatctccccaagcaggagcccatctccatcattgatcaaggagagcctaagggcactggtgccacgtgtggcaaaaagggcagccaggctggtgctgagggacagccaagcacagtgaaacgatatactccagcccgcattgcccctgggctgccagggtgccaaaccaaggaactctctttgtggaaacccacggggccggcaaatatttatccccggtgttcagtcaatgggaaacctaccagcacccaggtcctgcctgttggctggtccccgtaccaccaggcgtctctgctttccattggcatttccagtgccgggcagctgacccccagtcagggggcgcccatcaggcccaccagcgttgtttcggagttttctggtgtgccatctctcagctccagcgaagccgtgcacggacttcctgaggggcaaccacggcctgggggctccttcgttccagagcaggaccctgttacaaagaacaaaacttgccggattgctgccaagccttatgaagaacaagtcaatcctgtcctcttgaccctcagccctcagactgggaccctggcactgtctgttcagcctagcggtggggacattcgaatgaatcaggggcctgaggaatcagagagccacctctgctctgacagcactcctaagatggaaggcccccagggggcttgtggcctgaagctggcaggagacacgaagcctaagaaccaagtgctggccacctacatgtcccatgagctggtcctggccaccccccagaacctgcctaagatgcctgagctgcctttgctacctcacgacagccaccccaaggaacttatattggacgtggttccgagcagcaggaggggctccagcacagagcgcccacagcttggaagccaggtggatctggggcgagtgaaaatggagaaggtggatggtgatgtggtcttcaatttagccacctgcttccgggctgatggcctcccagtggctccccagaggggccaagctgaagttcgggctaaggccgggcaggctcgagtgaaacaggaaagcgtaggggtctttgcttgcaagaacaagtggcagccagatgatgtgacggaatctctgccgcccaagaagatgaagtgcggcaaagagaaggacagtgaagagcagcagctccagccacaagccaaggccgtggtccggagttcccacagacccaagtgccggaagctgcccagtgacccccaggaatccaccaagaaaagccccaggggggcttcagattcaggaaaagagcacaatggagtcaggggaaagcacaagcaccggaagccgacaaagccggagtcccagtctccaggaaaacgagccgacagccacgaggaaggttccttggaaaagaaagcaaagagcagtttccgtgactttattcctgtggttctgagcacccgcacgcgcagtcagtctgatttaaaggcccgtaagcagaagacttcctcctcccaaagtttggagcaccgcctcaggaacaggaaccttctcttgcccaacaaagtccaggggatctcggattcaccaaacggtttcctcccaaataacctggaagagccagcctgccttgaaaattcagaaaagccatcaggaaaacgaaagtgcaagaccaagcacatggcaaccgtctcagaagaggcaaag

SEQ ID NO: 342218 - DNA, 887 bp, Homo sapiens
cacacacacacaccgctctccccctcactctttcgctcgccgcggctgctgccagtgtgtggctctgtctctcctccgctttgctgagccctcccttcttcctctcagttcctagagtccgaccgccgccgccgccgagagagaggagaaggagggggagtggccacagcaggtcctatctggtggtgagtggctgtcatgatctctacagcaccgctctacagcggcgtgcacaactggaccagttctgaccggattcgcatgtgtggcatcaacgaggagagaagagcacctctttctgatgaggagtcaacgacaggcgactgccagcactttggatctcaggagttttgtgtcagcagcagtttttccaaggtggagctcacggcagttggaagtggcagcaatgcccggggggcagacccagatggcagtgctacagaaaaacttgggcacaagtcagaagacaagcctgacgatccccagccaaaaatggactacgctgggaacgtggcagaggctgagggcctcttggtgcccctgagcagcccaggagacgggctcaagcttcccgcatctgacagcgccgaggccagcaacagcagggccgactgctcctggactccactcaacacccaaatgagcaaacaggttgactgctcacccgccggagtaaaggctttggactctcggcaaggtgttggagagaagaatactttcattttggcaactctgggaactggagtccctgtggaggggaccctgcccctggttaccactaacttcagtcctctgccagcccctatctgtccccctgctcccggttcggcctctgtgccccactctgttccagatgcattccaggttcccctctccgtccctgcccc

SEQ ID NO: 342219 - DNA, 1070 bp, Homo sapiens
gggactgagtggtaagcaactccgagtgttagacggtgatcgggcggcgattccgggaaaagcgaggaaagacacagtctgcgattgtgccgcaccccccacccacctcttagcatctggattctgctctcgtagtgggggccgcggaccctccccgccacagtccttttactctccagcactcccaccgccttcccccttcttcagccatctgactctcctagggggtcggcgtggcgaaggacggctagccttggagggaaagtagccaccagtccaactcgggtcgcccccaccattatttcggtgagggggcaacgctaagaaggggatactgggggagtggccacagcaggtcctatctggtggtgagtggctgtcatgatctctacagcaccgctctacagcggcgtgcacaactggaccagttctgaccggattcgcatgtgtggcatcaacgaggagagaagagcacctctttctgatgaggagtcaacgacaggcgactgccagcactttggatctcaggagttttgtgtcagcagcagtttttccaaggtggagctcacggcagttggaagtggcagcaatgcccggggggcagacccagatggcagtgctacagaaaaacttgggcacaagtcagaagacaagcctgacgatccccagccaaaaatggactacgctgggaacgtggcagaggctgagggcctcttggtgcccctgagcagcccaggagacgggctcaagcttcccgcatctgacagcgccgaggccagcaacagcagggccgactgctcctggactccactcaacacccaaatgagcaaacaggttgactgctcacccgccggagtaaaggctttggactctcggcaaggtgttggagagaagaatactttcattttggcaactctgggaactggagtccctgtggaggggaccctgcccctggttaccactaacttcagtcctctgccagcccctatctgtccccctgctcccggttcggcctctgtgccccactctgttccagatgcattccaggttcccctctccgtccctgcccc

SEQ ID NO: 342220 - DNA, 759 bp, Homo sapiens
ccatgttggccatgctgggctcgatctcctgacctcaggtgatccacccacctcggcctcccaaagtgctgggattacaggcgtgagccaccatgcccagcagaactttgttgaggtgcagcagcctcagagtcctatgggcagtggggcctcctactttcctactttctggcacaccatcacattgatactgtgcactgccttttctggtatcagcaaaagcgaccaaactctcagtttttaaaaaccacctggaaacactcattgtctacaagagacacatatgtgatggccacgtaaggggagtgaataaatgtaacccagattaaccacagggtaaacacaaactctttctcaatctttcccccgagcctcacaggtgggctttctggtctttaagctttgattgtaacatttctgccttctgtccccaaaccacacatcactccaggttccttggaaaagaaagcaaagagcagtttccgtgactttattcctgtggttctgagcacccgcacgcgcagtcagtctgatttaaaggcccgtaagcagaagacttcctcctcccaaagtttggagcaccgcctcaggaacaggaaccttctcttgcccaacaaagtccaggggatctcggattcaccaaacggtttcctcccaaataacctggaagagccagcctgccttgaaaattcagaaaagccatcaggaaaacgaaagtgcaagaccaagcacatggcaaccgtctcagaagaggcaaag

SEQ ID NO: 342221 - DNA, 958 bp, Homo sapiens
cacacacacacaccgctctccccctcactctttcgctcgccgcggctgctgccagtgtgtggctctgtctctcctccgctttgctgagccctcccttcttcctctcagttcctagagtccgaccgccgccgccgccgagagagaggagaaggagggggagtggccacagcaggtcctatctggtggtgagtggctgtcatgatctctacagcaccgctctacagcggcgtgcacaactggaccagttctgaccggattcgcatgtgtggcatcaacgaggagagaagagcacctctttctgatgaggagtcaacgacaggcgactgccagcactttggatctcaggagttttgtgtcagcagcagtttttccaagtgccggaagctgcccagtgacccccaggaatccaccaagaaaagccccaggggggcttcagattcaggaaaagagcacaatggagtcaggggaaagcacaagcaccggaagccgacaaagccggagtcccagtctccaggaaaacgagccgacagccacgaggaaggttccttggaaaagaaagcaaagagcagtttccgtgactttattcctgtggttctgagcacccgcacgcgcagtcagtctggaagcatctgtagctcctttgctggcatggcagacagtgacatgggaagccaggaagtcttccccacagaagaagaagaggaggtaacccccaccccagctaagcgtcgaaaggtgagaaagacccaacgggacacccagtatcgcagccaccatgcccaggacaagtctctgctgagccagggccgaaggcacctgtggcgagcccgagaaatgccctggaggacagaggctgcccggcaaatgtgggacaccaatgaggaggaggaggaagaagaggaggagggcctgctgaagaggaagaaacgaagacggcagaagagccgaaaatatcaga

SEQ ID NO: 342222 - DNA, 653 bp, Homo sapiens
ctcaaatcctgggcctcatgtcccttctctggttgtatcttccatgctagaagagcacctctttctgatgaggagtcaacgacaggcgactgccagcactttggatctcaggagttttgtgtcagcagcagtttttccaaggtggagctcacggcagttggaagtggcagcaatgcccggggggcagacccagatggcagtgctacagaaaaacttgggcacaagtcagaagacaagcctgacgatccccagccaaaaatggactacgctgggaacgtggcagaggctgagggcctcttggtgcccctgagcagcccaggagacgggctcaagcttcccgcatctgacagcgccgaggccagcaacagcagggccgactgctcctggactccactcaacacccaaatgagcaaacaggttgactgctcacccgccggagtaaaggctttggactctcggcaaggtgttggagagaagaatactttcattttggcaactctgggaactggagtccctgtggaggggaccctgcccctggttaccactaacttcagtcctctgccagcccctatctgtccccctgctcccggttcggcctctgtgccccactctgttccagatgcattccaggttcccctctccgtccctgcccc

SEQ ID NO: 342223 - DNA, 294 bp, Homo sapiens
gacacaaatacataaatatcattaattacaagatgcacaattttgttatatgccactgagaaagagaaattatccaaacaaaggagtctaatagaagcccctaacttaaaggcaggaaaggaaagagctctatctcagagtcaggttaaacaggaagtaagctcttcataaagaacaacaaggaagatttcgttcctctaccttgacaacgggagaaagaagaaaacaaattctctcctgagaatttgatcagaagctaatcatcacacagacttggggtatgaattcacacaa

SEQ ID NO: 342224 - DNA, 520 bp, Homo sapiens
ctgctcctaccagttctgggctggacacttcctgagtttctctctagagagagggcctcacccaacatccccttgtatagactacttacgggaagattttctcaaggagaaaatatatcagtcacaactaagttccctactcttgtgaaggaaaatattctacccaatgggcaaaggatattccaccctgaccacaatgcttttataagcatagggtagaggagttccttcaacacgtaatttatttattaattacaaagtagatttttatcaagggagaggggttctgctgagataccagaatggttaagagcctagctgtagagatgacttccagcccctccatttacctgctgtgtgactgcaggcaaggtacttaacattccttatctgtaaaatcatcatcatattcttattcccatctcattgggtttttgggaggatctaatgtgattcttcatctaaagagcttactacagtgtttgcacaggctaagtactcagtaagtcttagctgtcag

SEQ ID NO: 342225 - DNA, 776 bp, Homo sapiens
  misc_feature (712)..(712): n is a, c, g, or t
  misc_feature (766)..(766): n is a, c, g, or t
  misc_feature (769)..(769): n is a, c, g, or t
tggcttaaatgataaagggcttgcaaatccaaaaaggtttagagccatcaaatacagctccagcttcatttctctacttttctctcaactcagcccaattttatgtcaggctaactccctcatgataccaagatggctaccagtaaaaatggaagcaatcactcttttgtttgcctctagacggagatagctgttggtgccccctgaaccttgaaactaaagcctcagctgaggtgagactggaccattttaggaatatacttgcctttgactcaaattatgtcatgactggtttacattcatccctaagtaattatgttgctgagactcaaatctatcaaagcctacccttggagctgagtgaagattatcctacataatacccaaggcttctcaactggtggggagggaagatgagtgttgaagagaaagctcaagattttccaagctttcttggcatctgtgctacaatgcatttgttctcagatatttccttccatgatccaacttccctcttgcagtttccctgtgcaggttccagccttccatcaaatccacctcaattcttccctcccctctgaagtctgctctgacttcttgaccttcacccatcactcagtgctctgaactcatttacttattatacttaacacaaaaacttgagaaaaaaagaaagctgcagactgggattacagatgggagccactgtgancagctttacccattatttcttagtaaaattttattacagaattggatttcttanagngctggac

SEQ ID NO: 342226 - DNA, 150 bp, Homo sapiens
gttcgcagttaactccaagagaagaaatatgctgcaaagacaccctccctacttcctgtatgtggcacagaccccttctagggaattccagcagaaagggctgtgggtacttcagtttcccttctaagtgggaacggtcacgttagccca

SEQ ID NO: 342227 - DNA, 933 bp, Homo sapiens
gagatctgaatgtattcttggttccaaatcaatcttgtcactcctcggaaagcaatgcaagataataagtagtattcacctgattgctttcctgctccgagacagctggtgacgcatgtcttcctgataaccaggagtttcagatctaaggcagggataaagggaaactggaagctctcggaatctaaatgtgacagtcgatggctgaggagagggtcagaaggaatagaatctgtgacacgtatgagaaaggaacaaaatttatctgctctggttgcaatgattagatgtctctttgtctggctttccttgcagtgggtgactgatcgtacccgccagctggctaatgtcataattaacaaagttgctactacatctgcaaagtttaatcgaaaaatttgccagtgatatgatggccttgtcacagagatcacaagggacacggagttgacttttgctcaaggtggaacgacagagctgtgtaggcaagatgagaaattgcgaacttgttcggccaaaggaggctaataatgaaggggccgggaaggaggccagtgctaccagggttatctcacaacctcagatgctggataagtcgacggaggcagaatcgctttgggatgacattcagaaagcctggagtgattacttgcaagagaaaagcctacctattctttccaaggtgcaggaatattcccctgacctgctcatccagtggtccagtaatgaattactggagacctgccttagacaaagaatgcactcggagccccaacacacctaaagccatgctttgaaggatctgccaagctcacttttaatcatgagaaagaaattacccacacggagtcagcagaaaatgagaaagtagagctcgtgctgtgaataattccagcaagtgccaaggggctagttgaggaatggcttcatgag

SEQ ID NO: 342228 - DNA, 818 bp, Homo sapiens
attagaaggatgcttctgcattattaataaaatcacagggaaaatgcaacattttggatgtcacatctgataagttggcagttaaagaacagaaacagcaataagactgcgtggctacattttcccagtgccaccaactgggatttaagctgactaacattttgaaagcccagcccatttcattcacagcaggatggcagtgggtgactgatcgtacccgccagctggctaatgtcataattaacaaagttgctactacatctgcaaagtttaatcgaaaaatttgccagtgatatgatggccttgtcacagagatcacaagggacacggagttgacttttgctcaaggtggaacgacagagctgtgtaggcaagatgagaaattgcgaacttgttcggccaaaggaggctaataatgaaggggccgggaaggaggccagtgctaccagggttatctcacaacctcagatgctggataagtcgacggaggcagaatcgctttgggatgacattcagaaagcctggagtgattacttgcaagagaaaagcctacctattctttccaaggtgcaggaatattcccctgacctgctcatccagtggtccagtaatgaattactggagacctgccttagacaaagaatgcactcggagccccaacacacctaaagccatgctttgaaggatctgccaagctcacttttaatcatgagaaagaaattacccacacggagtcagcagaaaatgagaaagtagagctcgtgctgtgaataattccagcaagtgccaaggggctagttgaggaatggcttcatgag

SEQ ID NO: 342229 - DNA, 892 bp, Homo sapiens
  misc_feature (209)..(211): n is a, c, g, or t
gccactttaactagtctttgagcggcaaggatcgacaagcaaatcagtaaaaatctttagctgctgacagatacaaatcgtaaaaatgtatccggtctaatactctatacagttacgttaagaactcgcacaccaatgaacatgccatcgtacagcagaagcattatgatagtatggaattttcaacagtcatatagaccattgtttannnggaaaacttgttattggacacaatatgctcttggacgtcatgcacacagttcatcagttctactgccctctgcctgcggacttaagtgagtttaaagagatgacaacatgtgttttccccagactcttggatactaaattgatggccagcacacaaccttttaaggatatcattaacaacacatcccttgcggaattggaaaagcggttaaaagagacacctttcaaccctcctaaagttgaaagtgccgaaggttttccaagttatgacacagcctctgaacaactccacgaggcaggctacgatgcctacatcacagggctgtgcttcatctccatggccaattacctaggttcttttctcagccctccaaaaattcatgtgtctgccagatcaaaactcattgaacctttttttaacaaggttccgctggaaatctaggccttcctggaatgacactgctttatggtctttctgagctaccgatgagacaaggaatgatatgctcttggacaaatgttttctcctctgtaaaatggggataaaatgattcaccttctgtattggtccattttcatgctgctaataaagacacaactaagacagggcaatttacaaaataaagagagatcggccggttcttatattattatatgtgttgtcaaattgatactccagata

SEQ ID NO: 342230 - DNA, 450 bp, Homo sapiens
tgggtggatcacctgaggttaggagtttgagaccagcctgaccaacatggaaaaaccctgtctccactaaaaatacaaaattagctgggcatggtggcacatgtctgtgatccctggtcctcgggaggctgaggcaggacaatcacttgaatctgggaggtggaagtttcagtgaaccgagattgcgccattgcactccagcctgggcaacaagagtgaaactctgactccaaaaaaaaagaatacctttcacacttgttgaaccatgctgttaatttaaatctgttttggtctgaactttcaggcttggtctatgtgactatgaataataatacctctcttcttttcttcattaggttcttttctcagccctccaaaaattcatgtgtctgccagatcaaaactcattgaacctttttttaacaaggatagcttgccgagtcctcgaga

SEQ ID NO: 342231 - DNA, 500 bp, Homo sapiens
  misc_feature (481)..(481): n is a, c, g, or t
gtctggaaagcgagtttagtacaaagtcctcttggaatctgaactatacattctgaaaccccagtataatttcgaatgtagaagtcttttttctaaccttgactttctttagggaaaacttgttattggacacaatatgctcttggacgtcatgcacacagttcatcagttctactgccctctgcctgcggacttaagtgagtttaaagagatgacaacatgtgttttccccaggtaagctttctttgaggatttgtctttcttttaaaaaagtggtaggataacatttgtgagccaccgtgcctggcccagattttacttttaaaaaaacttttcaatcaaaattttactacttctgattcatgagggtggcataattaataaaaattcaagaaaaagatcagtgacatcaaagtcatttgtgctttcactttgctttctggatttaacattccaaaatgattctcaaatcatcctgttnttctcaggaatcagctagt

SEQ ID NO: 342232 - DNA, 3176 bp, Homo sapiens
tgcctcagctactgccgcagtcgccgcggaattcggcgagtagaaccgctgaggcgggcgcgggcccgggtggggccaaggttccggccactctgcagaatggagataatcaggagcaattttaagagtaatcttcacaaagtgtaccaggccatagaggaggccgacttcttcgccatcgatggggagttttcaggaatcagtgatggaccttcagtctctgcattaacaaatggttttgacactccagaagagaggtatcagaagcttaaaaaggtatataacgaagtcatttaacttctatgttttcccgaaacccttcaatagatcctcaccagatgtcaaatttgtttgtcagagctccagcattgactttctagcaagccagggatttgattttaataaagtttttcgaaatggaattccatatttaaatcaggaagaagaaagacagttaagagagcagtatgatgaaaaacgttcacaggcgaatggtgcaggagctctgtcctatgtatctcctaacacttcaaaatgtcctgtcacgattcctgaggatcaaaagaagtttattgaccaagtggtagagaaaatagaggatttattacaaagtgaagaaaacaagaacttggatttagagccatgtaccgggttccaaagaaaactaatttatcagactttgagctggaagtatccgaaaggcattcatgttgagactttagaaactgaaaagaaggagcgatatatagttatcagcaaagtagatgaagaagaacgcaaaagaagagagcagcagaaacatgccaaagaacaggaggagctgaatgatgctgtgggattttctagagtcattcacgccattgctaattcgggaaaacttgttattggacacaatatgctcttggacgtcatgcacacagttcatcagttctactgccctctgcctgcggacttaagtgagtttaaagagatgacaacatgtgttttccccagactcttggatactaaattgatggccagcacacaaccttttaaggatatcattaacaacacatcccttgcggaattggaaaagcggttaaaagagacacctttcaaccctcctaaagttgaaagtgccgaaggttttccaagttatgacacagcctctgaacaactccacgaggcaggctacgatgcctacatcacagggctgtgcttcatctccatggccaattacctaggttcttttctcagccctccaaaaattcatgtgtctgccagatcaaaactcattgaacctttttttaacaagctggagtgcaatggcgtgatctcggctcaccgcaacctctgcctctcgggttcaagtgattctcctgtctcagcctcccaagtagctgggattacagagtctcgctctgttgccaggctggagtccaatggcgcaatctcgactcactgcaacttctgcctcctgggttcaagtgattctcctgtctcggcctcccaagtagctgggattacaggttatttcttatgagggtcatggatatcccctatctaaacttggaaggaccagacttgcagcctaaacgtgatcatgttctccatgtgacattccccaaagaatggaaaaccagcgacctttaccagcttttcagtgcctttggtaacattcagatatcctggattgatgacacatcagcatttgtttcccttagccagcccgagcaagtaaagattgctgtcaataccagcaaatatgcagaaagctatcggatccaaacctatgctgaatatatggggagaaaacaggaagagaagcagatcaaaagaaagtggactgaagatagctggaaggaggctgacagcaaacggttaaacccccagtgcataccctacaccctgcagaatcactattaccgcaacaatagttttacagctcccagcacagtaggaaagagaaatttgagtcctagtcaagaggaagctggcctggaggacggagtgtcaggggagatttccgacactgagcttgagcagaccgattcctgtgcagagcccctctcagagggaaggaaaaaggccaagaaattaaaaagaatgaagaaggagctttctccagcaggaagcatctcgaagaacagccctgccacactctttgaagttcctgacacatggtaaccaagacctgagggcagcaaaccgctggtgctgtcgctgtgagcaagagccggctggcacatttggaagccgcactgtatttaacttaatcaaatgtggtatgggaggggttggaaaccaagttgtctcctgggggggagaaaacaggttttatttttgtggctgtggttttttcccctttttaatctaactgcctgttgacattgacactcatcacggttgtaggctgtcatgaatgtgtacgtgcttaaccagtgaattccgtgttgctcttgtgaggcctttcctgtcatgacccagtgtgcttaagaacctgcctgatggggagtgtcggctgtgaaatctgcaaaaagagctgacattccagctgctgtgatcatgaatttgggggtgtactgtcctgcctgtgcatcttctcgcactgagattttgaggcagttgcagccctcggttagtctcccagtggaaaaatcggttgtgcctccctgcttcccaccatagctgcctgaaaacatgacgctctcaagcttgtccttccttcaggaagatgtccactcatgcccacccatgagagggcttgccgtatgccctggcctttgggcatatttatgtagagttcctttctcctaagacgtgagtttctcatgggggatgtacgagtaaaaaggttaacttctgttcttatgcgtggcgctgtgttcactttccagagtctctgttcgtttgtttggatggcggtctcggggtacggcagcgtgtgtgcgtacgtgtctgtgtgtgtgtgtgtgtgtgtgtgtgtgtgtgtgtgtgtgtgaaatcgtgcaaatctacaacatgtcccagcccattctccgttgaaacagatcacagcaacgacaaacgctcatggcgctgctttgctccacccgcttcagatagatcattgttagatatttcacatttttgtatggtggaaataaaaatgaaaaatgtatttccaaaagatgaaaattaaaaacattttcatagga

SEQ ID NO: 342233 - DNA, 1587 bp, Homo sapiens
gcccaggaactctcaccatgatggctttaataacatggtggcacattgcctggtaacctgagggttggtggggtttgtttctacctactttaccgaaaagccctctatcagctgttggccaaccacatcagggtgggctgtcaataccagcaaatatgcagaaagctatcggatccaaacctatgctgaatatatggggagaaaacaggaagagaagcagatcaaaagaaagtggactgaagatagctggaaggaggctgacagcaaacggttaaacccccagtgcataccctacaccctgcagaatcactattaccgcaacaatagttttacagctcccagcacagtaggaaagagaaatttgagtcctagtcaagaggaagctggcctggaggacggagtgtcaggggagatttccgacactgagcttgagcagaccgattcctgtgcagagcccctctcagagggaaggaaaaaggccaagaaattaaaaagaatgaagaaggagctttctccagcaggaagcatctcgaagaacagccctgccacactctttgaagttcctgacacatggtaaccaagacctgagggcagcaaaccgctggtgctgtcgctgtgagcaagagccggctggcacatttggaagccgcactgtatttaacttaatcaaatgtggtatgggaggggttggaaaccaagttgtctcctgggggggagaaaacaggttttatttttgtggctgtggttttttcccctttttaatctaactgcctgttgacattgacactcatcacggttgtaggctgtcatgaatgtgtacgtgcttaaccagtgaattccgtgttgctcttgtgaggcctttcctgtcatgacccagtgtgcttaagaacctgcctgatggggagtgtcggctgtgaaatctgcaaaaagagctgacattccagctgctgtgatcatgaatttgggggtgtactgtcctgcctgtgcatcttctcgcactgagattttgaggcagttgcagccctcggttagtctcccagtggaaaaatcggttgtgcctccctgcttcccaccatagctgcctgaaaacatgacgctctcaagcttgtccttccttcaggaagatgtccactcatgcccacccatgagagggcttgccgtatgccctggcctttgggcatatttatgtagagttcctttctcctaagacgtgagtttctcatgggggatgtacgagtaaaaaggttaacttctgttcttatgcgtggcgctgtgttcactttccagagtctctgttcgtttgtttggatggcggtctcggggtacggcagcgtgtgtgcgtacgtgtctgtgtgtgtgtgtgtgtgtgtgtgtgtgtgtgtgtgtgtgtgaaatcgtgcaaatctacaacatgtcccagcccattctccgttgaaacagatcacagcaacgacaaacgctcatggcgctgctttgctccacccgcttcagatagatcattgttagatatttcacatttttgtatggtggaaataaaaatgaaaaatgtatttccaaaagatgaaaattaaaaacattttcatagga

SEQ ID NO: 342234 - DNA, 1131 bp, Homo sapiens
ggcaggctggtacggtccggaattttcgggatatcggaagtgaagaaggagctttctccagtctggaagcatctcgaagaacagccctgccacactctttgaagttcctgacacatggtaaccaagacctgagggcagcaaaccgctggtgctgtcgctgtgagcaagagccggctggcacatttggaagccgcactgtatttaacttaatcaaatgtggtatgggaggggttggaaaccaagttgtctcctgggggggagaaaacaggttttatttttgtggctgtggttttttcccctttttaatctaactgcctgttgacattgacactcatcacggttgtaggctgtcatgaatgtgtacgtgcttaaccagtgaattccgtgttgctcttgtgaggcctttcctgtcatgacccagtgtgcttaagaacctgcctgatggggagtgtcggctgtgaaatctgcaaaaagagctgacattccagctgctgtgatcatgaatttgggggtgtactgtcctgcctgtgcatcttctcgcactgagattttgaggcagttgcagccctcggttagtctcccagtggaaaaatcggttgtgcctccctgcttcccaccatagctgcctgaaaacatgacgctctcaagcttgtccttccttcaggaagatgtccactcatgcccacccatgagagggcttgccgtatgccctggcctttgggcatatttatgtagagttcctttctcctaagacgtgagtttctcatgggggatgtacgagtaaaaaggttaacttctgttcttatgcgtggcgctgtgttcactttccagagtctctgttcgtttgtttggatggcggtctcggggtacggcagcgtgtgtgcgtacgtgtctgtgtgtgtgtgtgtgtgtgtgtgtgtgtgtgtgtgtgtgtgaaatcgtgcaaatctacaacatgtcccagcccattctccgttgaaacagatcacagcaacgacaaacgctcatggcgctgctttgctccacccgcttcagatagatcattgttagatatttcacatttttgtatggtggaaataaaaatgaaaaatgtatttccaaaagatgaaaattaaaaacattttcatagga

SEQ ID NO: 342235 - DNA, 1129 bp, Homo sapiens
ctggatctccttggcaagggaatccgccctctcttttagagcctcgttcttcttctccagcaggaagcatctcgaagaacagccctgccacactctttgaagttcctgacacatggtaaccaagacctgagggcagcaaaccgctggtgctgtcgctgtgagcaagagccggctggcacatttggaagccgcactgtatttaacttaatcaaatgtggtatgggaggggttggaaaccaagttgtctcctgggggggagaaaacaggttttatttttgtggctgtggttttttcccctttttaatctaactgcctgttgacattgacactcatcacggttgtaggctgtcatgaatgtgtacgtgcttaaccagtgaattccgtgttgctcttgtgaggcctttcctgtcatgacccagtgtgcttaagaacctgcctgatggggagtgtcggctgtgaaatctgcaaaaagagctgacattccagctgctgtgatcatgaatttgggggtgtactgtcctgcctgtgcatcttctcgcactgagattttgaggcagttgcagccctcggttagtctcccagtggaaaaatcggttgtgcctccctgcttcccaccatagctgcctgaaaacatgacgctctcaagcttgtccttccttcaggaagatgtccactcatgcccacccatgagagggcttgccgtatgccctggcctttgggcatatttatgtagagttcctttctcctaagacgtgagtttctcatgggggatgtacgagtaaaaaggttaacttctgttcttatgcgtggcgctgtgttcactttccagagtctctgttcgtttgtttggatggcggtctcggggtacggcagcgtgtgtgcgtacgtgtctgtgtgtgtgtgtgtgtgtgtgtgtgtgtgtgtgtgtgtgtgaaatcgtgcaaatctacaacatgtcccagcccattctccgttgaaacagatcacagcaacgacaaacgctcatggcgctgctttgctccacccgcttcagatagatcattgttagatatttcacatttttgtatggtggaaataaaaatgaaaaatgtatttccaaaagatgaaaattaaaaacattttcatagga

SEQ ID NO: 342236 - DNA, 1552 bp, Homo sapiens
tgcctcagctactgccgcagtcgccgcggaattcggcgagtagaaccgctgaggcgggcgcgggcccgggtggggccaaggttccggccactctgcagaatggagataatcaggagcaattttaagagtaatcttcacaaagtgtaccaggccatagaggaggccgacttcttcgccatcgatggggagttttcaggaatcagtgatggaccttcagtctctgcattaacaaatggttttgacactccagaagagaggtatcagaagcttaaaaaggtatataacgaagtcatttaacttctatgttttcccgaaacccttcaatagatcctcaccagatgtcaaatttgtttgtcagagctccagcattgactttctagcaagccagggatttgattttaataaagtttttcgaaatggaattccatatttaaatcaggaagaagaaagacagttaagagagcagtatgatgaaaaacgttcacaggcgaatggtgcaggagctctgtcctatgtatctcctaacacttcaaaatgtcctgtcacgattcctgaggatcaaaagaagtttattgaccaagtggtagagaaaatagaggatttattacaaagtgaagaaaacaagaacttggatttagagccatgtaccgggttccaaagaaaactaatttatcagactttgagctggaagtatccgaaaggcattcatgttgagactttagaaactgaaaagaaggagcgatatatagttatcagcaaagtagatgaagaagaacgcaaaagaagagagcagcagaaacatgccaaagaacaggaggagctgaatgatgctgtgggattttctagagtcattcacgccattgctaattcgggaaaacttgttattggacacaatatgctcttggacgtcatgcacacagttcatcagttctactgccctctgcctgcggacttaagtgagtttaaagagatgacaacatgtgttttccccagactcttggatactaaattgatggccagcacacaaccttttaaggatatcattaacaacacatcccttgcggaattggaaaagcggttaaaagagacacctttcaaccctcctaaagttgaaagtgccgaaggttttccaagttatgacacagcctctgaacaactccacgaggcaggctacgatgcctacatcacagggctgtgcttcatctccatggccaattacctaggttcttttctcagccctccaaaaattcatgtgtctgccagatcaaaactcattgaacctttttttaacaaggttccgctggaaatctaggccttcctggaatgacactgctttatggtctttctgagctaccgatgagacaaggaatgatatgctcttggacaaatgttttctcctctgtaaaatggggataaaatgattcaccttctgtattggtccattttcatgctgctaataaagacacaactaagacagggcaatttacaaaataaagagagatcggccggttcttatattattatatgtgttgtcaaattgatactccagata

SEQ ID NO: 342237 - DNA, 469 bp, Homo sapiens
ggatatcccctatctaaacttggaaggaccagactgtaagtaaatttttattttcttattgcatctgtgcatttaagtgtgtggtctggaagggataacaggaaaatattactaaagaaaaagcttttttcactcaaaattgggctgtgattttgtggttgatatgaatagtatgcttaagttaatgggactcttgggcattcattagtcatttcttcatttatgttttccagtttatgcatgaaatgaattttagaagcatgtatcttctctatatatttcattttcactcagaattctgatttcatcattttctataagtatttataatagatttttaagatatgctagctgtcagttatcttggtaaaatttctgttttccagttacttgagtatgtgtatatttgaatttagtaggttgatttctgttttgttttgttttgttttatttaaaaaacgtggaaggt

SEQ ID NO: 342238 - DNA, 3029 bp, Homo sapiens
tgcctcagctactgccgcagtcgccgcggaattcggcgagtagaaccgctgaggcgggcgcgggcccgggtggggccaaggttccggccactctgcagaatggagataatcaggagcaattttaagagtaatcttcacaaagtgtaccaggccatagaggaggccgacttcttcgccatcgatggggagttttcaggaatcagtgatggaccttcagtctctgcattaacaaatggttttgacactccagaagagaggtatcagaagcttaaaaagcattccatggactttttgctatttcagtttggcctttgcacttttaagtatgactacacagattcaaagtatataacgaagtcatttaacttctatgttttcccgaaacccttcaatagatcctcaccagatgtcaaatttgtttgtcagagctccagcattgactttctagcaagccagggatttgattttaataaagtttttcgaaatggaattccatatttaaatcaggaagaagaaagacagttaagagagcagtatgatgaaaaacgttcacaggcgaatggtgcaggagctctgtcctatgtatctcctaacacttcaaaatgtcctgtcacgattcctgaggatcaaaagaagtttattgaccaagtggtagagaaaatagaggatttattacaaagtgaagaaaacaagaacttggatttagagccatgtaccgggttccaaagaaaactaatttatcagactttgagctggaagtatccgaaaggcattcatgttgagactttagaaactgaaaagaaggagcgatatatagttatcagcaaagtagatgaagaagaacgcaaaagaagagagcagcagaaacatgccaaagaacaggaggagctgaatgatgctgtgggattttctagagtcattcacgccattgctaattcgggaaaacttgttattggacacaatatgctcttggacgtcatgcacacagttcatcagttctactgccctctgcctgcggacttaagtgagtttaaagagatgacaacatgtgttttccccagactcttggatactaaattgatggccagcacacaaccttttaaggatatcattaacaacacatcccttgcggaattggaaaagcggttaaaagagacacctttcaaccctcctaaagttgaaagtgccgaaggttttccaagttatgacacagcctctgaacaactccacgaggcaggctacgatgcctacatcacagggctgtgcttcatctccatggccaattacctaggttcttttctcagccctccaaaaattcatgtgtctgccagatcaaaactcattgaacctttttttaacaagttatttcttatgagggtcatggatatcccctatctaaacttggaaggaccagacttgcagcctaaacgtgatcatgttctccatgtgacattccccaaagaatggaaaaccagcgacctttaccagcttttcagtgcctttggtaacattcagatatcctggattgatgacacatcagcatttgtttcccttagccagcccgagcaagtaaagattgctgtcaataccagcaaatatgcagaaagctatcggatccaaacctatgctgaatatatggggagaaaacaggaagagaagcagatcaaaagaaagtggactgaagatagctggaaggaggctgacagcaaacggttaaacccccagtgcataccctacaccctgcagaatcactattaccgcaacaatagttttacagctcccagcacagtaggaaagagaaatttgagtcctagtcaagaggaagctggcctggaggacggagtgtcaggggagatttccgacactgagcttgagcagaccgattcctgtgcagagcccctctcagagggaaggaaaaaggccaagaaattaaaaagaatgaagaaggagctttctccagcaggaagcatctcgaagaacagccctgccacactctttgaagttcctgacacatggtaaccaagacctgagggcagcaaaccgctggtgctgtcgctgtgagcaagagccggctggcacatttggaagccgcactgtatttaacttaatcaaatgtggtatgggaggggttggaaaccaagttgtctcctgggggggagaaaacaggttttatttttgtggctgtggttttttcccctttttaatctaactgcctgttgacattgacactcatcacggttgtaggctgtcatgaatgtgtacgtgcttaaccagtgaattccgtgttgctcttgtgaggcctttcctgtcatgacccagtgtgcttaagaacctgcctgatggggagtgtcggctgtgaaatctgcaaaaagagctgacattccagctgctgtgatcatgaatttgggggtgtactgtcctgcctgtgcatcttctcgcactgagattttgaggcagttgcagccctcggttagtctcccagtggaaaaatcggttgtgcctccctgcttcccaccatagctgcctgaaaacatgacgctctcaagcttgtccttccttcaggaagatgtccactcatgcccacccatgagagggcttgccgtatgccctggcctttgggcatatttatgtagagttcctttctcctaagacgtgagtttctcatgggggatgtacgagtaaaaaggttaacttctgttcttatgcgtggcgctgtgttcactttccagagtctctgttcgtttgtttggatggcggtctcggggtacggcagcgtgtgtgcgtacgtgtctgtgtgtgtgtgtgtgtgtgtgtgtgtgtgtgtgtgtgtgtgaaatcgtgcaaatctacaacatgtcccagcccattctccgttgaaacagatcacagcaacgacaaacgctcatggcgctgctttgctccacccgcttcagatagatcattgttagatatttcacatttttgtatggtggaaataaaaatgaaaaatgtatttccaaaagatgaaaattaaaaacattttcatagga

SEQ ID NO: 342239 - DNA, 2961 bp, Homo sapiens
tgcctcagctactgccgcagtcgccgcggaattcggcgagtagaaccgctgaggcgggcgcgggcccgggtggggccaaggttccggccactctgcagaatggagataatcaggagcaattttaagagtaatcttcacaaagtgtaccaggccatagaggaggccgacttcttcgccatcgatggggagttttcaggaatcagtgatggaccttcagtctctgcattaacaaatggttttgacactccagaagagaggtatcagaagcttaaaaaggtatataacgaagtcatttaacttctatgttttcccgaaacccttcaatagatcctcaccagatgtcaaatttgtttgtcagagctccagcattgactttctagcaagccagggatttgattttaataaagtttttcgaaatggaattccatatttaaatcaggaagaagaaagacagttaagagagcagtatgatgaaaaacgttcacaggcgaatggtgcaggagctctgtcctatgtatctcctaacacttcaaaatgtcctgtcacgattcctgaggatcaaaagaagtttattgaccaagtggtagagaaaatagaggatttattacaaagtgaagaaaacaagaacttggatttagagccatgtaccgggttccaaagaaaactaatttatcagactttgagctggaagtatccgaaaggcattcatgttgagactttagaaactgaaaagaaggagcgatatatagttatcagcaaagtagatgaagaagaacgcaaaagaagagagcagcagaaacatgccaaagaacaggaggagctgaatgatgctgtgggattttctagagtcattcacgccattgctaattcgggaaaacttgttattggacacaatatgctcttggacgtcatgcacacagttcatcagttctactgccctctgcctgcggacttaagtgagtttaaagagatgacaacatgtgttttccccagactcttggatactaaattgatggccagcacacaaccttttaaggatatcattaacaacacatcccttgcggaattggaaaagcggttaaaagagacacctttcaaccctcctaaagttgaaagtgccgaaggttttccaagttatgacacagcctctgaacaactccacgaggcaggctacgatgcctacatcacagggctgtgcttcatctccatggccaattacctaggttcttttctcagccctccaaaaattcatgtgtctgccagatcaaaactcattgaacctttttttaacaagttatttcttatgagggtcatggatatcccctatctaaacttggaaggaccagacttgcagcctaaacgtgatcatgttctccatgtgacattccccaaagaatggaaaaccagcgacctttaccagcttttcagtgcctttggtaacattcagatatcctggattgatgacacatcagcatttgtttcccttagccagcccgagcaagtaaagattgctgtcaataccagcaaatatgcagaaagctatcggatccaaacctatgctgaatatatggggagaaaacaggaagagaagcagatcaaaagaaagtggactgaagatagctggaaggaggctgacagcaaacggttaaacccccagtgcataccctacaccctgcagaatcactattaccgcaacaatagttttacagctcccagcacagtaggaaagagaaatttgagtcctagtcaagaggaagctggcctggaggacggagtgtcaggggagatttccgacactgagcttgagcagaccgattcctgtgcagagcccctctcagagggaaggaaaaaggccaagaaattaaaaagaatgaagaaggagctttctccagcaggaagcatctcgaagaacagccctgccacactctttgaagttcctgacacatggtaaccaagacctgagggcagcaaaccgctggtgctgtcgctgtgagcaagagccggctggcacatttggaagccgcactgtatttaacttaatcaaatgtggtatgggaggggttggaaaccaagttgtctcctgggggggagaaaacaggttttatttttgtggctgtggttttttcccctttttaatctaactgcctgttgacattgacactcatcacggttgtaggctgtcatgaatgtgtacgtgcttaaccagtgaattccgtgttgctcttgtgaggcctttcctgtcatgacccagtgtgcttaagaacctgcctgatggggagtgtcggctgtgaaatctgcaaaaagagctgacattccagctgctgtgatcatgaatttgggggtgtactgtcctgcctgtgcatcttctcgcactgagattttgaggcagttgcagccctcggttagtctcccagtggaaaaatcggttgtgcctccctgcttcccaccatagctgcctgaaaacatgacgctctcaagcttgtccttccttcaggaagatgtccactcatgcccacccatgagagggcttgccgtatgccctggcctttgggcatatttatgtagagttcctttctcctaagacgtgagtttctcatgggggatgtacgagtaaaaaggttaacttctgttcttatgcgtggcgctgtgttcactttccagagtctctgttcgtttgtttggatggcggtctcggggtacggcagcgtgtgtgcgtacgtgtctgtgtgtgtgtgtgtgtgtgtgtgtgtgtgtgtgtgtgtgtgaaatcgtgcaaatctacaacatgtcccagcccattctccgttgaaacagatcacagcaacgacaaacgctcatggcgctgctttgctccacccgcttcagatagatcattgttagatatttcacatttttgtatggtggaaataaaaatgaaaaatgtatttccaaaagatgaaaattaaaaacattttcatagga

SEQ ID NO: 342240 - DNA, 2094 bp, Homo sapiens
tgggtggatcacctgaggttaggagtttgagaccagcctgaccaacatggaaaaaccctgtctccactaaaaatacaaaattagctgggcatggtggcacatgtctgtgatccctggtcctcgggaggctgaggcaggacaatcacttgaatctgggaggtggaagtttcagtgaaccgagattgcgccattgcactccagcctgggcaacaagagtgaaactctgactccaaaaaaaaagaatacctttcacacttgttgaaccatgctgttaatttaaatctgttttggtctgaactttcaggcttggtctatgtgactatgaataataatacctctcttcttttcttcattaggttcttttctcagccctccaaaaattcatgtgtctgccagatcaaaactcattgaacctttttttaacaagttatttcttatgagggtcatggatatcccctatctaaacttggaaggaccagacttgcagcctaaacgtgatcatgttctccatgtgacattccccaaagaatggaaaaccagcgacctttaccagcttttcagtgcctttggtaacattcagatatcctggattgatgacacatcagcatttgtttcccttagccagcccgagcaagtaaagattgctgtcaataccagcaaatatgcagaaagctatcggatccaaacctatgctgaatatatggggagaaaacaggaagagaagcagatcaaaagaaagtggactgaagatagctggaaggaggctgacagcaaacggttaaacccccagtgcataccctacaccctgcagaatcactattaccgcaacaatagttttacagctcccagcacagtaggaaagagaaatttgagtcctagtcaagaggaagctggcctggaggacggagtgtcaggggagatttccgacactgagcttgagcagaccgattcctgtgcagagcccctctcagagggaaggaaaaaggccaagaaattaaaaagaatgaagaaggagctttctccagcaggaagcatctcgaagaacagccctgccacactctttgaagttcctgacacatggtaaccaagacctgagggcagcaaaccgctggtgctgtcgctgtgagcaagagccggctggcacatttggaagccgcactgtatttaacttaatcaaatgtggtatgggaggggttggaaaccaagttgtctcctgggggggagaaaacaggttttatttttgtggctgtggttttttcccctttttaatctaactgcctgttgacattgacactcatcacggttgtaggctgtcatgaatgtgtacgtgcttaaccagtgaattccgtgttgctcttgtgaggcctttcctgtcatgacccagtgtgcttaagaacctgcctgatggggagtgtcggctgtgaaatctgcaaaaagagctgacattccagctgctgtgatcatgaatttgggggtgtactgtcctgcctgtgcatcttctcgcactgagattttgaggcagttgcagccctcggttagtctcccagtggaaaaatcggttgtgcctccctgcttcccaccatagctgcctgaaaacatgacgctctcaagcttgtccttccttcaggaagatgtccactcatgcccacccatgagagggcttgccgtatgccctggcctttgggcatatttatgtagagttcctttctcctaagacgtgagtttctcatgggggatgtacgagtaaaaaggttaacttctgttcttatgcgtggcgctgtgttcactttccagagtctctgttcgtttgtttggatggcggtctcggggtacggcagcgtgtgtgcgtacgtgtctgtgtgtgtgtgtgtgtgtgtgtgtgtgtgtgtgtgtgtgtgaaatcgtgcaaatctacaacatgtcccagcccattctccgttgaaacagatcacagcaacgacaaacgctcatggcgctgctttgctccacccgcttcagatagatcattgttagatatttcacatttttgtatggtggaaataaaaatgaaaaatgtatttccaaaagatgaaaattaaaaacattttcatagga

SEQ ID NO: 342241 - DNA, 2612 bp, Homo sapiens
tgcctcagctactgccgcagtcgccgcggaattcggcgagtagaaccgctgaggcgggcgcgggcccgggtggggccaaggttccggccactctgcagaatggagataatcaggagcaattttaagagtaatcttcacaaagtgtaccaggccatagaggaggccgacttcttcgccatcgatggggagttttcaggaatcagtgatggaccttcagtctctgcattaacaaatggttttgacactccagaagagaggtatcagaagcttaaaaaggtatataacgaagtcatttaacttctatgttttcccgaaacccttcaatagatcctcaccagatgtcaaatttgtttgtcagagctccagcattgactttctagcaagccagggatttgattttaataaagtttttcgaaatggaattccatatttaaatcaggaagaagaaagacagttaagagagcagtatgatgaaaaacgttcacaggcgaatggtgcaggagctctgtcctatgtatctcctaacacttcaaaatgtcctgtcacgattcctgaggatcaaaagaagtttattgaccaagtggtagagaaaatagaggatttattacaaagtgaagaaaacaagaacttggatttagagccatgtaccgggttccaaagaaaactaatttatcagactttgagctggaagtatccgaaaggcattcatgttgagactttagaaactgaaaagaaggagcgatatatagttatcagcaaagtagatgaagaagaacgcaaaagaagagagcagcagaaacatgccaaagaacaggaggagctgaatgatgctgtgggattttctagagtcattcacgccattgctaattcgggaaaacttgttattggacacaatatgctcttggacgtcatgcacacagttcatcagttctactgccctctgcctgcggacttaagtgagtttaaagagatgacaacatgtgttttccccagactcttggatactaaattgatggccagcacacaaccttttaaggatatcattaacaacacatcccttgcggaattggaaaagcggttaaaagagacacctttcaaccctcctaaagttgaaagtgccgaaggttttccaagttatgacacagcctctgaacaactccacgaggcaggctacgatgcctacatcacagggctgtgcttcatctccatggccaattacctaggttcttttctcagccctccaaaaattcatgtgtctgccagatcaaaactcattgaacctttttttaacaagttatttcttatgagggtcatggatatcccctatctaaacttggaaggaccagacttgcagcctaaacgtgatcatgttctccatgtgacattccccaaagaatggaaaaccagcgacctttaccagcttttcagtgcctttggtaacattcagatatcctggattgatgacacatcagcatttgtttcccttagccagcccgagcaagtaaagattgctgtcaataccagcaaatatgcagaaagctatcggatccaaacctatgctgaatatatggggagaaaacaggaattcctgacacatggtaaccaagacctgagggcagcaaaccgctggtgctgtcgctgtgagcaagagccggctggcacatttggaagccgcactgtatttaacttaatcaaatgtggtatgggaggggttggaaaccaagttgtctcctgggggggagaaaacaggttttatttttgtggctgtggttttttcccctttttaatctaactgcctgttgacattgacactcatcacggttgtaggctgtcatgaatgtgtacgtgcttaaccagtgaattccgtgttgctcttgtgaggcctttcctgtcatgacccagtgtgcttaagaacctgcctgatggggagtgtcggctgtgaaatctgcaaaaagagctgacattccagctgctgtgatcatgaatttgggggtgtactgtcctgcctgtgcatcttctcgcactgagattttgaggcagttgcagccctcggttagtctcccagtggaaaaatcggttgtgcctccctgcttcccaccatagctgcctgaaaacatgacgctctcaagcttgtccttccttcaggaagatgtccactcatgcccacccatgagagggcttgccgtatgccctggcctttgggcatatttatgtagagttcctttctcctaagacgtgagtttctcatgggggatgtacgagtaaaaaggttaacttctgttcttatgcgtggcgctgtgttcactttccagagtctctgttcgtttgtttggatggcggtctcggggtacggcagcgtgtgtgcgtacgtgtctgtgtgtgtgtgtgtgtgtgtgtgtgtgtgtgtgtgtgtgtgaaatcgtgcaaatctacaacatgtcccagcccattctccgttgaaacagatcacagcaacgacaaacgctcatggcgctgctttgctccacccgcttcagatagatcattgttagatatttcacatttttgtatggtggaaataaaaatgaaaaatgtatttccaaaagatgaaaattaaaaacattttcatagga

SEQ ID NO: 342242 - DNA, 2897 bp, Homo sapiens
tgcctcagctactgccgcagtcgccgcggaattcggcgagtagaaccgctgaggcgggcgcgggcccgggtggggccaaggttccggccactctgcagaatggagataatcaggagcaattttaagagtaatcttcacaaagtgtaccaggccatagaggaggccgacttcttcgccatcgatggggagttttcaggaatcagtgatggaccttcagtctctgcattaacaaatggttttgacactccagaagagaggtatcagaagcttaaaaaggtatataacgaagtcatttaacttctatgttttcccgaaacccttcaatagatcctcaccagatgtcaaatttgtttgtcagagctccagcattgactttctagcaagccagggatttgattttaataaagtttttcgaaatggaattccatatttaaatcaggaagaagaaagacagttaagagagcagtatgatgaaaaacgttcacaggcgaatggtgcaggagctctgtcctatgtatctcctaacacttcaaaatgtcctgtcacgattcctgaggatcaaaagaagtttattgaccaagtggtagagaaaatagaggatttattacaaagtgaagaaaacaagaacttggatttagagccatgtaccgggttccaaagaaaactaatttatcagactttgagctggaagtatccgaaaggcattcatgttgagactttagaaactgaaaagaaggagcgatatatagttatcagcaaagtagatgaagaagaacgcaaaagaagagagcagcagaaacatgccaaagaacaggaggagctgaatgatgctgtgggattttctagagtcattcacgccattgctaattcgggaaaacttgttattggacacaatatgctcttggacgtcatgcacacagttcatcagttctactgccctctgcctgcggacttaagtgagtttaaagagatgacaacatgtgttttccccagactcttggatactaaattgatggccagcacacaaccttttaaggatatcattaacaacacatcccttgcggaattggaaaagcggttaaaagagacacctttcaaccctcctaaagttgaaagtgccgaaggttttccaagttatgacacagcctctgaacaactccacgaggcaggctacgatgcctacatcacagggctgtgcttcatctccatggccaattacctaggttcttttctcagccctccaaaaattcatgtgtctgccagatcaaaactcattgaacctttttttaacaagttatttcttatgagggtcatggatatcccctatctaaacttggaaggaccagacttgcagcctaaacgtgatcatgttctccatgtgacattccccaaagaatggaaaaccagcgacctttaccagcttttcagtgcctttggtaacattcagatatcctggattgatgacacatcagcatttgtttcccttagccagcccgagcaagtaaagattgctgtcaataccagcaaatatgcagaaagctatcggatccaaacctatgctgaatatatggggagaaaacaggaagagaagcagatcaaaagaaagtggactgaagatagctggaaggaggctgacagcaaacggttaaacccccagtgcataccctacaccctgcagaatcactattaccgcaacaatagttttacagctcccagcacagtaggaaagagaaatttgagtcctagtcaagaggaagctggcctggaggacggagtgtcaggggagatttccgacactgagcttgagcagaccgattcctgtgcagagcccctctcagagggaaggaaaaaggccaagaaattaaaaagaatgaagaaggagctttctccagcaggaagcatctcgaagaacagccctgccacactctttgaagttcctgacacatggtaaccaagacctgagggcagcaaaccgctggtgctgtcgctgtgagcaagagccggctggcacatttggaagccgcactgtatttaacttaatcaaatgtggtatgggaggggttggaaaccaagttgtctcctgggggggagaaaacaggttttatttttgtggctgtggttttttcccctttttaatctaactgcctgttgacattgacactcatcacggttgtaggctgtcatgaatgtgtacgtgcttaaccagtgaattccgtgttgctcttgtgaggcctttcctgtcatgacccagtgtgcttaagaacctgcctgatggggagtgtcggctgtgaaatctgcaaaaagagctgacattccagctgctgtgatcatgaatttgggggtgtactgtcctgcctgtgcatcttctcgcactgagattttgaggcagttgcagccctcggttagtctcccagtggaaaaatcggttgtgcctccctgcttcccaccatagctgcctgaaaacatgacgctctcaagcttgtccttccttcaggaagatgtccactcatgcccacccatgagagggcttgccgtatgccctggcctttgggcatatttatgtagagttcctttctcctaagacgtgagtttctcatgggggatgtacgagtaaaaaggttaacttctgttcttatgcgtggcgctgtgttcactttccagagtctctgttcgtttgtttggatggcggtctcggggtacggcagcgtgtgtgcgtacgtgtctgtgtgtgtgtgtgtgtgtgtgtgtgtgtgtgtgtgactgtgctaaaaaaattgcaagatctggcttctgcgacattgtggcagcccttggcttatcacaaggaccactatcgcttgatgcccctcggcagtggaaccgctccttatgcaacaaccgaggcccatccccttctg

SEQ ID NO: 342243 - DNA, 2635 bp, Homo sapiens
tgcctcagctactgccgcagtcgccgcggaattcggcgagtagaaccgctgaggcgggcgcgggcccgggtggggccaaggttccggccactctgcagaatggagataatcaggagcaattttaagagtaatcttcacaaagtgtaccaggccatagaggaggccgacttcttcgccatcgatggggagttttcaggaatcagtgatggaccttcagtctctgcattaacaaatggttttgacactccagaagagaggtatcagaagcttaaaaaggtatataacgaagtcatttaacttctatgttttcccgaaacccttcaatagatcctcaccagatgtcaaatttgtttgtcagagctccagcattgactttctagcaagccagggatttgattttaataaagtttttcgaaatggaattccatatttaaatcaggaagaagaaagacagttaagagagcagtatgatgaaaaacgttcacaggcgaatggtgcaggagctctgtcctatgtatctcctaacacttcaaaatgtcctgtcacgattcctgaggatcaaaagaagtttattgaccaagtggtagagaaaatagaggatttattacaaagtgaagaaaacaagaacttggatttagagccatgtaccgggttccaaagaaaactaatttatcagactttgagctggaagtatccgaaaggcattcatgttgagactttagaaactgaaaagaaggagcgatatatagttatcagcaaagtagatgaagaagaacgcaaaagaagagagcagcagaaacatgccaaagaacaggaggagctgaatgatgctgtgggattttctagagtcattcacgccattgctaattcgggaaaacttgttattggacacaatatgctcttggacgtcatgcacacagttcatcagttctactgccctctgcctgcggacttaagtgagtttaaagagatgacaacatgtgttttccccagactcttggatactaaattgatggccagcacacaaccttttaaggatatcattaacaacacatcccttgcggaattggaaaagcggttaaaagagacacctttcaaccctcctaaagttgaaagtgccgaaggttttccaagttatgacacagcctctgaacaactccacgaggcaggctacgatgcctacatcacagggctgtgcttcatctccatggccaattacctaggttcttttctcagccctccaaaaattcatgtgtctgccagatcaaaactcattgaacctttttttaacaagttatttcttatgagggtcatggatatcccctatctaaacttggaaggaccagacttgcagcctaaacgtgatcatgttctccatgtgacattccccaaagaatggaaaaccagcgacctttaccagcttttcagtgcctttggtaacattcagatatcctggattgatgacacatcagcatttgtttcccttagccagcccgagcaagtaaagattgctgtcaataccagcaaatatgcagaaagctatcggatccaaacctatgctgaatatatggggagaaaacaggaagagaagcagatcaaaagaaagtggactgaagatagctggaaggaggctgacagcaaacggttaaacccccagtgcataccctacaccctgcagaatcactattaccgcaacaatagttttacagctcccagcacagtaggaaagagaaatttgagtcctagtcaagaggaagctggcctggaggacggagtgtcaggggagatttccgacactgagcttgagcagaccgattcctgtgcagagcccctctcagagggaaggaaaaaggccaagaaattaaaaagaatgaagaaggagctttctccagcaggaagcatctcgaagaacagccctgccacactctttgaagttcctgacacatggtaaccaagacctgagggcagcaaaccgctggtgctgtcgctgtgagcaagagccggctggcacatttggaagccgcactgtatttaacttaatcaaatgtggtatgggaggggttggaaaccaagttgtctcctgggggggagaaaacaggttttatttttgtggctgtggttttttcccctttttaatctaactgcctgttgacattgacactcatcacggttgtaggctgtcatgaatgtgtacgtgcttaaccagtgaattccgtgttgctcttgtgaggcctttcctgtcatgacccagtgtgcttaagaacctgcctgatggggagtgtcggctgtgaaatctgcaaaaagagctgacattccagctgctgtgatcatgaatttgggggtgtactgtcctgcctgtgcatcttctcgcactgagattttgaggcagttgcagccctcggttaggtctacctggaccccttacgagtgcggcttcgaccctatatcccccgcccgcgtccctttctccataaaattcttcttagtagctattaccttcttattatttgatctagaaattgccctccttttacccctaccatgagccctacaaacaactaacctgccactaatagttaggtctacctgggttaggtctacctgagttaggtctaccttggttaggtctaccttg

SEQ ID NO: 342244 - DNA, 1264 bp, Homo sapiens
tgcctcagctactgccgcagtcgccgcggaattcggcgagtagaaccgctgaggcgggcgcgggcccgggtggggccaaggttccggccactctgcagaatggagataatcaggagcaattttaagagtaatcttcacaaagtgtaccaggccatagaggaggccgacttcttcgccatcgatggggagttttcaggaatcagtgatggaccttcagtctctgcattaacaaatggttttgacactccagaagagaggtatcagaagcttaaaaaggtatataacgaagtcatttaacttctatgttttcccgaaacccttcaatagatcctcaccagatgtcaaatttgtttgtcagagctccagcattgactttctagcaagccagggatttgattttaataaagtttttcgaaatggaattccatatttaaatcaggaagaagaaagacagttaagagagcagtatgatgaaaaacgttcacaggcgaatggtgcaggagctctgtcctatgtatctcctaacacttcaaaatgtcctgtcacgattcctgaggatcaaaagaagtttattgaccaagtggtagagaaaatagaggatttattacaaagtgaagaaaacaagaacttggatttagagccatgtaccgggttccaaagaaaactaatttatcagactttgagctggaagtatccgaaaggcattcatgttgagactttagaaactgaaaagaaggagcgatatatagttatcagcaaagtagatgaagaagaacgcaaaagaagagagcagcagaaacatgccaaagaacaggaggagctgaatgatgctgtgggattttctagagtcattcacgccattgctaattcgggaaaacttgttattggacacaatatgctcttggacgtcatgcacacagttcatcagttctactgccctctgcctgcggacttaagtgagtttaaagagatgacaacatgtgttttccccagactcttggatactaaattgatggccagcacacaaccttttaaggatatcattaacaacacatcccttgcggaattggaaaagcggttaaaagagacacctttcaaccctcctaaagttgaaagtgccgaaggttttccaagttatgacacagcctctgaacaactccacgaggcaggctacgatgcctacatcacagggctgtgcttcatctccatggccaattacctaggttcttttctcagacatctccagtccggtaccgagctcgat

SEQ ID NO: 342245 - DNA, 521 bp, Homo sapiens
gcggggctggcacccgggccgaggctctgattctggggggaggccgactccaccctggctggaggaactgggtgctcctgcccgctggcccctcgcgcgtgaggatctatctcaggtgtgtgcttcctgggagaccccttcccccgcctctagtattctagggggggagtggtccctttctgacccgggcgagtgttctgggactccagtcttggcggtaggtggtggcgggaaacgggaaagatttagaatttcttcccaccagcagaagatggattcgctcttctctagggtttcgttgtttatgttttggaggcggcatttgtaaaatagtaaagtggcaggacttttggggcgagggttggtaccccattgaaagttcatgcaaacttttagcttgtagatgcggctagtctgataaggattgttgctcccttccgaagcaagagtgagaacgagtctggaggagggctgaggcttctttgagaaactcagctgctggcgtgtgaccgtcctaggag

SEQ ID NO: 342246 - DNA, 6041 bp, Homo sapiens
ttttttttttttgggtggcggggggttgcaagtgggaagcctgctgttcagctgccggggctctccgcctccccccacctgtatgaggctgggtctggggaacctgtgctcagcattccaccccctggagcttgggcttggtcttccctgcgggtccctgcgctgacattcaggcggggagccaggaggcctggcgcgcctccagagcccgccgggggagccgggcgagggttctgggctctgacggcggggtcgcagggtcgcccgcctcctggacacgtctgtaggcctagggaagcctgccggccgggaggtacagagtaggagaagccagatcccagggcggacaacgagaagtcgtcaggctaagaaatggcatttcaaaaggcagtgaaagggacgattcttgttggaggaggtgctcttgcaactgttttaggactttctcagtttgctcattacagaaggaaacaaatgaacctggcctatgttaaagcagcagactgcatttcagaaccagttaacagggagcctccttccagagaagctcagctactgactttgcaaaacacatctgaatttgatatccttgttattggaggaggagcaacaggaagtggctgtgcgctagatgctgtcaccagaggactaaaaacagcccttgtagaaagagatgatttctcatcagggaccagcagcagaagcactaaattgatccatggtggtgtgagatatctgcagaaggccatcatgaagttggatattgagcagtataggatggtaaaagaagcccttcatgagcgtgccaacctgctagaaattgctccccatttatcagctccattgcctataatgcttccagtttacaagtggtggcagttaccttactactgggtaggaatcaagctgtatgatttggttgcaggaagcaattgcctaaaaagcagttatgtcctcagcaaatcaagagcccttgaacatttcccaatgctccagaaggacaaactggtaggagcaattgtctactatgacggacaacataacgatgcacggatgaaccttgccattgctctgactgctgccaggtatggggctgccacagccaattacatggaggtagtgagcttgctcaagaagacagacccccagacagggaaagtgcatgtgagcggcgcacggtgcaaggatgtcctcacagggcaggaatttgacgtgagagccaaatgtgttatcaatgccacgggacctttcacggactctgtgcgcaaaatggatgataaagacgcagcagctatctgccagccaagtgctggtgtccatattgtgatgcctggttattacagcccagagagcatgggacttcttgacccagcgaccagtgatgggcgagttattttcttcttaccctggcaaaagatgacgatcgctggcactactgatactccaactgatgttacacaccatccaattccttcagaagaagatatcaacttcattttgaatgaagtgcgtaattacctgagttgtgatgttgaagtgagaagaggggatgtcctggcagcatggagtggaatccgtcctcttgttacagaccccaaatctgcagatactcagtctatctcccgaaatcatgttgttgatatcagtgagagtggccttattactatagcaggtggaaagtggacaacttatcggtctatggcagaagataccataaatgctgctgtcaaaactcataatttaaaagcaggaccaagtagaacagttgggcttttccttcaagggggtaaagattggagccccacactctacattaggcttgtgcaggattatggacttgaaagcgaggtggcacagcatcttgccgccacctatggtgataaggcctttgaggtggccaaaatggcaagtgtgactggcaaaaggtggcctattgttggagtacgtcttgtgtcagaatttccatatattgaagcagaggtgaaatatgggattaaggagtatgcctgcactgctgtggatatgatttcacgtcgtactcgcctggcctttctaaatgtccaggcagcagaggaagccctacccaggattgttgaactgatgggcagggaactgaattgggatgattataagaagcaggaacaacttgaaacagccaggaagtttctatattatgaaatgggctataaatctcgatcagaacagttaacagatcgctctgaaattagcctactgccttcagacattgacaggtataagaagagatttcataagtttgatgcagaccagaaaggctttattaccattgttgatgttcagcgtgtattagagagtatcaatgtccaaatggatgaaaatacactccatgaaattctaaatgaagttgatttgaataaaaatggacaggttgaactcaatgaatttttgcagctgatgagtgctattcaaaaaggaagggtatctggaagccggcttgctatactaatgaaaactgcagaagagaacctcgacagaagagttccaattccagtggaccgtagttgtggaggattgtgagtctgggcagtaaatccacagccaacaaacatagaaacgacaaatcaccatgtaacaaccagagatgactgaaaccactctgaaataatgaatgtggatagctgccttttttaacactagaaaacattccaaaactttaaggtgttggtgtatttgccagctttatttgctgtactttatttgtatttgccattcagtctagcttttaagtatatttttttctttttctcattttcaatgcacattagttttgcatctgttttgtgacctgttagatgtgacacattctctttttgtttattcccttattctaaatgagttctaaaaacataatattttggcaaaaattgaaaaaagctggagacattttgtgacatgcatacagatagcatgtgttattaaaaagagttgcctattgaaatgatcgtgtttctggagaaattaagcttatagacagcatgtgttattaaaaagagttacctattgaaatgatagtgtttctggagatttctcagccccatcttcctccagcttgtctaccttcctcatgcaaacaatattccacatttttatatctagagcatgactggctaactggagagggaaggaaaagtttagatctggttactggagcaagtctcaaagagaaactctgaaagcttccagaatcacaggtataagataaggatagcattgacatttgctgggagttacagtgatagtttcatctcagcagttcatttttttcttcagtcactgctggttttctttgactattatagttgccaggaagatccttgctcttcttactttaaaaccagcatttaagtggcaatttggatgtaataggatgagaccaaatttatctaattattacagtagtaatacatttaagagttaaaaatgtgtttttatatatccacatatgataacaaaagattcaattcccaagcctaaattttgaagcatgtggtattgtcaaatctagcttaccatcttttttgggggtacttgcaaccatagtaaaggaagatggaatagactttagttaactttaattataattatatgttaaataaggcacataaccagtttccaaggtcatcatggttgcttaaagtctttccccttctgtactccatggaaatattctcagtaaaccaaaaacaaaaatggaaaaataatcaccaacccccatcccgacacacacacacagtccaaagcaaaagtcagtgtgtattgaatttaacaagtaatgcagtttgggatgcttttgctacattttggtggcattttaactagttatctgaatatttattaatcgtacttcctcttgtaaagttaactacttacttttttgttgttgtttttttaacatcaggttctgtatctaataggagatgtaacactttatttcatggcaggtttttattgcagagacttgaagtcttagttttttaaactggcacataaaacactttttgctgttatttttatttatgtcaatactgcagagtatctttatgccttattcaagtggattctgagcctgtatgtcacaatgtaaacactggaggttcactcacctacgcactcacccaccacctctgaaagaaacagaaactgcagagaaagacagcatcttagctcattttgtttttaaatgaggttttagacgcttgccacttcctaagggaaatcctaaaacagagcaagtgatgctcccaggtatcactgtgaacttttttctttcaaagtgtgaatttttacactggctttttcatttttttaaagtaattgaagcttgtggctttacaacttagtgttttttgctatccagataacaagtttcattgtttagaacccagtgacacttaataggtagataaattgtcctttaaaatatcccagatgatatacacaatatggtacatttgtgctctctctctctgtttttctctctttctctttctagttagatcaagataacgatgacttgtaccctccctgattctgttacagtagggcccgggcagatctgtgtttgttaaacaggccttgtttgtgcatgctttgctatgaatgaagttcctttaaggacaaagaaaagcacacttttcttcttttgagcatatctgcttttactttaaatctgctaatttctaaaatgtagagtccttcaccaatcccagagactcaatttggaaatgaactgatttcaagccgttactgtgaataaagcaccccagcattttgtataagctcttaattaaacctgtacagcttctttacctgatttaagaaagggagacaagcaataggggggaataagcttcttcaaaattcattccaagcacaaaagaaattttttccctttgcatataaacttgacatcagttgattctgttggggtcggggtgggtatgcagggattgccttttattatcaagtgatttatttcaagagcctttgaggggattcaggtgaaggaacccccatctgtgctggagagttggatactcctttaaatagcccccaccacagtcataacaataatgataatgctggattatttgttaagccaaggttgtctgcctcatatccatcatgctgtttgcaatattcttgctttcaatcaatttatactgagtgtaactttaggatttctgctattaaatgcatgctctctatcctgcttcagtttctggctttgctttgtctgtttcaaaatatgtagcttcctcttttgtacaacaaaaaactcattctcacttttactaaatatactgtaggagtcatcattgatgttatttttctcttatgtatctgtaaagatttttggcatatgaatgtaatattaaagtcaatgatgctataacttgcgatgtttgcatcatgtcaacctttttgaaggagtgaaaaagccctactatgtttttaaatagcaagtgtaagctcagtgctagagtggatatacacaccgcatgttttcatatgtggcacttttatgtatcatgttgggttattgttctagactggactgttaaatactatgtttgaggctgggttgtcatttttataactgtcttggtgttttatggccattatttattacttttgatacacagaatgagctgcatgcatttatagagcaataagaggatgtatttaatgtgccttgtttttaactgaataagaactggaagcatgaatcaataaaactgattaaaatggtctatttgctagcattttgatgttacttgcagtcagataactttgattactgttgaagtttaaaaaaagtttgaaaatatttttacaaactgtgtttttgatgacacaaaagtgaaatatctacagagatagatgtaattttataagactgccagaattatttgtattaatttgttgctgtagcctttagggcatgacttctgtatttgtgcaatcctattctacaattacattcatcctattacaactca

SEQ ID NO: 342247 - DNA, 5840 bp, Homo sapiens
  misc_feature (1)..(3): n is a, c, g, or t
nnnagtcacaacactcatatcctagggaccaccacactgctatgagtcaggcatgtgcgttgtttaaggctaagaaatggcatttcaaaaggcagtgaaagggacgattcttgttggaggaggtgctcttgcaactgttttaggactttctcagtttgctcattacagaaggaaacaaatgaacctggcctatgttaaagcagcagactgcatttcagaaccagttaacagggagcctccttccagagaagctcagctactgactttgcaaaacacatctgaatttgatatccttgttattggaggaggagcaacaggaagtggctgtgcgctagatgctgtcaccagagggtcagcggaatcgacttaagaaactgtaaaactttaagaagagaactacgcctgtgagatttactagactgattttgaaaaagactactgataagactaaaaacagcccttgtagaaagagatgatttctcatcagggaccagcagcagaagcactaaattgatccatggtggtgtgagatatctgcagaaggccatcatgaagttggatattgagcagtataggatggtaaaagaagcccttcatgagcgtgccaacctgctagaaattgctccccatttatcagctccattgcctataatgcttccagtttacaagtggtggcagttaccttactactgggtaggaatcaagctgtatgatttggttgcaggaagcaattgcctaaaaagcagttatgtcctcagcaaatcaagagcccttgaacatttcccaatgctccagaaggacaaactggtaggagcaattgtctactatgacggacaacataacgatgcacggatgaaccttgccattgctctgactgctgccaggtatggggctgccacagccaattacatggaggtagtgagcttgctcaagaagacagacccccagacagggaaagtgcatgtgagcggcgcacggtgcaaggatgtcctcacagggcaggaatttgacgtgagagccaaatgtgttatcaatgccacgggacctttcacggactctgtgcgcaaaatggatgataaagacgcagcagctatctgccagccaagtgctggtgtccatattgtgatgcctggttattacagcccagagagcatgggacttcttgacccagcgaccagtgatgggcgagttattttcttcttaccctggcaaaagatgacgatcgctggcactactgatactccaactgatgttacacaccatccaattccttcagaagaagatatcaacttcattttgaatgaagtgcgtaattacctgagttgtgatgttgaagtgagaagaggggatgtcctggcagcatggagtggaatccgtcctcttgttacagaccccaaatctgcagatactcagtctatctcccgaaatcatgttgttgatatcagtgagagtggccttattactatagcaggtggaaagtggacaacttatcggtctatggcagaagataccataaatgctgctgtcaaaactcataatttaaaagcaggaccaagtagaacagttgggcttttccttcaagggggtaaagattggagccccacactctacattaggcttgtgcaggattatggacttgaaagcgaggtggcacagcatcttgccgccacctatggtgataaggcctttgaggtggccaaaatggcaagtgtgactggcaaaaggtggcctattgttggagtacgtcttgtgtcagaatttccatatattgaagcagaggtgaaatatgggattaaggagtatgcctgcactgctgtggatatgatttcacgtcgtactcgcctggcctttctaaatgtccaggcagcagaggaagccctacccaggattgttgaactgatgggcagggaactgaattgggatgattataagaagcaggaacaacttgaaacagccaggaagtttctatattatgaaatgggctataaatctcgatcagaacagttaacagatcgctctgaaattagcctactgccttcagacattgacaggtataagaagagatttcataagtttgatgcagaccagaaaggctttattaccattgttgatgttcagcgtgtattagagagtatcaatgtccaaatggatgaaaatacactccatgaaattctaaatgaagttgatttgaataaaaatggacaggttgaactcaatgaatttttgcagctgatgagtgctattcaaaaaggaagggtatctggaagccggcttgctatactaatgaaaactgcagaagagaacctcgacagaagagttccaattccagtggaccgtagttgtggaggattgtgagtctgggcagtaaatccacagccaacaaacatagaaacgacaaatcaccatgtaacaaccagagatgactgaaaccactctgaaataatgaatgtggatagctgccttttttaacactagaaaacattccaaaactttaaggtgttggtgtatttgccagctttatttgctgtactttatttgtatttgccattcagtctagcttttaagtatatttttttctttttctcattttcaatgcacattagttttgcatctgttttgtgacctgttagatgtgacacattctctttttgtttattcccttattctaaatgagttctaaaaacataatattttggcaaaaattgaaaaaagctggagacattttgtgacatgcatacagatagcatgtgttattaaaaagagttgcctattgaaatgatcgtgtttctggagaaattaagcttatagacagcatgtgttattaaaaagagttacctattgaaatgatagtgtttctggagatttctcagccccatcttcctccagcttgtctaccttcctcatgcaaacaatattccacatttttatatctagagcatgactggctaactggagagggaaggaaaagtttagatctggttactggagcaagtctcaaagagaaactctgaaagcttccagaatcacaggtataagataaggatagcattgacatttgctgggagttacagtgatagtttcatctcagcagttcatttttttcttcagtcactgctggttttctttgactattatagttgccaggaagatccttgctcttcttactttaaaaccagcatttaagtggcaatttggatgtaataggatgagaccaaatttatctaattattacagtagtaatacatttaagagttaaaaatgtgtttttatatatccacatatgataacaaaagattcaattcccaagcctaaattttgaagcatgtggtattgtcaaatctagcttaccatcttttttgggggtacttgcaaccatagtaaaggaagatggaatagactttagttaactttaattataattatatgttaaataaggcacataaccagtttccaaggtcatcatggttgcttaaagtctttccccttctgtactccatggaaatattctcagtaaaccaaaaacaaaaatggaaaaataatcaccaacccccatcccgacacacacacacagtccaaagcaaaagtcagtgtgtattgaatttaacaagtaatgcagtttgggatgcttttgctacattttggtggcattttaactagttatctgaatatttattaatcgtacttcctcttgtaaagttaactacttacttttttgttgttgtttttttaacatcaggttctgtatctaataggagatgtaacactttatttcatggcaggtttttattgcagagacttgaagtcttagttttttaaactggcacataaaacactttttgctgttatttttatttatgtcaatactgcagagtatctttatgccttattcaagtggattctgagcctgtatgtcacaatgtaaacactggaggttcactcacctacgcactcacccaccacctctgaaagaaacagaaactgcagagaaagacagcatcttagctcattttgtttttaaatgaggttttagacgcttgccacttcctaagggaaatcctaaaacagagcaagtgatgctcccaggtatcactgtgaacttttttctttcaaagtgtgaatttttacactggctttttcatttttttaaagtaattgaagcttgtggctttacaacttagtgttttttgctatccagataacaagtttcattgtttagaacccagtgacacttaataggtagataaattgtcctttaaaatatcccagatgatatacacaatatggtacatttgtgctctctctctctgtttttctctctttctctttctagttagatcaagataacgatgacttgtaccctccctgattctgttacagtagggcccgggcagatctgtgtttgttaaacaggccttgtttgtgcatgctttgctatgaatgaagttcctttaaggacaaagaaaagcacacttttcttcttttgagcatatctgcttttactttaaatctgctaatttctaaaatgtagagtccttcaccaatcccagagactcaatttggaaatgaactgatttcaagccgttactgtgaataaagcaccccagcattttgtataagctcttaattaaacctgtacagcttctttacctgatttaagaaagggagacaagcaataggggggaataagcttcttcaaaattcattccaagcacaaaagaaattttttccctttgcatataaacttgacatcagttgattctgttggggtcggggtgggtatgcagggattgccttttattatcaagtgatttatttcaagagcctttgaggggattcaggtgaaggaacccccatctgtgctggagagttggatactcctttaaatagcccccaccacagtcataacaataatgataatgctggattatttgttaagccaaggttgtctgcctcatatccatcatgctgtttgcaatattcttgctttcaatcaatttatactgagtgtaactttaggatttctgctattaaatgcatgctctctatcctgcttcagtttctggctttgctttgtctgtttcaaaatatgtagcttcctcttttgtacaacaaaaaactcattctcacttttactaaatatactgtaggagtcatcattgatgttatttttctcttatgtatctgtaaagatttttggcatatgaatgtaatattaaagtcaatgatgctataacttgcgatgtttgcatcatgtcaacctttttgaaggagtgaaaaagccctactatgtttttaaatagcaagtgtaagctcagtgctagagtggatatacacaccgcatgttttcatatgtggcacttttatgtatcatgttgggttattgttctagactggactgttaaatactatgtttgaggctgggttgtcatttttataactgtcttggtgttttatggccattatttattacttttgatacacagaatgagctgcatgcatttatagagcaataagaggatgtatttaatgtgccttgtttttaactgaataagaactggaagcatgaatcaataaaactgattaaaatggtctatttgctagcattttgatgttacttgcagtcagataactttgattactgttgaagtttaaaaaaagtttgaaaatatttttacaaactgtgtttttgatgacacaaaagtgaaatatctacagagatagatgtaattttataagactgccagaattatttgtattaatttgttgctgtagcctttagggcatgacttctgtatttgtgcaatcctattctacaattacattcatcctattacaactca

SEQ ID NO: 342248 - DNA, 6125 bp, Homo sapiens
ttttttttttttgggtggcggggggttgcaagtgggaagcctgctgttcagctgccggggctctccgcctccccccacctgtatgaggctgggtctggggaacctgtgctcagcattccaccccctggagcttgggcttggtcttccctgcgggtccctgcgctgacattcaggcggggagccaggaggcctggcgcgcctccagagcccgccgggggagccgggcgagggttctgggctctgacggcggggtcgcagggtcgcccgcctcctggacacgtctgtaggcctagggaagcctgccggccgggaggtacagagtaggagaagccagatcccagggcggacaacgagaagtcgtcaggctaagaaatggcatttcaaaaggcagtgaaagggacgattcttgttggaggaggtgctcttgcaactgttttaggactttctcagtttgctcattacagaaggaaacaaatgaacctggcctatgttaaagcagcagactgcatttcagaaccagttaacagggagcctccttccagagaagctcagctactgactttgcaaaacacatctgaatttgatatccttgttattggaggaggagcaacaggaagtggctgtgcgctagatgctgtcaccagaggactaaaaacagcccttgtagaaagagatgatttctcatcagggaccagcagcagaagcactaaattgatccatggtggtgtgagatatctgcagaaggccatcatgaagttggatattgagcagtataggatggtaaaagaagcccttcatgagcgtgccaacctgctagaaattgctccccatttatcagctccattgcctataatgcttccagtttacaagtggtggcagttaccttactactgggtaggaatcaagctgtatgatttggttgcaggaagcaattgcctaaaaagcagttatgtcctcagcaaatcaagagcccttgaacatttcccaatgctccagaaggacaaactggtaggagcaattgtctactatgacggacaacataacgatgcacggatgaaccttgccattgctctgactgctgccaggtatggggctgccacagccaattacatggaggtagtgagcttgctcaagaagacagacccccagacagggaaagtgcatgtgagcggcgcacggtgcaaggatgtcctcacagggcaggaatttgacgtgagagccaaatgtgttatcaatgccacgggacctttcacggactctgtgcgcaaaatggatgataaagacgcagcagctatctgccagccaagtgctggtgtccatattgtgatgcctggttattacagcccagagagcatgggacttcttgacccagcgaccagtgatgggcgagttattttcttcttaccctggcaaaagatgacgatcgctggcactactgatactccaactgatgttacacaccatccaattccttcagaagaagatatcaacttcattttgaatgaagtgcgtaattacctgagttgtgatgttgaagtgagaagaggggatgtcctggcagcatggagtggaatccgtcctcttgttacagaccccaaatctgcagatactcagtctatctcccgaaatcatgttgttgatatcagtgagagtggccttattactatagcaggtggaaagtggacaacttatcggtctatggcagaagataccataaatgctgctgtcaaaactcataatttaaaagcaggaccaagtagaacagttgggcttttccttcaagggggtaaagattggagccccacactctacattaggcttgtgcaggattatggacttgaaagcgaggtggcacagcatcttgccgccacctatggtgataaggcctttgaggtggccaaaatggcaagtgtgactggcaaaaggtggcctattgttggagtacgtcttgtgtcagaatttccatatattgaagcagaggtgaaatatgggattaaggagtatgcctgcactgctgtggatatgatttcacgtcgtactcgcctggcctttctaaatgtccaggcagcagaggaagccctacccaggattgttgaactgatgggcagggaactgaattgggatgattataagaagcaggaacaacttgaaacagccaggaagtttctatattatgaaatgggctataaatctcgatcagaacagttaacagatcgctctgaaattagcctactgccttcagacattgacaggtacttataataagtgtctatctatctctctttttttttggcctatgtaagtatatttttccattatttaatcttgtgttccaggtataagaagagatttcataagtttgatgcagaccagaaaggctttattaccattgttgatgttcagcgtgtattagagagtatcaatgtccaaatggatgaaaatacactccatgaaattctaaatgaagttgatttgaataaaaatggacaggttgaactcaatgaatttttgcagctgatgagtgctattcaaaaaggaagggtatctggaagccggcttgctatactaatgaaaactgcagaagagaacctcgacagaagagttccaattccagtggaccgtagttgtggaggattgtgagtctgggcagtaaatccacagccaacaaacatagaaacgacaaatcaccatgtaacaaccagagatgactgaaaccactctgaaataatgaatgtggatagctgccttttttaacactagaaaacattccaaaactttaaggtgttggtgtatttgccagctttatttgctgtactttatttgtatttgccattcagtctagcttttaagtatatttttttctttttctcattttcaatgcacattagttttgcatctgttttgtgacctgttagatgtgacacattctctttttgtttattcccttattctaaatgagttctaaaaacataatattttggcaaaaattgaaaaaagctggagacattttgtgacatgcatacagatagcatgtgttattaaaaagagttgcctattgaaatgatcgtgtttctggagaaattaagcttatagacagcatgtgttattaaaaagagttacctattgaaatgatagtgtttctggagatttctcagccccatcttcctccagcttgtctaccttcctcatgcaaacaatattccacatttttatatctagagcatgactggctaactggagagggaaggaaaagtttagatctggttactggagcaagtctcaaagagaaactctgaaagcttccagaatcacaggtataagataaggatagcattgacatttgctgggagttacagtgatagtttcatctcagcagttcatttttttcttcagtcactgctggttttctttgactattatagttgccaggaagatccttgctcttcttactttaaaaccagcatttaagtggcaatttggatgtaataggatgagaccaaatttatctaattattacagtagtaatacatttaagagttaaaaatgtgtttttatatatccacatatgataacaaaagattcaattcccaagcctaaattttgaagcatgtggtattgtcaaatctagcttaccatcttttttgggggtacttgcaaccatagtaaaggaagatggaatagactttagttaactttaattataattatatgttaaataaggcacataaccagtttccaaggtcatcatggttgcttaaagtctttccccttctgtactccatggaaatattctcagtaaaccaaaaacaaaaatggaaaaataatcaccaacccccatcccgacacacacacacagtccaaagcaaaagtcagtgtgtattgaatttaacaagtaatgcagtttgggatgcttttgctacattttggtggcattttaactagttatctgaatatttattaatcgtacttcctcttgtaaagttaactacttacttttttgttgttgtttttttaacatcaggttctgtatctaataggagatgtaacactttatttcatggcaggtttttattgcagagacttgaagtcttagttttttaaactggcacataaaacactttttgctgttatttttatttatgtcaatactgcagagtatctttatgccttattcaagtggattctgagcctgtatgtcacaatgtaaacactggaggttcactcacctacgcactcacccaccacctctgaaagaaacagaaactgcagagaaagacagcatcttagctcattttgtttttaaatgaggttttagacgcttgccacttcctaagggaaatcctaaaacagagcaagtgatgctcccaggtatcactgtgaacttttttctttcaaagtgtgaatttttacactggctttttcatttttttaaagtaattgaagcttgtggctttacaacttagtgttttttgctatccagataacaagtttcattgtttagaacccagtgacacttaataggtagataaattgtcctttaaaatatcccagatgatatacacaatatggtacatttgtgctctctctctctgtttttctctctttctctttctagttagatcaagataacgatgacttgtaccctccctgattctgttacagtagggcccgggcagatctgtgtttgttaaacaggccttgtttgtgcatgctttgctatgaatgaagttcctttaaggacaaagaaaagcacacttttcttcttttgagcatatctgcttttactttaaatctgctaatttctaaaatgtagagtccttcaccaatcccagagactcaatttggaaatgaactgatttcaagccgttactgtgaataaagcaccccagcattttgtataagctcttaattaaacctgtacagcttctttacctgatttaagaaagggagacaagcaataggggggaataagcttcttcaaaattcattccaagcacaaaagaaattttttccctttgcatataaacttgacatcagttgattctgttggggtcggggtgggtatgcagggattgccttttattatcaagtgatttatttcaagagcctttgaggggattcaggtgaaggaacccccatctgtgctggagagttggatactcctttaaatagcccccaccacagtcataacaataatgataatgctggattatttgttaagccaaggttgtctgcctcatatccatcatgctgtttgcaatattcttgctttcaatcaatttatactgagtgtaactttaggatttctgctattaaatgcatgctctctatcctgcttcagtttctggctttgctttgtctgtttcaaaatatgtagcttcctcttttgtacaacaaaaaactcattctcacttttactaaatatactgtaggagtcatcattgatgttatttttctcttatgtatctgtaaagatttttggcatatgaatgtaatattaaagtcaatgatgctataacttgcgatgtttgcatcatgtcaacctttttgaaggagtgaaaaagccctactatgtttttaaatagcaagtgtaagctcagtgctagagtggatatacacaccgcatgttttcatatgtggcacttttatgtatcatgttgggttattgttctagactggactgttaaatactatgtttgaggctgggttgtcatttttataactgtcttggtgttttatggccattatttattacttttgatacacagaatgagctgcatgcatttatagagcaataagaggatgtatttaatgtgccttgtttttaactgaataagaactggaagcatgaatcaataaaactgattaaaatggtctatttgctagcattttgatgttacttgcagtcagataactttgattactgttgaagtttaaaaaaagtttgaaaatatttttacaaactgtgtttttgatgacacaaaagtgaaatatctacagagatagatgtaattttataagactgccagaattatttgtattaatttgttgctgtagcctttagggcatgacttctgtatttgtgcaatcctattctacaattacattcatcctattacaactca

SEQ ID NO: 342249 - DNA, 5988 bp, Homo sapiens
ttttttttttttgggtggcggggggttgcaagtgggaagcctgctgttcagctgccggggctctccgcctccccccacctgtatgaggctgggtctggggaacctgtgctcagcattccaccccctggagcttgggcttggtcttccctgcgggtccctgcgctgacattcaggcggggagccaggaggcctggcgcgcctccagagcccgccgggggagccgggcgagggttctgggctctgacggcggggtcgcagggtcgcccgcctcctggacacgtctgtaggcctagggaagcctgccggccgggaggtacagagtaggagaagccagatcccagggcggacaacgagaagtcgtcaggctaagaaatggcatttcaaaaggcagtgaaagggacgattcttgttggaggaggtgctcttgcaactgttttaggactttctcagtttgctcattacagaaggaaacaaatgaacctggcctatgttaaagcagcagactgcatttcagaaccagttaacagggagcctccttccagagaagctcagctactgactttgcaaaacacatctgaatttgatatccttgttattggaggaggagcaacaggaagtggctgtgcgctagatgctgtcaccagaggactaaaaacagcccttgtagaaagagatgatttctcatcagggaccagcagcagaagcactaaattgatccatggtggtgtgagatatctgcagaaggccatcatgaagttggatattgagcagtataggatggtaaaagaagcccttcatgagcgtgccaacctgctagaaattgctccccatttatcagctccattgcctataatgcttccagtttacaagtggtggcagttaccttactactgggtaggaatcaagctgtatgatttggttgcaggaagcaattgcctaaaaagcagttatgtcctcagcaaatcaagagcccttgaacatttcccaatgctccagaaggacaaactggtaggagcaattgtctactatgacggacaacataacgatgcacggatgaaccttgccattgctctgactgctgccaggtatggggctgccacagccaattacatggaggtagtgagcttgctcaagaagacagacccccagacagggaaagtgcatgtgagcggcgcacggtgcaaggatgtcctcacagggcaggaatttgacgtgagagccaaatgtgttatcaatgccacgggacctttcacggactctgtgcgcaaaatggatgataaagacgcagcagctatctgccagccaagtgctggtgtccatattgtgatgcctggttattacagcccagagagcatgggacttcttgacccagcgaccagtgatgggcgagttattttcttcttaccctggcaaaagatgacgatcgctggcactactgatactccaactgatgttacacaccatccaattccttcagaagaagatatcaacttcattttgaatgaagtgcgtaattacctgagttgtgatgttgaagtgagaagaggggatgtcctggcagcatggagtggaatccgtcctcttgttacagaccccaaatctgcagatactcagtctatctcccgaaatcatgttgttgatatcagtgagagtggccttattactatagcaggtggaaagtggacaacttatcggtctatggcagaagataccataaatgctgctgtcaaaactcataatttaaaagcaggaccaagtagaacagttgggcttttccttcaagggggtaaagattggagccccacactctacattaggcttgtgcaggattatggacttgaaagcgaggtggcacagcatcttgccgccacctatggtgataaggcctttgaggtggccaaaatggcaagtgtgactggcaaaaggtggcctattgttggagtacgtcttgtgtcagaatttccatatattgaagcagaggtgaaatatgggattaaggagtatgcctgcactgctgtggatatgatttcacgtcgtactcgcctggcctttctaaatgtccaggcagcagaggaagccctacccaggattgttgaactgatgggcagggaactgaattgggatgattataagaagcaggaacaacttgaaacagccaggaagtttctatattatgaaatgggctataaatctcgatcagaacagttaacagatcgctctgaaattagcctactgccttcagacattgacaggtataagaagagatttcataagtttgatgcagaccagaaaggctttattaccattgttgatgttcagcgtgtattagagagtatcaatgtccaaatggatgaaaatacactccatgaaattctaaatgaagttgatttgaataaaaatggacaggttgaactcaatgaatttttgcagctgatgagtgctattcaaaaaggaagggtatctggaagccggcttgctatactaatgttgtggaggattgtgagtctgggcagtaaatccacagccaacaaacatagaaacgacaaatcaccatgtaacaaccagagatgactgaaaccactctgaaataatgaatgtggatagctgccttttttaacactagaaaacattccaaaactttaaggtgttggtgtatttgccagctttatttgctgtactttatttgtatttgccattcagtctagcttttaagtatatttttttctttttctcattttcaatgcacattagttttgcatctgttttgtgacctgttagatgtgacacattctctttttgtttattcccttattctaaatgagttctaaaaacataatattttggcaaaaattgaaaaaagctggagacattttgtgacatgcatacagatagcatgtgttattaaaaagagttgcctattgaaatgatcgtgtttctggagaaattaagcttatagacagcatgtgttattaaaaagagttacctattgaaatgatagtgtttctggagatttctcagccccatcttcctccagcttgtctaccttcctcatgcaaacaatattccacatttttatatctagagcatgactggctaactggagagggaaggaaaagtttagatctggttactggagcaagtctcaaagagaaactctgaaagcttccagaatcacaggtataagataaggatagcattgacatttgctgggagttacagtgatagtttcatctcagcagttcatttttttcttcagtcactgctggttttctttgactattatagttgccaggaagatccttgctcttcttactttaaaaccagcatttaagtggcaatttggatgtaataggatgagaccaaatttatctaattattacagtagtaatacatttaagagttaaaaatgtgtttttatatatccacatatgataacaaaagattcaattcccaagcctaaattttgaagcatgtggtattgtcaaatctagcttaccatcttttttgggggtacttgcaaccatagtaaaggaagatggaatagactttagttaactttaattataattatatgttaaataaggcacataaccagtttccaaggtcatcatggttgcttaaagtctttccccttctgtactccatggaaatattctcagtaaaccaaaaacaaaaatggaaaaataatcaccaacccccatcccgacacacacacacagtccaaagcaaaagtcagtgtgtattgaatttaacaagtaatgcagtttgggatgcttttgctacattttggtggcattttaactagttatctgaatatttattaatcgtacttcctcttgtaaagttaactacttacttttttgttgttgtttttttaacatcaggttctgtatctaataggagatgtaacactttatttcatggcaggtttttattgcagagacttgaagtcttagttttttaaactggcacataaaacactttttgctgttatttttatttatgtcaatactgcagagtatctttatgccttattcaagtggattctgagcctgtatgtcacaatgtaaacactggaggttcactcacctacgcactcacccaccacctctgaaagaaacagaaactgcagagaaagacagcatcttagctcattttgtttttaaatgaggttttagacgcttgccacttcctaagggaaatcctaaaacagagcaagtgatgctcccaggtatcactgtgaacttttttctttcaaagtgtgaatttttacactggctttttcatttttttaaagtaattgaagcttgtggctttacaacttagtgttttttgctatccagataacaagtttcattgtttagaacccagtgacacttaataggtagataaattgtcctttaaaatatcccagatgatatacacaatatggtacatttgtgctctctctctctgtttttctctctttctctttctagttagatcaagataacgatgacttgtaccctccctgattctgttacagtagggcccgggcagatctgtgtttgttaaacaggccttgtttgtgcatgctttgctatgaatgaagttcctttaaggacaaagaaaagcacacttttcttcttttgagcatatctgcttttactttaaatctgctaatttctaaaatgtagagtccttcaccaatcccagagactcaatttggaaatgaactgatttcaagccgttactgtgaataaagcaccccagcattttgtataagctcttaattaaacctgtacagcttctttacctgatttaagaaagggagacaagcaataggggggaataagcttcttcaaaattcattccaagcacaaaagaaattttttccctttgcatataaacttgacatcagttgattctgttggggtcggggtgggtatgcagggattgccttttattatcaagtgatttatttcaagagcctttgaggggattcaggtgaaggaacccccatctgtgctggagagttggatactcctttaaatagcccccaccacagtcataacaataatgataatgctggattatttgttaagccaaggttgtctgcctcatatccatcatgctgtttgcaatattcttgctttcaatcaatttatactgagtgtaactttaggatttctgctattaaatgcatgctctctatcctgcttcagtttctggctttgctttgtctgtttcaaaatatgtagcttcctcttttgtacaacaaaaaactcattctcacttttactaaatatactgtaggagtcatcattgatgttatttttctcttatgtatctgtaaagatttttggcatatgaatgtaatattaaagtcaatgatgctataacttgcgatgtttgcatcatgtcaacctttttgaaggagtgaaaaagccctactatgtttttaaatagcaagtgtaagctcagtgctagagtggatatacacaccgcatgttttcatatgtggcacttttatgtatcatgttgggttattgttctagactggactgttaaatactatgtttgaggctgggttgtcatttttataactgtcttggtgttttatggccattatttattacttttgatacacagaatgagctgcatgcatttatagagcaataagaggatgtatttaatgtgccttgtttttaactgaataagaactggaagcatgaatcaataaaactgattaaaatggtctatttgctagcattttgatgttacttgcagtcagataactttgattactgttgaagtttaaaaaaagtttgaaaatatttttacaaactgtgtttttgatgacacaaaagtgaaatatctacagagatagatgtaattttataagactgccagaattatttgtattaatttgttgctgtagcctttagggcatgacttctgtatttgtgcaatcctattctacaattacattcatcctattacaactca

SEQ ID NO: 342250 - DNA, 2371 bp, Homo sapiens
ttttttttttttgggtggcggggggttgcaagtgggaagcctgctgttcagctgccggggctctccgcctccccccacctgtatgaggctgggtctggggaacctgtgctcagcattccaccccctggagcttgggcttggtcttccctgcgggtccctgcgctgacattcaggcggggagccaggaggcctggcgcgcctccagagcccgccgggggagccgggcgagggttctgggctctgacggcggggtcgcagggtcgcccgcctcctggacacgtctgtaggcctagggaagcctgccggccgggaggtacagagtaggagaagccagatcccagggcggacaacgagaagtcgtcaggctaagaaatggcatttcaaaaggcagtgaaagggacgattcttgttggaggaggtgctcttgcaactgttttaggactttctcagtttgctcattacagaaggaaacaaatgaacctggcctatgttaaagcagcagactgcatttcagaaccagttaacagggagcctccttccagagaagctcagctactgactttgcaaaacacatctgaatttgatatccttgttattggaggaggagcaacaggaagtggctgtgcgctagatgctgtcaccagaggactaaaaacagcccttgtagaaagagatgatttctcatcagggaccagcagcagaagcactaaattgatccatggtggtgtgagatatctgcagaaggccatcatgaagttggatattgagcagtataggatggtaaaagaagcccttcatgagcgtgccaacctgctagaaattgctccccatttatcagctccattgcctataatgcttccagtttacaagtggtggcagttaccttactactgggtaggaatcaagctgtatgatttggttgcaggaagcaattgcctaaaaagcagttatgtcctcagcaaatcaagagcccttgaacatttcccaatgctccagaaggacaaactggtaggagcaattgtctactatgacggacaacataacgatgcacggatgaaccttgccattgctctgactgctgccaggtatggggctgccacagccaattacatggaggtagtgagcttgctcaagaagacagacccccagacagggaaagtgcatgtgagcggcgcacggtgcaaggatgtcctcacagggcaggaatttgacgtgagagccaaatgtgttatcaatgccacgggacctttcacggactctgtgcgcaaaatggatgataaagacgcagcagctatctgccagccaagtgctggtgtccatattgtgatgcctggttattacagcccagagagcatgggacttcttgacccagcgaccagtgatgggcgagttattttcttcttaccctggcaaaagatgacgatcgctggcactactgatactccaactgatgttacacaccatccaattccttcagaagaagatatcaacttcattttgaatgaagtgcgtaattacctgagttgtgatgttgaagtgagaagaggggatgtcctggcagcatggagtggaatccgtcctcttgttacagaccccaaatctgcagatactcagtctatctcccgaaatcatgttgttgatatcagtgagagtggccttattactatagcaggtggaaagtggacaacttatcggtctatggcagaagataccataaatgctgctgtcaaaactcataatttaaaagcaggaccaagtagaacagttgggcttttccttcaagggggtaaagattggagccccacactctacattaggcttgtgcaggattatggacttgaaagcgaggtggcacagcatcttgccgccacctatggtgataaggcctttgaggtggccaaaatggcaagtgtgactggcaaaaggtggcctattgttggagtacgtcttgtgtcagaatttccatatattgaagcagaggtgaaatatgggattaaggagtatgcctgcactgctgtggatatgatttcacgtcgtactcgcctggcctttctaaatgtccaggcagcagaggaagccctacccaggattgttgaactgatgggcagggaactgaattgggatgattataagaagcaggaacaacttgaaacagccaggaagtttctatattatgaaatgggctataaatctcgatcagaacagttaacagatcgctctgaaattagcctactgccttcagacattgacaggtataagaagagatttcataagtttgatgcagaccagaaaggctttattaccattgttgatgttcagcgtgtattagaggtaattttctttggttgatgtcagcctctgatactagaag

SEQ ID NO: 342251 - DNA, 492 bp, Homo sapiens
ggtcagcggaatcgacttaagaaactgtaaaactttaagaagagaactacgcctgtgagatttactagactgattttgaaaaagactactgataagggaagtagagacctatcagatactaaagtgtattctaaaactactgtaattaaaataatctggtaaaggaacagagaatcagtcatggagtctataaattagtctatcagtctttaaatacatgaagtttagaatatggtaaaggcagcatttcaaaactgtcatcattagttacttaataaatgatgttggggtatccactccccccgatttatatatatgcatgtgtgtgtgtgtgtgtgtgtctgtgtatgtatgcatgcatatatattctgttttatcatattccatgtgaatcaaggatgtaactttaaaacatcataaaactattagaagcaggtatatgtaaattttttttaaaaattgggtaggaaaggtgtttttaagtatgacagc

SEQ ID NO: 342252 - DNA, 5792 bp, Homo sapiens
gcggggctggcacccgggccgaggctctgattctggggggaggccgactccaccctggctggaggaactgggtgctcctgcccgctggcccctcgcgcgtgaggatctatctcaggctaagaaatggcatttcaaaaggcagtgaaagggacgattcttgttggaggaggtgctcttgcaactgttttaggactttctcagtttgctcattacagaaggaaacaaatgaacctggcctatgttaaagcagcagactgcatttcagaaccagttaacagggagcctccttccagagaagctcagctactgactttgcaaaacacatctgaatttgatatccttgttattggaggaggagcaacaggaagtggctgtgcgctagatgctgtcaccagaggactaaaaacagcccttgtagaaagagatgatttctcatcagggaccagcagcagaagcactaaattgatccatggtggtgtgagatatctgcagaaggccatcatgaagttggatattgagcagtataggatggtaaaagaagcccttcatgagcgtgccaacctgctagaaattgctccccatttatcagctccattgcctataatgcttccagtttacaagtggtggcagttaccttactactgggtaggaatcaagctgtatgatttggttgcaggaagcaattgcctaaaaagcagttatgtcctcagcaaatcaagagcccttgaacatttcccaatgctccagaaggacaaactggtaggagcaattgtctactatgacggacaacataacgatgcacggatgaaccttgccattgctctgactgctgccaggtatggggctgccacagccaattacatggaggtagtgagcttgctcaagaagacagacccccagacagggaaagtgcatgtgagcggcgcacggtgcaaggatgtcctcacagggcaggaatttgacgtgagagccaaatgtgttatcaatgccacgggacctttcacggactctgtgcgcaaaatggatgataaagacgcagcagctatctgccagccaagtgctggtgtccatattgtgatgcctggttattacagcccagagagcatgggacttcttgacccagcgaccagtgatgggcgagttattttcttcttaccctggcaaaagatgacgatcgctggcactactgatactccaactgatgttacacaccatccaattccttcagaagaagatatcaacttcattttgaatgaagtgcgtaattacctgagttgtgatgttgaagtgagaagaggggatgtcctggcagcatggagtggaatccgtcctcttgttacagaccccaaatctgcagatactcagtctatctcccgaaatcatgttgttgatatcagtgagagtggccttattactatagcaggtggaaagtggacaacttatcggtctatggcagaagataccataaatgctgctgtcaaaactcataatttaaaagcaggaccaagtagaacagttgggcttttccttcaagggggtaaagattggagccccacactctacattaggcttgtgcaggattatggacttgaaagcgaggtggcacagcatcttgccgccacctatggtgataaggcctttgaggtggccaaaatggcaagtgtgactggcaaaaggtggcctattgttggagtacgtcttgtgtcagaatttccatatattgaagcagaggtgaaatatgggattaaggagtatgcctgcactgctgtggatatgatttcacgtcgtactcgcctggcctttctaaatgtccaggcagcagaggaagccctacccaggattgttgaactgatgggcagggaactgaattgggatgattataagaagcaggaacaacttgaaacagccaggaagtttctatattatgaaatgggctataaatctcgatcagaacagttaacagatcgctctgaaattagcctactgccttcagacattgacaggtataagaagagatttcataagtttgatgcagaccagaaaggctttattaccattgttgatgttcagcgtgtattagagagtatcaatgtccaaatggatgaaaatacactccatgaaattctaaatgaagttgatttgaataaaaatggacaggttgaactcaatgaatttttgcagctgatgagtgctattcaaaaaggaagggtatctggaagccggcttgctatactaatgaaaactgcagaagagaacctcgacagaagagttccaattccagtggaccgtagttgtggaggattgtgagtctgggcagtaaatccacagccaacaaacatagaaacgacaaatcaccatgtaacaaccagagatgactgaaaccactctgaaataatgaatgtggatagctgccttttttaacactagaaaacattccaaaactttaaggtgttggtgtatttgccagctttatttgctgtactttatttgtatttgccattcagtctagcttttaagtatatttttttctttttctcattttcaatgcacattagttttgcatctgttttgtgacctgttagatgtgacacattctctttttgtttattcccttattctaaatgagttctaaaaacataatattttggcaaaaattgaaaaaagctggagacattttgtgacatgcatacagatagcatgtgttattaaaaagagttgcctattgaaatgatcgtgtttctggagaaattaagcttatagacagcatgtgttattaaaaagagttacctattgaaatgatagtgtttctggagatttctcagccccatcttcctccagcttgtctaccttcctcatgcaaacaatattccacatttttatatctagagcatgactggctaactggagagggaaggaaaagtttagatctggttactggagcaagtctcaaagagaaactctgaaagcttccagaatcacaggtataagataaggatagcattgacatttgctgggagttacagtgatagtttcatctcagcagttcatttttttcttcagtcactgctggttttctttgactattatagttgccaggaagatccttgctcttcttactttaaaaccagcatttaagtggcaatttggatgtaataggatgagaccaaatttatctaattattacagtagtaatacatttaagagttaaaaatgtgtttttatatatccacatatgataacaaaagattcaattcccaagcctaaattttgaagcatgtggtattgtcaaatctagcttaccatcttttttgggggtacttgcaaccatagtaaaggaagatggaatagactttagttaactttaattataattatatgttaaataaggcacataaccagtttccaaggtcatcatggttgcttaaagtctttccccttctgtactccatggaaatattctcagtaaaccaaaaacaaaaatggaaaaataatcaccaacccccatcccgacacacacacacagtccaaagcaaaagtcagtgtgtattgaatttaacaagtaatgcagtttgggatgcttttgctacattttggtggcattttaactagttatctgaatatttattaatcgtacttcctcttgtaaagttaactacttacttttttgttgttgtttttttaacatcaggttctgtatctaataggagatgtaacactttatttcatggcaggtttttattgcagagacttgaagtcttagttttttaaactggcacataaaacactttttgctgttatttttatttatgtcaatactgcagagtatctttatgccttattcaagtggattctgagcctgtatgtcacaatgtaaacactggaggttcactcacctacgcactcacccaccacctctgaaagaaacagaaactgcagagaaagacagcatcttagctcattttgtttttaaatgaggttttagacgcttgccacttcctaagggaaatcctaaaacagagcaagtgatgctcccaggtatcactgtgaacttttttctttcaaagtgtgaatttttacactggctttttcatttttttaaagtaattgaagcttgtggctttacaacttagtgttttttgctatccagataacaagtttcattgtttagaacccagtgacacttaataggtagataaattgtcctttaaaatatcccagatgatatacacaatatggtacatttgtgctctctctctctgtttttctctctttctctttctagttagatcaagataacgatgacttgtaccctccctgattctgttacagtagggcccgggcagatctgtgtttgttaaacaggccttgtttgtgcatgctttgctatgaatgaagttcctttaaggacaaagaaaagcacacttttcttcttttgagcatatctgcttttactttaaatctgctaatttctaaaatgtagagtccttcaccaatcccagagactcaatttggaaatgaactgatttcaagccgttactgtgaataaagcaccccagcattttgtataagctcttaattaaacctgtacagcttctttacctgatttaagaaagggagacaagcaataggggggaataagcttcttcaaaattcattccaagcacaaaagaaattttttccctttgcatataaacttgacatcagttgattctgttggggtcggggtgggtatgcagggattgccttttattatcaagtgatttatttcaagagcctttgaggggattcaggtgaaggaacccccatctgtgctggagagttggatactcctttaaatagcccccaccacagtcataacaataatgataatgctggattatttgttaagccaaggttgtctgcctcatatccatcatgctgtttgcaatattcttgctttcaatcaatttatactgagtgtaactttaggatttctgctattaaatgcatgctctctatcctgcttcagtttctggctttgctttgtctgtttcaaaatatgtagcttcctcttttgtacaacaaaaaactcattctcacttttactaaatatactgtaggagtcatcattgatgttatttttctcttatgtatctgtaaagatttttggcatatgaatgtaatattaaagtcaatgatgctataacttgcgatgtttgcatcatgtcaacctttttgaaggagtgaaaaagccctactatgtttttaaatagcaagtgtaagctcagtgctagagtggatatacacaccgcatgttttcatatgtggcacttttatgtatcatgttgggttattgttctagactggactgttaaatactatgtttgaggctgggttgtcatttttataactgtcttggtgttttatggccattatttattacttttgatacacagaatgagctgcatgcatttatagagcaataagaggatgtatttaatgtgccttgtttttaactgaataagaactggaagcatgaatcaataaaactgattaaaatggtctatttgctagcattttgatgttacttgcagtcagataactttgattactgttgaagtttaaaaaaagtttgaaaatatttttacaaactgtgtttttgatgacacaaaagtgaaatatctacagagatagatgtaattttataagactgccagaattatttgtattaatttgttgctgtagcctttagggcatgacttctgtatttgtgcaatcctattctacaattacattcatcctattacaactca

SEQ ID NO: 342253 - DNA, 5543 bp, Homo sapiens
gcggggctggcacccgggccgaggctctgattctggggggaggccgactccaccctggctggaggaactgggtgctcctgcccgctggcccctcgcgcgtgaggatctatctcaggctaagaaatggcatttcaaaaggcagtgaaagggacgattcttgttggaggaggtgctcttgcaactgttttaggactttctcagtttgctcattacagaaggaaacaaatgaacctggcctatgttaaagcagcagactgcatttcagaaccagttaacagggagcctccttccagagaagctcagctactgactttgcaaaacacatctgaatttgatatccttgttattggaggaggagcaacaggaagtggctgtgcgctagatgctgtcaccagaggactaaaaacagcccttgtagaaagagatgatttctcatcagggaccagcagcagaagcactaaattgatccatggtggtgtgagatatctgcagaaggccatcatgaagttggatattgagcagtataggatggtaaaagaagcccttcatgagcgtgccaacctgctagaaattgctccccatttatcagctccattgcctataatgcttccagtttacaagtggtggcagttaccttactactgggtaggaatcaagctgtatgatttggttgcaggaagcaattgcctaaaaagcagttatgtcctcagcaaatcaagagcccttgaacatttcccaatgctccagaaggacaaactggtaggagcaattgtctactatgacggacaacataacgatgcacggatgaaccttgccattgctctgactgctgccaggtatggggctgccacagccaattacatggaggtagtgagcttgctcaagaagacagacccccagacagggaaagtgcatgtgagcggcgcacggtgcaaggatgtcctcacagggcaggaatttgacgtgagagccaaatgtgttatcaatgccacgggacctttcacggactctgtgcgcaaaatggatgataaagacgcagcagctatctgccagccaagtgctggtgtccatattgtgatgcctggttattacagcccagagagcatgggacttcttgacccagcgaccagtgatgggcgagttattttcttcttaccctggcaaaagatgacgatcgctggcactactgatactccaactgatgttacacaccatccaattccttcagaagaagatatcaacttcattttgaatgaagtgcgtaattacctgagttgtgatgttgaagtgagaagaggggatgtcctggcagcatggagtggaatccgtcctcttgttacagaccccaaatctgcagatactcagtctatctcccgaaatcatgttgttgatatcagtgagagtggccttattactatagcaggtggaaagtggacaacttatcggtctatggcagaagataccataaatgctgctgtcaaaactcataatttaaaagcaggaccaagtagaacagttgggcttttccttcaagggggtaaagattggagccccacactctacattaggcttgtgcaggattatggacttgaaagcgaggtggcacagcatcttgccgccacctatggtgataaggcctttgaggtggccaaaatggcaagtgtgactggcaaaaggtggcctattgttggagtacgtcttgtgtcagaatttccatatattgaagcagaggtgaaatatgggattaaggagtatgcctgcactgctgtggatatgatttcacgtcgtactcgcctggcctttctaaatgtccaggcagcagaggaagccctacccaggattgttgaactgatgggcagggaactgaattgggatgattataagaagcaggaacaacttgaaacagccaggaagtttctatattatgaaatgggctataaatctcgatcagaacagttaacagatcgctctgaaattagcctactgccttcagacattgacaggtataagaagagatttcataagtttgatgcagaccagaaaggctttattaccattgttgatgttcagcgtgtattagagagtatcaatgtccaaatggatgaaaatacactccatgaaattctaaatgaagttgatttgaataaaaatggacaggttgaactcaatgaatttttgcagctgatgagtgctattcaaaaaggaagggtatctggaagccggcttgctatactaatgaaaactgcagaagagaacctcgacagaagagttccaattccagtggaccgtagttgtggaggattgtgagtctgggcagtaaatccacagccaacaaacatagaaacgacaaatcaccatgtaacaaccagagatgactgaaaccactctgaaataatgaatgtggatagctgccttttttaacactagaaaacattccaaaactttaaggtgttggtgtatttgccagctttatttgctgtactttatttgtatttgccattcagtctagcttttaagtatatttttttctttttctcattttcaatgcacattagttttgcatctgttttgtgacctgttagatgtgacacattctctttttgtttattcccttattctaaatgagttctaaaaacataatattttggcaaaaattgaaaaaagctggagacattttgtgacatgcatacagatagcatgtgttattaaaaagagttgcctattgaaatgatcgtgtttctggagaaattaagcttatagacagcatgtgttattaaaaagagttacctattgaaatgatagtgtttctggagatttctcagccccatcttcctccagcttgtctaccttcctcatgcaaacaatattccacatttttatatctagagcatgactggctaactggagagggaaggaaaagtttagatctggttactggagcaagtctcaaagagaaactctgaaagcttccagaatcacaggtataagataaggatagcattgacatttgctgggagttacagtgatagtttcatctcagcagttcatttttttcttcagtcactgctggttttctttgactattatagttgccaggaagatccttgctcttcttactttaaaaccagcatttaagtggcaatttggatgtaataggatgagaccaaatttatctaattattacagtagtaatacatttaagagttaaaaatgtgtttttatatatccacatatgataacaaaagattcaattcccaagcctaaattttgaagcatgtggtattgtcaaatctagcttaccatcttttttgggggtacttgcaaccatagtaaaggaagatggaatagactttagttaactttaattataattatatgttaaataaggcacataaccagtttccaaggtcatcatggttgcttaaagtctttccccttctgtactccatggaaatattctcagtaaaccaaaaacaaaaatggaaaaataatcaccaacccccatcccgacacacacacacagtccaaagcaaaagtcagtgtgtattgaatttaacaagtaatgcagtttgggatgcttttgctacattttggtggcattttaactagttatctgaatatttattaatcgtacttcctcttgtaaagttaactacttacttttttgttgttgtttttttaacatcaggttctgtatctaataggagatgtaacactttatttcatggcaggtttttattgcagagacttgaagtcttagttttttaaactggcacataaaacactttttgctgttatttttatttatgtcaatactgcagagtatctttatgccttattcaagtggattctgagcctgtatgtcacaatgtaaacactggaggttcactcacctacgcactcacccaccacctctgaaagaaacagaaactgcagagaaagacagcatcttagctcattttgtttttaaatgaggttttagacgcttgccacttcctaagggaaatcctaaaacagagcaagtgatgctcccaggtatcactgtgaacttttttctttcaaagtgtgaatttttacactggctttttcatttttttaaagtaattgaagcttgtggctttacaacttagtgttttttgctatccagataacaagtttcattgtttagaacccagtgacacttaataggtagataaattgtcctttaaaatatcccagatgatatacacaatatggtacatttgtgctctctctctctgtttttctctctttctctttctagttagatcaagataacgatgacttgtaccctccctgattctgttacagtagggcccgggcagatctgtgtttgttaaacaggccttgtttgtgcatgctttgctatgaatgaagttcctttaaggacaaagaaaagcacacttttcttcttttgagcatatctgcttttactttaaatctgctaatttctaaaatgtagagtccttcaccaatcccagagactcaatttggaaatgaactgatttcaagccgttactgtgaataaagcaccccagcattttgtataagctcttaattaaacctgtacagcttctttacctgatttaagaaagggagacaagcaataggggggaataagcttcttcaaaattcattccaagcacaaaagaaattttttccctttgcatataaacttgacatcagttgattctgttggggtcggggtgggtatgcagggattgccttttattatcaagtgatttatttcaagagcctttgaggggattcaggtgaaggaacccccatctgtgctggagagttggatactcctttaaatagcccccaccacagtcataacaataatgataatgctggattatttgttaagccaaggttgtctgcctcatatccatcatgctgtttgcaatattcttgctttcaatcaatttatactgagtgtaactttaggatttctgctattaaatgcatgctctctatcctgcttcagtttctggctttgctttgtctgtttcaaaatatgtagcttcctcttttgtacaacaaaaaactcattctcacttttactaaatatactgtaggagtcatcattgatgttatttttctcttatgtatctgtaaagatttttggcatatgaatgtaatattaaagtcaatgatgctataacttgcgatgtttgcatcatgtcaacctttttgaaggagtgaaaaagccctactatgtttttaaatagcaagtgtaagctcagtgctagagtggatatacacaccgcatgttttcatatgtggcacttttatgtatcatgttgggttattgttctagactggactgttaaatactatgtttgaggctgggttgtcatttttataactgtcttggtgttttatggccattatttattacttttgatacacagaatgagctgcatgcatttatagagcaataagaggatgtatttaatgtgccttgtttttaactgaataagaactggaagcatgaatcaataaaactgattaaaatggtc

SEQ ID NO: 342254 - DNA, 5987 bp, Homo sapiens
ttttttttttttgggtggcggggggttgcaagtgggaagcctgctgttcagctgccggggctctccgcctccccccacctgtatgaggctgggtctggggaacctgtgctcagcattccaccccctggagcttgggcttggtcttccctgcgggtccctgcgctgacattcaggcggggagccaggaggcctggcgcgcctccagagcccgccgggggagccgggcgagggttctgggctctgacggcggggtcgcagggtcgcccgcctcctggacacgtctgtaggcctagggaagcctgccggccgggaggtacagagtaggagaagccagatcccagggcggacaacgagaagtcgtcaggctaagaaatggcatttcaaaaggcagtgaaagggacgattcttgttggaggaggtgctcttgcaactgttttaggactttctcagtttgctcattacagaaggaaacaaatgaacctggcctatgttaaagcagcagactgcatttcagaaccagttaacagggagcctccttccagagaagctcagctactgactttgcaaaacacatctgaatttgatatccttgttattggaggaggagcaacaggaagtggctgtgcgctagatgctgtcaccagaggactaaaaacagcccttgtagaaagagatgatttctcatcagggaccagcagcagaagcactaaattgatccatggtggtgtgagatatctgcagaaggccatcatgaagttggatattgagcagtataggatggtaaaagaagcccttcatgagcgtgccaacctgctagaaattgctccccatttatcagctccattgcctataatgcttccagtttacaagtggtggcagttaccttactactgggtaggaatcaagctgtatgatttggttgcaggaagcaattgcctaaaaagcagttatgtcctcagcaaatcaagagcccttgaacatttcccaatgctccagaaggacaaactggtaggagcaattgtctactatgacggacaacataacgatgcacggatgaaccttgccattgctctgactgctgccaggtatggggctgccacagccaattacatggaggtagtgagcttgctcaagaagacagacccccagacagggaaagtgcatgtgagcggcgcacggtgcaaggatgtcctcacagggcaggaatttgacgtgagagccaaatgtgttatcaatgccacgggacctttcacggactctgtgcgcaaaatggatgataaagacgcagcagctatctgccagccaagtgctggtgtccatattgtgatgcctggttattacagcccagagagcatgggacttcttgacccagcgaccagtgatgggcgagttattttcttcttaccctggccaattccttcagaagaagatatcaacttcattttgaatgaagtgcgtaattacctgagttgtgatgttgaagtgagaagaggggatgtcctggcagcatggagtggaatccgtcctcttgttacagaccccaaatctgcagatactcagtctatctcccgaaatcatgttgttgatatcagtgagagtggccttattactatagcaggtggaaagtggacaacttatcggtctatggcagaagataccataaatgctgctgtcaaaactcataatttaaaagcaggaccaagtagaacagttgggcttttccttcaagggggtaaagattggagccccacactctacattaggcttgtgcaggattatggacttgaaagcgaggtggcacagcatcttgccgccacctatggtgataaggcctttgaggtggccaaaatggcaagtgtgactggcaaaaggtggcctattgttggagtacgtcttgtgtcagaatttccatatattgaagcagaggtgaaatatgggattaaggagtatgcctgcactgctgtggatatgatttcacgtcgtactcgcctggcctttctaaatgtccaggcagcagaggaagccctacccaggattgttgaactgatgggcagggaactgaattgggatgattataagaagcaggaacaacttgaaacagccaggaagtttctatattatgaaatgggctataaatctcgatcagaacagttaacagatcgctctgaaattagcctactgccttcagacattgacaggtataagaagagatttcataagtttgatgcagaccagaaaggctttattaccattgttgatgttcagcgtgtattagagagtatcaatgtccaaatggatgaaaatacactccatgaaattctaaatgaagttgatttgaataaaaatggacaggttgaactcaatgaatttttgcagctgatgagtgctattcaaaaaggaagggtatctggaagccggcttgctatactaatgaaaactgcagaagagaacctcgacagaagagttccaattccagtggaccgtagttgtggaggattgtgagtctgggcagtaaatccacagccaacaaacatagaaacgacaaatcaccatgtaacaaccagagatgactgaaaccactctgaaataatgaatgtggatagctgccttttttaacactagaaaacattccaaaactttaaggtgttggtgtatttgccagctttatttgctgtactttatttgtatttgccattcagtctagcttttaagtatatttttttctttttctcattttcaatgcacattagttttgcatctgttttgtgacctgttagatgtgacacattctctttttgtttattcccttattctaaatgagttctaaaaacataatattttggcaaaaattgaaaaaagctggagacattttgtgacatgcatacagatagcatgtgttattaaaaagagttgcctattgaaatgatcgtgtttctggagaaattaagcttatagacagcatgtgttattaaaaagagttacctattgaaatgatagtgtttctggagatttctcagccccatcttcctccagcttgtctaccttcctcatgcaaacaatattccacatttttatatctagagcatgactggctaactggagagggaaggaaaagtttagatctggttactggagcaagtctcaaagagaaactctgaaagcttccagaatcacaggtataagataaggatagcattgacatttgctgggagttacagtgatagtttcatctcagcagttcatttttttcttcagtcactgctggttttctttgactattatagttgccaggaagatccttgctcttcttactttaaaaccagcatttaagtggcaatttggatgtaataggatgagaccaaatttatctaattattacagtagtaatacatttaagagttaaaaatgtgtttttatatatccacatatgataacaaaagattcaattcccaagcctaaattttgaagcatgtggtattgtcaaatctagcttaccatcttttttgggggtacttgcaaccatagtaaaggaagatggaatagactttagttaactttaattataattatatgttaaataaggcacataaccagtttccaaggtcatcatggttgcttaaagtctttccccttctgtactccatggaaatattctcagtaaaccaaaaacaaaaatggaaaaataatcaccaacccccatcccgacacacacacacagtccaaagcaaaagtcagtgtgtattgaatttaacaagtaatgcagtttgggatgcttttgctacattttggtggcattttaactagttatctgaatatttattaatcgtacttcctcttgtaaagttaactacttacttttttgttgttgtttttttaacatcaggttctgtatctaataggagatgtaacactttatttcatggcaggtttttattgcagagacttgaagtcttagttttttaaactggcacataaaacactttttgctgttatttttatttatgtcaatactgcagagtatctttatgccttattcaagtggattctgagcctgtatgtcacaatgtaaacactggaggttcactcacctacgcactcacccaccacctctgaaagaaacagaaactgcagagaaagacagcatcttagctcattttgtttttaaatgaggttttagacgcttgccacttcctaagggaaatcctaaaacagagcaagtgatgctcccaggtatcactgtgaacttttttctttcaaagtgtgaatttttacactggctttttcatttttttaaagtaattgaagcttgtggctttacaacttagtgttttttgctatccagataacaagtttcattgtttagaacccagtgacacttaataggtagataaattgtcctttaaaatatcccagatgatatacacaatatggtacatttgtgctctctctctctgtttttctctctttctctttctagttagatcaagataacgatgacttgtaccctccctgattctgttacagtagggcccgggcagatctgtgtttgttaaacaggccttgtttgtgcatgctttgctatgaatgaagttcctttaaggacaaagaaaagcacacttttcttcttttgagcatatctgcttttactttaaatctgctaatttctaaaatgtagagtccttcaccaatcccagagactcaatttggaaatgaactgatttcaagccgttactgtgaataaagcaccccagcattttgtataagctcttaattaaacctgtacagcttctttacctgatttaagaaagggagacaagcaataggggggaataagcttcttcaaaattcattccaagcacaaaagaaattttttccctttgcatataaacttgacatcagttgattctgttggggtcggggtgggtatgcagggattgccttttattatcaagtgatttatttcaagagcctttgaggggattcaggtgaaggaacccccatctgtgctggagagttggatactcctttaaatagcccccaccacagtcataacaataatgataatgctggattatttgttaagccaaggttgtctgcctcatatccatcatgctgtttgcaatattcttgctttcaatcaatttatactgagtgtaactttaggatttctgctattaaatgcatgctctctatcctgcttcagtttctggctttgctttgtctgtttcaaaatatgtagcttcctcttttgtacaacaaaaaactcattctcacttttactaaatatactgtaggagtcatcattgatgttatttttctcttatgtatctgtaaagatttttggcatatgaatgtaatattaaagtcaatgatgctataacttgcgatgtttgcatcatgtcaacctttttgaaggagtgaaaaagccctactatgtttttaaatagcaagtgtaagctcagtgctagagtggatatacacaccgcatgttttcatatgtggcacttttatgtatcatgttgggttattgttctagactggactgttaaatactatgtttgaggctgggttgtcatttttataactgtcttggtgttttatggccattatttattacttttgatacacagaatgagctgcatgcatttatagagcaataagaggatgtatttaatgtgccttgtttttaactgaataagaactggaagcatgaatcaataaaactgattaaaatggtctatttgctagcattttgatgttacttgcagtcagataactttgattactgttgaagtttaaaaaaagtttgaaaatatttttacaaactgtgtttttgatgacacaaaagtgaaatatctacagagatagatgtaattttataagactgccagaattatttgtattaatttgttgctgtagcctttagggcatgacttctgtatttgtgcaatcctattctacaattacattcatcctattacaactca

SEQ ID NO: 342255 - DNA, 533 bp, Homo sapiens
tctctcttttcctcctgctctggccgcgttaagatgtggctacttcccttcgcgttctacctcgattgaaaattttctgaggcctccgtagccatgcttcccgtacagctgtggaaccggcctcattttcttctgtcactggagccatcatttatttagcagctttgttaaacagaaaggggtctgtcctgcgtgtgcagtctttggatttaaaattatggaaattcttcaggcagaaaatgggcacatatggttatcacagaaaagctgttttaaagccagttttaaggtattattatgccgctaccttcaagaagtaatttgcgtgctgtttattggagctgtgaatttaatcatctcaatcccacgctattacaggatgactataagaagatgtattgacatttctttggacacataattttgcctccattgtgtgttgttttgccagaatactgaaggcagtgtttgtatgatggcacatccaaataaaaagcaggtcctccttttgggacagtgatccatttaagtta

SEQ ID NO: 342256 - DNA, 445 bp, Homo sapiens
tctctcttttcctcctgctctggccgcgttaagatgtggctacttcccttcgcgttctacctcgattgaaaattttctgaggcctccgtagccatgcttcccgtacagctgtggaaccgatttaaaattatggaaattcttcaggcagaaaatgggcacatatggttatcacagaaaagctgttttaaagccagttttaaggtattattatgccgctaccttcaagaagtaatttgcgtgctgtttattggagctgtgaatttaatcatctcaatcccacgctattacaggatgactataagaagatgtattgacatttctttggacacataattttgcctccattgtgtgttgttttgccagaatactgaaggcagtgtttgtatgatggcacatccaaataaaaagcaggtcctccttttgggacagtgatccatttaagtta

SEQ ID NO: 342257 - DNA, 408 bp, Homo sapiens
ttgcctgcttgtaatgttacccctgagaaaagtcatctgaaaatgggaaatggacctggacaggaataagcagagcatgctgatttaaaattatggaaattcttcaggcagaaaatgggcacatatggttatcacagaaaagctgttttaaagccagttttaaggtattattatgccgctaccttcaagaagtaatttgcgtgctgtttattggagctgtgaatttaatcatctcaatcccacgctattacaggatgactataagaagatgtattgacatttctttggacacataattttgcctccattgtgtgttgttttgccagaatactgaaggcagtgtttgtatgatggcacatccaaataaaaagcaggtcctccttttgggacagtgatccatttaagtta

SEQ ID NO: 342258 - DNA, 774 bp, Homo sapiens
tctctcttttcctcctgctctggccgcgttaagatgtggctacttcccttcgcgttctacctcgattgaaaattttctgaggcctccgtagccatgcttcccgtacagctgtggaaccgtaagtggtgttttatcttcattgcttcagggagtgttgatttgtctgccattcgactctcagaaattctgtcaggaaaaacaaatggatatgaaatctgaagataaaggtttgtggggaaagaataaaaggatcatgaaatgtcagggctgaaaaatatcttagcatccagcctagtgttctatttacaccagccctgttttggctcccaatctgattctcttcctattgcatcaaactgagttttaaagaaatttgaaactatgcatttcaagactatttggtgattatgttaatctccaattctgcctatttttgattatgttaaaatcagccaaaatatagaacatagagttatacttatgcccaacatcataatatgccttcagttattaacatatgttgtaggtaagcttgttattatttgaaatgtaaatatttatatgtgtaatgtgtaaaagttttcaaatatgggtcataacatatccaatggtttatttgtctatgccactaatacatctttgggcacccaagtttaagtgcagtacattttgctggttgatgtaccaaggaatgacttataattgtgatgaaatttgaccttcatattgcaaaagataatcatcatttgctagaaaaaattaaaaccgtttaaa

SEQ ID NO: 342259 - DNA, 301 bp, Homo sapiens
  misc_feature (29)..(29): n is a, c, g, or t
atggaaagagggagggggggagggggggnggggaggtgaaaaaatgatgagattctggtattattatgccgctaccttcaagaagtaatttgcgtgctgtttattggagctgtgaatttaatcatctcaatcccacgctattacaggatgactataagaagatgtattgacatttctttggacacataattttgcctccattgtgtgttgttttgccagaatactgaaggcagtgtttgtatgatggcacatccaaataaaaagcaggtcctccttttgggacagtgatccatttaagtta

SEQ ID NO: 342260 - DNA, 465 bp, Homo sapiens
atgtattttctctttttgcagggcctcattttcttctgtcactggagccatcatttatttagcagctttgttaaacagaaaggggtctgtcctgcgtgtgcagtctttggtaagtctagataaacaccaagaaggtcttacatctgcattactatgaaatgtccctggttattagttgatatcaccataggacacaggtgatcgttacactcagttggagaagtgcggccccaagtccattctctaaatcatgactacttgtagcaaacaccttttaagatgcaattggccagtgacacaagtgtggtcctgtggtctctacaatgcaatcagtcaatttttagagaggctgctctctaggcaacagccagaatgttggggccttttgcgattctgatccactaataagtgtttgctgttgacaaataattgagattgcaggttaggttcacaaaagtacaactc

SEQ ID NO: 342261 - DNA, 2771 bp, Homo sapiens
  misc_feature (3)..(4): n is a, c, g, or t
  misc_feature (7)..(8): n is a, c, g, or t
ggnncgnngcagccgccgagcggccgcgatttcccggggactgctggggcgcagcggggaggcgggccggggggcggcggggcgcgagcagagcgcggttgacctccctttctctgctcagctccagcgtcatttcggcctcttagttcttctgaaccctgctcctgagctaggtaggaaacatgagcggcaccaacttggatgggaacgatgagtttgatgagcagttgcgaatgcaagaattgtacggagacggcaaggatggtgacacccagaccgatgccggcggagaacccgattctctcgggcagcagccgacggacactccctacgagtgggacctggacaaaaaggcttggttccccaagattactgaagatttcattgctacatatcaggccaattatggcttctctaacgatggcgcatctagttctaccgcaaatgttgaagatgtccatgctaggactgcagaggaacctccacaagaaaaagccccggaacccactgatgccagaaagaagggagaaaaaagaaaggctgagtcaggatggtttcatgttgaagaagacagaaatacaaatgtatacgtgtctggtttgcctccagatattacagtggatgaatttatacaacttatgtccaagtttggcattattatgagagatcctcagacagaagaatttaaggtcaaactttacaaagataatcaaggaaatcttaaaggagacggtctttgctgttatttgaaaagagaatctgtggaacttgcattaaaacttttggatgaagatgaaattagaggctacaaattacatgttgaggtggcaaagtttcaactgaagggagaatatgatgcctcaaagaagaagaagaagtgcaaagactataagaagaagctgtctatgcaacaaaagcagttggattggagacctgagaggcgagccggaccatcccggatgcgccatgagcgagttgtcatcatcaagaatatgtttcatcctatggattttgaggatgatccgttggtgctgaatgagatcagagaagaccttcgagtagagtgttcgaagtttggacaaattaggaaactccttctctttgataggcacccagatggtgtggcctctgtgtcctttcgggatccagaggaagctgattattgtattcagactctcgatggaagatggtttggtggccgtcaaatcactgcccaggcatgggatgggactacagattatcaggtggaggaaacctcaagagaaagggaggaaaggctgagaggatgggaggctttcctcaatgctcctgaggccaacagaggccttaggcgttcagattctgtctctgcttccgaaagggcagggccttctagagcaaggcatttttcagagcaccccagcacatctaaaatgaatgctcaagaaactgcaactggaatggcgtttgaagaacctatagatgagaagaagtttgaaaagacagaagatgggggagaatttgaagaaggtgcttctgaaaacaatgctaaggaaagtagccccgaaaaagaggctgaagaaggctgccctgaaaaagaatctgaagagggctgccccaaaagagggtttgaaggcagctgctcccaaaaagagtctgaagaaggcaatcccgtaagaggatctgaagaggatagtcctaaaaaagagtctaaaaagaagacactcaaaaatgattgtgaagagaatggccttgcaaaggaatctgaagatgacctcaacaaggagtctgaagaggaggttggccccacaaaagagtccgaagaagatgactcagagaaagagtctgatgaagactgctctgaaaaacagtctgaagatggctccgaaagagaatttgaagaaaatggtctcgagaaagatttggacgaggaaggttctgaaaaggagcttcatgaaaatgttcttgacaaagagttagaagaaaatgactctgaaaactccgaatttgaagatgacggctctgaaaaagtgttagatgaggaaggctctgagagagagtttgacgaagattcagatgaaaaggaagaagaggaggatacatatgaaaaagtatttgatgatgagtctgatgagaaagaggatgaagaatatgcagatgaaaaggggcttgaagctgctgataaaaaggcggaagaaggtgatgcagatgaaaagctgtttgaagagtcagatgacaaggaagatgaagatgcagatggaaaggaagttgaagatgctgacgaaaagttgttcgaagatgatgattccaatgagaagttgtttgatgaggaggaagattccagtgagaagttgtttgacgattctgatgagagggggactttgggtggttttgggagtgttgaagaagggcccctatccactggcagcagctttattctcagtagcgatgatgatgacgatgatatttaatcccttaaacttgctttttagggagagtcctccatctacatttgcctgtgcttcagggtaattactagtagtgttacatgaacatgtgcatagtggtaggatgccatcagattaaagcattgaagtgtttcattgttacctgtacctaatggttttaaatatatgttaattgattgtttagttaaaatgtcatagttacaatgcaagtaaactggatacttgttcttttgtcagatttgttaaatgcatgcagaataatatttttaagagtattgattgaagtttgtgatattcatcaataaaaatgagttgataatatgc

SEQ ID NO: 342262 - DNA, 3060 bp, Homo sapiens
  misc_feature (3)..(4): n is a, c, g, or t
  misc_feature (7)..(8): n is a, c, g, or t
ggnncgnngcagccgccgagcggccgcgatttcccggggactgctggggcgcagcggggaggcgggccggggggcggcggggcgcgagcagagcgcggttgacctccctttctctgctcagctccagcgtcatttcggcctcttagttcttctgaaccctgctcctgagctaggtaggaaacatgagcggcaccaacttggatgggaacgatgagtttgatgagcagttgcgaatgcaagaattgtacggagacggcaaggatggtgacacccagaccgatgccggcggagaacccgattctctcgggcagcagccgacggacactccctacgagtgggacctggacaaaaaggcttggttccccaagattactgaagatttcattgctacatatcaggccaattatggcttctctaacgatggcgcatctagttctaccgcaaatgttgaagatgtccatgctaggactgcagaggaacctccacaagaaaaagccccggaacccactgatgccagaaagaagggagaaaaaagaaaggctgagtcaggatggtttcatgttgaagaagacagaaatacaaatgtatacgtgtctggtttgcctccagatattacagtggatgaatttatacaacttatgtccaagtttggcattattatgagagatcctcagacagaagaatttaaggtcaaactttacaaagataatcaaggaaatcttaaaggagacggtctttgctgttatttgaaaagagaatctgtggaacttgcattaaaacttttggatgaagatgaaattagaggctacaaattacatgttgaggtggcaaagtttcaactgaagggagaatatgatgcctcaaagaagaagaagaagtgcaaagactataagaagaagctgtctatgcaacaaaagcagttggattggagacctgagaggcgagccggaccatcccggatgcgccatgagcgagttgtcatcatcaagaatatgtttcatcctatggattttgaggatgatccgttggtgctgaatgagatcagagaagaccttcgagtagagtgttcgaagtttggacaaattaggaaactccttctctttgataggcacccagatggtgtggcctctgtgtcctttcgggatccagaggaagctgattattgtattcagactctcgatggaagatggtttggtggccgtcaaatcactgcccaggcatgggatgggactacagattatcaggtggaggaaacctcaagagaaagggaggaaaggctgagaggatgggaggctttcctcaatgctcctgaggccaacagaggccttaggcgttcagattctgtctctgcttccgaaagggcagggccttctagagcaaggcatttttcagagcaccccagcacatctaaaatgaatgctcaagaaactgcaactggaatggcgtttgaagaacctatagatgagaagaagtttgaaaagacagaagatgggggagaatttgaagaaggtgcttctgaaaacaatgctaaggaaagtagccccgaaaaagaggctgaagaaggctgccctgaaaaagaatctgaagagggctgccccaaaagagggtttgaaggcagctgctcccaaaaagagtctgaagaaggcaatcccgtaagaggatctgaagaggatagtcctaaaaaagagtctaaaaagaagacactcaaaaatgattgtgaagagaatggccttgcaaaggaatctgaagatgacctcaacaaggagtctgaagaggaggttggccccacaaaagagtccgaagaagatgactcagagaaagagtctgatgaagactgctctgaaaaacagtctgaagatggctccgaaagagaatttgaagaaaatggtctcgagaaagatttggacgaggaaggttctgaaaaggagcttcatgaaaatgttcttgacaaagagttagaagaaaatgactctgaaaactccgaatttgaagatgacggctctgaaaaagtgttagatgaggaaggctctgagagagagtttgacgaagattcagatgaaaaggaagaagaggaggatacatatgaaaaagtatttgatgatgagtctgatgagaaagaggatgaagaatatgcagatgaaaaggggcttgaagctgctgataaaaaggcggaagaaggtgatgcagatgaaaagctgtttgaagagtcagatgacaaggaagatgaagatgcagatggaaaggaagttgaagatgctgacgaaaagttgttcgaagatgatgattccaatgagaagttgtttgatgaggaggaagattccagtgagaagttgtttgacgattctgatgagagggggactttgggtggttttgggagtgttgaagaagggcccctatccactggcagcagctttattctcagtagcgatgatgatgacgatgatatttaatcccttaaacttgctttttagggagagtcctccatctacatttgcctgtgcttcagggtaattactagtagtgttacatgaacatgtgcatagtggtaggatgccatcagattaaagcattgaagtgtttcattgttacctgtacctaatggttttaaatatatgttaattgattgtttagttaaaatgtcatagttacaatgcaagtaaactggatacttgttcttttgtcagatttgttaaatgcatgcagaataatatttttaagagtattgattgaagtttgtgatattcatcaataaaaatgagttgataatatgcagaaactgaaaattggacttgagttaaattgcattttaaattcttgatattgctttatttatactgaaggttggcttttctgaggacttgaagaatctctttggagtctccttgcttcccgctggtattagcacgtatgtctccatttcctctctataaaccagaacatgttcctaaactcagaaaacaaccctctggattttttttttctgcccagtccttgcaaattaactcttgtttgttttctaccctctttccattaaaattgactctcagatgtgcaaaagtg

SEQ ID NO: 342263 - DNA, 3085 bp, Homo sapiens
gccacgcgccgacaatggcggctgcgtcggcctgagcagggcttagtttagaagtaatttcctgacgttgccgagggagccgcagtcgcctcagatccggtcggcggcggcggcggtggcggcggcggcagcgcgcctgcgcgctcccgcagcgccctggacctagcggcggtgccgaggcccggcggagcaagccaggtaggaaacatgagcggcaccaacttggatgggaacgatgagtttgatgagcagttgcgaatgcaagaattgtacggagacggcaaggatggtgacacccagaccgatgccggcggagaacccgattctctcgggcagcagccgacggacactccctacgagtgggacctggacaaaaaggcttggttccccaagattactgaagatttcattgctacatatcaggccaattatggcttctctaacgatggcgcatctagttctaccgcaaatgttgaagatgtccatgctaggactgcagaggaacctccacaagaaaaagccccggaacccactgatgccagaaagaagggagaaaaaagaaaggctgagtcaggatggtttcatgttgaagaagacagaaatacaaatgtatacgtgtctggtttgcctccagatattacagtggatgaatttatacaacttatgtccaagtttggcattattatgagagatcctcagacagaagaatttaaggtcaaactttacaaagataatcaaggaaatcttaaaggagacggtctttgctgttatttgaaaagagaatctgtggaacttgcattaaaacttttggatgaagatgaaattagaggctacaaattacatgttgaggtggcaaagtttcaactgaagggagaatatgatgcctcaaagaagaagaagaagtgcaaagactataagaagaagctgtctatgcaacaaaagcagttggattggagacctgagaggcgagccggaccatcccggatgcgccatgagcgagttgtcatcatcaagaatatgtttcatcctatggattttgaggatgatccgttggtgctgaatgagatcagagaagaccttcgagtagagtgttcgaagtttggacaaattaggaaactccttctctttgataggcacccagatggtgtggcctctgtgtcctttcgggatccagaggaagctgattattgtattcagactctcgatggaagatggtttggtggccgtcaaatcactgcccaggcatgggatgggactacagattatcaggtggaggaaacctcaagagaaagggaggaaaggctgagaggatgggaggctttcctcaatgctcctgaggccaacagaggccttaggcgttcagattctgtctctgcttccgaaagggcagggccttctagagcaaggcatttttcagagcaccccagcacatctaaaatgaatgctcaagaaactgcaactggaatggcgtttgaagaacctatagatgagaagaagtttgaaaagacagaagatgggggagaatttgaagaaggtgcttctgaaaacaatgctaaggaaagtagccccgaaaaagaggctgaagaaggctgccctgaaaaagaatctgaagagggctgccccaaaagagggtttgaaggcagctgctcccaaaaagagtctgaagaaggcaatcccgtaagaggatctgaagaggatagtcctaaaaaagagtctaaaaagaagacactcaaaaatgattgtgaagagaatggccttgcaaaggaatctgaagatgacctcaacaaggagtctgaagaggaggttggccccacaaaagagtccgaagaagatgactcagagaaagagtctgatgaagactgctctgaaaaacagtctgaagatggctccgaaagagaatttgaagaaaatggtctcgagaaagatttggacgaggaaggttctgaaaaggagcttcatgaaaatgttcttgacaaagagttagaagaaaatgactctgaaaactccgaatttgaagatgacggctctgaaaaagtgttagatgaggaaggctctgagagagagtttgacgaagattcagatgaaaaggaagaagaggaggatacatatgaaaaagtatttgatgatgagtctgatgagaaagaggatgaagaatatgcagatgaaaaggggcttgaagctgctgataaaaaggcggaagaaggtgatgcagatgaaaagctgtttgaagagtcagatgacaaggaagatgaagatgcagatggaaaggaagttgaagatgctgacgaaaagttgttcgaagatgatgattccaatgagaagttgtttgatgaggaggaagattccagtgagaagttgtttgacgattctgatgagagggggactttgggtggttttgggagtgttgaagaagggcccctatccactggcagcagctttattctcagtagcgatgatgatgacgatgatatttaatcccttaaacttgctttttagggagagtcctccatctacatttgcctgtgcttcagggtaattactagtagtgttacatgaacatgtgcatagtggtaggatgccatcagattaaagcattgaagtgtttcattgttacctgtacctaatggttttaaatatatgttaattgattgtttagttaaaatgtcatagttacaatgcaagtaaactggatacttgttcttttgtcagatttgttaaatgcatgcagaataatatttttaagagtattgattgaagtttgtgatattcatcaataaaaatgagttgataatatgcagaaactgaaaattggacttgagttaaattgcattttaaattcttgatattgctttatttatactgaaggttggcttttctgaggacttgaagaatctctttggagtctccttgcttcccgctggtattagcacgtatgtctccatttcctctctataaaccagaacatgttcctaaactcagaaaacaaccctctggattttttttttctgcccagtccttgcaaattaactcttgtttgttttctaccctctttccattaaaattgactctcagatgtgcaaaagtg

SEQ ID NO: 342264 - DNA, 2852 bp, Homo sapiens
  misc_feature (3)..(4): n is a, c, g, or t
  misc_feature (7)..(8): n is a, c, g, or t
ggnncgnngcagccgccgagcggccgcgatttcccggggactgctggggcgcagcggggaggcgggccggggggcggcggggcgcgagcagagcgcggttgacctccctttctctgctcagctccagcgtcatttcggcctcttagttcttctgaaccctgctcctgagctaggtaggaaacatgagcggcaccaacttggatgggaacgatgagtttgatgagcagttgcgaatgcaagaattgtacggagacggcaaggatggtgacacccagaccgatgccggcggagaacccgattctctcgggcagcagccgacggacactccctacgagtgggacctggacaaaaaggcttggttccccaagattactgaagatttcattgctacatatcaggccaattatggcttctctaacgatggcgcatctagttctaccgcaaatgttgaagatgtccatgctaggactgcagaggaacctccacaagaaaaagccccggaacccactgatgccagaaagaagggagaaaaaagaaaggctgagtcaggatggtttcatgttgaagaagacagaaatacaaatgtatacgtgtctggtttgcctccagatattacagtggatgaatttatacaacttatgtccaagtttggcattattatgagagatcctcagacagaagaatttaaggtcaaactttacaaagataatcaaggaaatcttaaaggagacggtctttgctgttatttgaaaagagaatctgtggaacttgcattaaaacttttggatgaagatgaaattagaggctacaaattacatgttgaggtggcaaagtttcaactgaagggagaatatgatgcctcaaagaagaagaagaagtgcaaagactataagaagaagctgtctatgcaacaaaagcagttggattggagacctgagaggcgagccggaccatcccggatgcgccatgagcgagttgtcatcatcaagaatatgtttcatcctatggattttgaggatgatccgttggtgctgaatgagatcagagaagaccttcgagtagagtgttcgaagtttggacaaattaggaaactccttctctttgataggcacccagatggtgtggcctctgtgtcctttcgggatccagaggaagctgattattgtattcagactctcgatggaagatggtttggtggccgtcaaatcactgcccaggcatgggatgggactacagattatcaggtggaggaaacctcaagagaaagggaggaaaggctgagaggatgggaggctttcctcaatgctcctgaggccaacagaggccttaggcgttcagattctgtctctgcttccgaaagggcagggccttctagagcaaggcatttttcagagcaccccagcacatctaaaatgaatgctcaagaaactgcaactggaatggcgtttgaagaacctatagatgagaagaagtttgaaaagacagaagatgggggagaatttgaagaaggtgcttctgaaaacaatgctaaggaaagtagccccgaaaaagaggctgaagaaggctgccctgaaaaagaatctgaagagggctgccccaaaagagggtttgaaggcagctgctcccaaaaagagtctgaagaaggcaatcccgtaagaggatctgaagaggatagtcctaaaaaagagtctaaaaagaagacactcaaaaatgattgtgaagagaatggccttgcaaaggaatctgaagatgacctcaacaaggagtctgaagaggaggttggccccacaaaagagtccgaagaagatgactcagagaaagagtctgatgaagactgctctgaaaaacagtctgaagatggctccgaaagagaatttgaagaaaatggtctcgagaaagatttggacgaggaaggttctgaaaaggagcttcatgaaaatgttcttgacaaagagttagaagaaaatgactctgaaaactccgaatttgaagatgacggctctgaaaaagtgttagatgaggaaggctctgagagagagtttgacgaagattcagatgaaaaggaagaagaggaggatacatatgaaaaagtatttgatgatgagtctgatgagaaagaggatgaagaatatgcagatgaaaaggggcttgaagctgctgataaaaaggcggaagaaggtgatgcagatgaaaagctgtttgaagagtcagatgacaaggaagatgaagatgcagatggaaaggaagttgaagatgctgacgaaaagttgttcgaagatgatgattccaatgagaagttgtttgatgaggaggaagattccagtgagaagttgtttgacgattctgatgagagggggactttgggtggttttgggagtgttgaagaagggcccctatccactggcagcagctttattctcagtagcgatgatgatgacgatgatatttaatcccttaaacttgctttttagggagagtcctccatctacatttgcctgtgcttcagggtaattactagtagtgttacatgaacatgtgcatagtggtaggatgccatcagattaaagcattgaagtgtttcattgttacctgtacctaatggttttaaatatatgttaattgattgtttagttaaaatgtcatagttacaatgcaagtaaactggatacttgttcttttgtcagatttgttaaatgcatgcagaataatatttttaagagtattgattgaagtttgtgatattcatcaataaaaatgagttgataatatgcctaatatttaattttcttttatctttctacatattttttaataaaacctctgggtggggtcccgacccctattttgtcctt

SEQ ID NO: 342265 - DNA, 2758 bp, Homo sapiens
  misc_feature (3)..(4): n is a, c, g, or t
  misc_feature (7)..(8): n is a, c, g, or t
ggnncgnngcagccgccgagcggccgcgatttcccggggactgctggggcgcagcggggaggcgggccggggggcggcggggcgcgagcagagcgcggttgacctccctttctctgctcagctccagcgtcatttcggcctcttagttcttctgaaccctgctcctgagctaggtaggaaacatgagcggcaccaacttggatgggaacgatgagtttgatgagcagttgcgaatgcaagaattgtacggagacggcaaggatggtgacacccagaccgatgccggcggagaacccgattctctcgggcagcagccgacggacactccctacgagtgggacctggacaaaaaggcttggttccccaagattactgaagatttcattgctacatatcaggccaattatggcttctctaacgatggcgcatctagttctaccgcaaatgttgaagatgtccatgctaggactgcagaggaacctccacaagaaaaagccccggaacccactgatgccagaaagaagggagaaaaaagaaaggctgagtcaggatggtttcatgttgaagaagacagaaatacaaatgtatacgtgtctggtttgcctccagatattacagtggatgaatttatacaacttatgtccaagtttggcattattatgagagatcctcagacagaagaatttaaggtcaaactttacaaagataatcaaggaaatcttaaaggagacggtctttgctgttatttgaaaagagaatctgtggaacttgcattaaaacttttggatgaagatgaaattagaggctacaaattacatgttgaggtggcaaagtttcaactgaagggagaatatgatgcctcaaagaagaagaagaagtgcaaagactataagaagaagctgtctatgcaacaaaagcagttggattggagacctgagaggcgagccggaccatcccggatgcgccatgagcgagttgtcatcatcaagaatatgtttcatcctatggattttgaggatgatccgttggtgctgaatgagatcagagaagaccttcgagtagagtgttcgaagtttggacaaattaggaaactccttctctttgataggcacccagatggtgtggcctctgtgtcctttcgggatccagaggaagctgattattgtattcagactctcgatggaagatggtttggtggccgtcaaatcactgcccaggcatgggatgggactacagattatcaggtggaggaaacctcaagagaaagggaggaaaggctgagaggatgggaggctttcctcaatgctcctgaggccaacagaggccttaggcgttcagattctgtctctgcttccgaaagggcagggccttctagagcaaggcatttttcagagcaccccagcacatctaaaatgaatgctcaagaaactgcaactggaatggcgtttgaagaacctatagatgagaagaagtttgaaaagacagaagatgggggagaatttgaagaaggtgcttctgaaaacaatgctaaggaaagtagccccgaaaaagaggctgaagaaggctgccctgaaaaagaatctgaagagggctgccccaaaagagggtttgaaggcagctgctcccaaaaagagtctgaagaaggcaatcccgtaagaggatctgaagaggatagtcctaaaaaagagtctaaaaagaagacactcaaaaatgattgtgaagagaatggccttgcaaaggaatctgaagatgacctcaacaaggagtctgaagaggaggttggccccacaaaagagtccgaagaagatgactcagagaaagagtctgatgaagactgctctgaaaaacagtctgaagatggctccgaaagagaatttgaagaaaatggtctcgagaaagatttggacgaggaaggttctgaaaaggagcttcatgaaaatgttcttgacaaagagttagaagaaaatgactctgaaaactccgaatttgaagatgacggctctgaaaaagtgttagatgaggaaggctctgagagagagtttgacgaagattcagatgaaaaggaagaagaggaggatacatatgaaaaagtatttgatgatgagtctgatgagaaagaggatgaagaatatgcagatgaaaaggggcttgaagctgctgataaaaaggcggaagaaggtgatgcagatgaaaagctgtttgaagagtcagatgacaaggaagatgaagatgcagatggaaaggaagttgaagatgctgacgaaaagttgttcgaagatgatgattccaatgagaagttgtttgatgaggaggaagattccagtgagaagttgtttgacgattctgatgagagggggactttgggtggttttgggagtgttgaagaagggcccctatccactggcagcagctttattctcagtagcgatgatgatgacgatgatatttaatcccttaaacttgctttttagggagagtcctccatctacatttgcctgtgcttcagggtaattactagtagtgttacatgaacatgtgcatagtggtaggatgccatcagattaaagcattgaagtgtttcattgttacctgtacctaatggttttaaatatatgttaattgattgtttagttaaaatgtcatagttacaatgcaagtaaactggatacttgttcttttgtcagatttgttaaatgcatgcagaataatatttttaagagtattgattgaagccacgacggagggccgagctcgatta

SEQ ID NO: 342266 - DNA, 2968 bp, Homo sapiens
  misc_feature (3)..(4): n is a, c, g, or t
  misc_feature (7)..(8): n is a, c, g, or t
ggnncgnngcagccgccgagcggccgcgatttcccggggactgctggggcgcagcggggaggcgggccggggggcggcggggcgcgagcagagcgcggttgacctccctttctctgctcagctccagcgtcatttcggcctcttagttcttctgaaccctgctcctgagctaggtaggaaacatgagcggcaccaacttggatgggaacgatgagtttgatgagcagttgcgaatgcaagaattgtacggagacggcaaggatggtgacacccagaccgatgccggcggagaacccgattctctcgggcagcagccgacggacactccctacgagtgggacctggacaaaaaggcttggttccccaagattactgaagatttcattgctacatatcaggccaattatggcttctctaacgatggcgcatctagttctaccgcaaatgttgaagatgtccatgctaggactgcagaggaacctccacaagaaaaagccccggaacccactgatgccagaaagaagggagaaaaaagaaaggctgagtcaggatggtttcatgttgaagaagacagaaatacaaatgtatacgtgtctggtttgcctccagatattacagtggatgaatttatacaacttatgtccaagtttggcattattatgagagatcctcagacagaagaatttaaggtcaaactttacaaagataatcaaggaaatcttaaaggagacggtctttgctgttatttgaaaagagaatctgtggaacttgcattaaaacttttggatgaagatgaaattagaggctacaaattacatgttgaggtggcaaagtttcaactgaagggagaatatgatgcctcaaagaagaagaagaagtgcaaagactataagaagaagctgtctatgcaacaaaagcagttggattggagacctgagaggcgagccggaccatcccggatgcgccatgagcgagttgtcatcatcaagaatatgtttcatcctatggattttgaggatgatccgttggtgctgaatgagatcagagaagaccttcgagtagagtgttcgaagtttggacaaattaggaaactccttctctttgataggcacccagatggtgtggcctctgtgtcctttcgggatccagaggaagctgattattgtattcagactctcgatggaagatggtttggtggccgtcaaatcactgcccaggcatgggatgggactacagattatcaggtggaggaaacctcaagagaaagggaggaaaggctgagaggatgggaggctttcctcaatgctcctgaggccaacagaggccttaggcgttcagattctgtctctgcttccgaaagggcagggccttctagagcaaggcatttttcagagcaccccagcacatctaaaatgaatgctcaagaaactgcaactggaatggcgtttgaagaacctatagatgagaagaagtttgaaaagacagaagatgggggagaatttgaagaaggtgcttctgaaaacaatgctaaggaaagtagccccgaaaaagaggctgaagaaggctgccctgaaaaagaatctgaagagggctgccccaaaagagggtttgaaggcagctgctcccaaaaagagtctgaagaaggcaatcccgtaagaggatctgaagaggatagtcctaaaaaagagtctaaaaagaagacactcaaaaatgattgtgaagagaatggccttgcaaaggaatctgaagatgacctcaacaaggagtctgaagaggaggttggccccacaaaagagtccgaagaagatgactcagagaaagagtctgatgaagactgctctgaaaaacagtctgaagatggctccgaaagagaatttgaagaaaatggtctcgagaaagatttggacgaggaaggttctgaaaaggagcttcatgaaaatgttcttgacaaagagttagaagaaaatgactctgaaaactccgaatttgaagatgacggctctgaaaaagtgttagatgaggaaggctctgagagagagtttgacgaagattcagatgaaaaggaagaagaggaggatacatatgaaaaagtatttgatgatgagtctgatgagaaagaggatgaagaatatgcagatgaaaaggggcttgaagctgctgataaaaaggcggaagaaggtgatgcagatgaaaagctgtttgaagagtcagatgacaaggaagatgaagatgcagatggaaaggaagttgaagatgctgacgaaaagttgttcgaagatgatgattccaatgagaagttgtttgatgaggaggaagattccagtgagaagttgtttgacgattctgatgagagggggactttgggtggttttgggagtgttgaagaagggcccctatccactggcagcagctttattctcagtagcgatgatgatgacgatgatatttaatcccttaaacttgctttttagggagagtcctccatctacatttgcctgtgcttcagggtaattactagtagtgttacatgaacatgtgcatagtggtaggatgccatcagattaaagcattgaagtgtttcattgttacctgaagatggctccgaaagagaatttgaagaaaatggtctcgagaaagatttggacgaggaaggttctgaaaaggagcttcatgaaaatgttcttgacaaagagttagaagaaaatgactctgaaaactccgaatttgaagatgacggctctgaaaaagtgttagatgaggaaggctctgagagagagtttgacgaagattcagatggaaaggaagttgaagatgctgacgaaaagttgttcgaagatgatgattccaatgagctaagcaaggctgagcctcctcctgttgcttgaaataatgatgatataaaggctggatttggagtttgtatcccctggtccctctgggatgctcattaaaaccttcccactccttg

SEQ ID NO: 342267 - DNA, 1807 bp, Homo sapiens
  misc_feature (3)..(4): n is a, c, g, or t
  misc_feature (7)..(8): n is a, c, g, or t
ggnncgnngcagccgccgagcggccgcgatttcccggggactgctggggcgcagcggggaggcgggccggggggcggcggggcgcgagcagagcgcggttgacctccctttctctgctcagctccagcgtcatttcggcctcttagttcttctgaaccctgctcctgagctaggtaggaaacatgagcggcaccaacttggatgggaacgatgagtttgatgagcagttgcgaatgcaagaattgtacggagacggcaaggatggtgacacccagaccgatgccggcggagaacccgattctctcgggcagcagccgacggacactccctacgagtgggacctggacaaaaaggcttggttccccaagattactgaagatttcattgctacatatcaggccaattatggcttctctaacgatggcgcatctagttctaccgcaaatgttgaagatgtccatgctaggactgcagaggaacctccacaagaaaaagccccggaacccactgatgccagaaagaagggagaaaaaagaaaggctgagtcaggatggtttcatgttgaagaagacagaaatacaaatgtatacgtgtctggtttgcctccagatattacagtggatgaatttatacaacttatgtccaagtttggcattattatgagagatcctcagacagaagaatttaaggtcaaactttacaaagataatcaaggaaatcttaaaggagacggtctttgctgttatttgaaaagagaatctgtggaacttgcattaaaacttttggatgaagatgaaattagaggctacaaattacatgttgaggtggcaaagtttcaactgaagggagaatatgatgcctcaaagaagaagaagaagtgcaaagactataagaagaagctgtctatgcaacaaaagtttgtaatttttttcccttttgaaaggttccatatattctagagtatatttttggtaatagccatctagttttattctgtcaagtgtgcctacacattattttaaaataatttcattagctcatcaggtacctttagcaatctatacaataggtttagatttagcagtggtggggattttaattttccagagtgtctatttgtaatataataagggcttaaatgagctaagagaagccatctgtttggaaaacgttgaacatcaaattaaataagatagtttaggcttatgtaccagaaccgtttacttctgtgtggattgaaatcagtggtaccaggagctaaatttttctatacaggtttgttataggaattagaaatgacaggattttataattgtatttactgtagttgtatgtagtatatacataatgtcatcaagtttctattattattctgtttgtttaatatactttgaaatatactagttttaagaaattagtcaaaatgataaatacttttatcagagtaaattctaatgacacttctaacaccatgcttaaactaattaaatatcataaaagcatttagttgtgatgtctcattgtttttacaagtgtaggtaaaattgataaccacatattttttaaacaatatcagtaaaatttatgattgtaacagagttgagtagttttatgtatttgagtgcagtttgttttttataatgataaagtacctaaaaaccaatacaatttaaatatattttttagcctcaaggtatatctttctgaactcataaatactaagaattagagatttttcaagggtctcattggaatgtttgtataatcagacaacagttgccctgaaaaacatttcatctggggattt

SEQ ID NO: 342268 - DNA, 762 bp, Homo sapiens
ttttcaggacagcagctcttacaggtagtatactgttcaaatctctcttgtttttcaatctgtgccttgactttaaaaattgatccttcatagtcactccgactggcagcagctttattctcagtagcgatgatgatgacgatgatatttaatcccttaaacttgctttttagggagagtcctccatctacatttgcctgtgcttcagggtaattactagtagtgttacatgaacatgtgcatagtggtaggatgccatcagattaaagcattgaagtgtttcattgttacctgtacctaatggttttaaatatatgttaattgattgtttagttaaaatgtcatagttacaatgcaagtaaactggatacttgttcttttgtcagatttgttaaatgcatgcagaataatatttttaagagtattgattgaagtttgtgatattcatcaataaaaatgagttgataatatgcagaaactgaaaattggacttgagttaaattgcattttaaattcttgatattgctttatttatactgaaggttggcttttctgaggacttgaagaatctctttggagtctccttgcttcccgctggtattagcacgtatgtctccatttcctctctataaaccagaacatgttcctaaactcagaaaacaaccctctggattttttttttctgcccagtccttgcaaattaactcttgtttgttttctaccctctttccattaaaattgactctcagatgtgcaaaagtg

SEQ ID NO: 342269 - DNA, 3137 bp, Homo sapiens
gccacgcgccgacaatggcggctgcgtcggcctgagcagggcttagtttagaagtaatttcctgacgttgccgagggagccgcagtcgcctcagatccggtcggcggcggcggcggtggcggcggcggcagcgcgcctgcgcgctcccgcagcgccctggacctagcggcggtgccgaggcccggcggagcaagccagctccagcgtcatttcggcctcttagttcttctgaaccctgctcctgagctaggtaggaaacatgagcggcaccaacttggatgggaacgatgagtttgatgagcagttgcgaatgcaagaattgtacggagacggcaaggatggtgacacccagaccgatgccggcggagaacccgattctctcgggcagcagccgacggacactccctacgagtgggacctggacaaaaaggcttggttccccaagattactgaagatttcattgctacatatcaggccaattatggcttctctaacgatggcgcatctagttctaccgcaaatgttgaagatgtccatgctaggactgcagaggaacctccacaagaaaaagccccggaacccactgatgccagaaagaagggagaaaaaagaaaggctgagtcaggatggtttcatgttgaagaagacagaaatacaaatgtatacgtgtctggtttgcctccagatattacagtggatgaatttatacaacttatgtccaagtttggcattattatgagagatcctcagacagaagaatttaaggtcaaactttacaaagataatcaaggaaatcttaaaggagacggtctttgctgttatttgaaaagagaatctgtggaacttgcattaaaacttttggatgaagatgaaattagaggctacaaattacatgttgaggtggcaaagtttcaactgaagggagaatatgatgcctcaaagaagaagaagaagtgcaaagactataagaagaagctgtctatgcaacaaaagcagttggattggagacctgagaggcgagccggaccatcccggatgcgccatgagcgagttgtcatcatcaagaatatgtttcatcctatggattttgaggatgatccgttggtgctgaatgagatcagagaagaccttcgagtagagtgttcgaagtttggacaaattaggaaactccttctctttgataggcacccagatggtgtggcctctgtgtcctttcgggatccagaggaagctgattattgtattcagactctcgatggaagatggtttggtggccgtcaaatcactgcccaggcatgggatgggactacagattatcaggtggaggaaacctcaagagaaagggaggaaaggctgagaggatgggaggctttcctcaatgctcctgaggccaacagaggccttaggcgttcagattctgtctctgcttccgaaagggcagggccttctagagcaaggcatttttcagagcaccccagcacatctaaaatgaatgctcaagaaactgcaactggaatggcgtttgaagaacctatagatgagaagaagtttgaaaagacagaagatgggggagaatttgaagaaggtgcttctgaaaacaatgctaaggaaagtagccccgaaaaagaggctgaagaaggctgccctgaaaaagaatctgaagagggctgccccaaaagagggtttgaaggcagctgctcccaaaaagagtctgaagaaggcaatcccgtaagaggatctgaagaggatagtcctaaaaaagagtctaaaaagaagacactcaaaaatgattgtgaagagaatggccttgcaaaggaatctgaagatgacctcaacaaggagtctgaagaggaggttggccccacaaaagagtccgaagaagatgactcagagaaagagtctgatgaagactgctctgaaaaacagtctgaagatggctccgaaagagaatttgaagaaaatggtctcgagaaagatttggacgaggaaggttctgaaaaggagcttcatgaaaatgttcttgacaaagagttagaagaaaatgactctgaaaactccgaatttgaagatgacggctctgaaaaagtgttagatgaggaaggctctgagagagagtttgacgaagattcagatgaaaaggaagaagaggaggatacatatgaaaaagtatttgatgatgagtctgatgagaaagaggatgaagaatatgcagatgaaaaggggcttgaagctgctgataaaaaggcggaagaaggtgatgcagatgaaaagctgtttgaagagtcagatgacaaggaagatgaagatgcagatggaaaggaagttgaagatgctgacgaaaagttgttcgaagatgatgattccaatgagaagttgtttgatgaggaggaagattccagtgagaagttgtttgacgattctgatgagagggggactttgggtggttttgggagtgttgaagaagggcccctatccactggcagcagctttattctcagtagcgatgatgatgacgatgatatttaatcccttaaacttgctttttagggagagtcctccatctacatttgcctgtgcttcagggtaattactagtagtgttacatgaacatgtgcatagtggtaggatgccatcagattaaagcattgaagtgtttcattgttacctgtacctaatggttttaaatatatgttaattgattgtttagttaaaatgtcatagttacaatgcaagtaaactggatacttgttcttttgtcagatttgttaaatgcatgcagaataatatttttaagagtattgattgaagtttgtgatattcatcaataaaaatgagttgataatatgcagaaactgaaaattggacttgagttaaattgcattttaaattcttgatattgctttatttatactgaaggttggcttttctgaggacttgaagaatctctttggagtctccttgcttcccgctggtattagcacgtatgtctccatttcctctctataaaccagaacatgttcctaaactcagaaaacaaccctctggattttttttttctgcccagtccttgcaaattaactcttgtttgttttctaccctctttccattaaaattgactctcagatgtgcaaaagtg

SEQ ID NO: 342270 - DNA, 3027 bp, Homo sapiens
  misc_feature (3)..(4): n is a, c, g, or t
  misc_feature (7)..(8): n is a, c, g, or t
ggnncgnngcagccgccgagcggccgcgatttcccggggactgctggggcgcagcggggaggcgggccggggggcggcggggcgcgagcagagcgcggttgacctccctttctctgctcagctccagcgtcatttcggcctcttagttcttctgaaccctgctcctgagctaggtaggaaacatgagcggcaccaacttggatgggaacgatgagtttgatgagcagttgcgaatgcaagaattgtacggagacggcaaggatggtgacacccagaccgatgccggcggagaacccgattctctcgggcagcagccgacggacactccctacgagtgggacctggacaaaaaggcttggttccccaagattactgaagatttcattgctacatatcaggccaattatggcttctctaacgatggcgcatctagttctaccgcaaatgttgaagatgtccatgctaggactgcagaggaacctccacaagaaaaagccccggaacccactgatgccagaaagaagggagaaaaaagaaaggctgagtcaggatggtttcatgttgaagaagacagaaatacaaatgtatacgtgtctggtttgcctccagatattacagtggatgaatttatacaacttatgtccaagtttggcattattatgagagatcctcagacagaagaatttaaggtcaaactttacaaagataatcaaggaaatcttaaaggagacggtctttgctgttatttgaaaagagaatctgtggaacttgcattaaaacttttggatgaagatgaaattagaggctacaaattacatgttgaggtggcaaagtttcaactgaagggagaatatgatgcctcaaagaagaagaagaagtgcaaagactataagaagaagctgtctatgcaacaaaagcagttggattggagacctgagaggcgagccggaccatcccggatgcgccatgagcgagttgtcatcatcaagaatatgtttcatcctatggattttgaggatgatccgttggtgctgaatgagatcagagaagaccttcgagtagagtgttcgaagtttggacaaattaggaaactccttctctttgataggcacccagatggtgtggcctctgtgtcctttcgggatccagaggaagctgattattgtattcagactctcgatggaagatggtttggtggccgtcaaatcactgcccaggcatgggatgggactacagattatcaggtggaggaaacctcaagagaaagggaggaaaggctgagaggatgggaggctttcctcaatgctcctgaggccaacagaggccttaggcgttcagattctgtctctgcttccgaaagggcagggccttctagagcaaggcatttttcagagcaccccagcacatctaaaatgaatgctcaagaaactgcaactggaatggcgtttgaagaacctatagatgagaagaagtttgaaaagacagaagatgggggagaatttgaagaaggtgcttctgaaaacaatgctaaggaaagtagccccgaaaaagaggctgaagaaggctgccctgaaaaagaatctgaagagggctgccccaaaagagggtttgaaggcagctgctcccaaaaagagtctgaagaaggcaatcccgtaagaggatctgaagaggatagtcctaaaaaagagtctaaaaagaagacactcaaaaatgattgtgaagagaatggccttgcaaaggaatctgaagatgacctcaacaaggagtctgaagaggaggttggccccacaaaagagtccgaagaagatgactcagagaaagagtctgatgaagactgctctgaaaaacagtctgaagatggctccgaaagagaatttgaagaaaatggtctcgagaaagatttggacgaggaaggttctgaaaaggagcttcatgaaaatgttcttgacaaagagttagaagaaaatgactctgaaaactccgaatttgaagatgacggctctgaaaaagtgttagatgaggaaggctctgagagagagtttgacgaagattcagatgaaaaggaagaagaggaggatacatatgaaaaagtatttgatgatgagtctgatgagaaagaggatgaagaatatgcagatgaaaaggggcttgaagctgctgataaaaaggcggaagaaggtgatgcagatgaaaagctgtttgaagagtcagatgacaaggaagatgaagatgcagatggaaaggaagttgaagatgctgacgaaaagttgttcgaggaggaagattccagtgagaagttgtttgacgattctgatgagagggggactttgggtggttttgggagtgttgaagaagggcccctatccactggcagcagctttattctcagtagcgatgatgatgacgatgatatttaatcccttaaacttgctttttagggagagtcctccatctacatttgcctgtgcttcagggtaattactagtagtgttacatgaacatgtgcatagtggtaggatgccatcagattaaagcattgaagtgtttcattgttacctgtacctaatggttttaaatatatgttaattgattgtttagttaaaatgtcatagttacaatgcaagtaaactggatacttgttcttttgtcagatttgttaaatgcatgcagaataatatttttaagagtattgattgaagtttgtgatattcatcaataaaaatgagttgataatatgcagaaactgaaaattggacttgagttaaattgcattttaaattcttgatattgctttatttatactgaaggttggcttttctgaggacttgaagaatctctttggagtctccttgcttcccgctggtattagcacgtatgtctccatttcctctctataaaccagaacatgttcctaaactcagaaaacaaccctctggattttttttttctgcccagtccttgcaaattaactcttgtttgttttctaccctctttccattaaaattgactctcagatgtgcaaaagtg

SEQ ID NO: 342271 - DNA, 2350 bp, Homo sapiens
atacttacctggcaggggagataccatgatcacgaaggtggttttcccagggcgaggcttatccattgcactccggatgtgctgacccctgcgatttccccaaatgtgggaaactcgactgcataatttgtggtagtgggggactgcgttcgcgctttcccctggaagtgcaaagactataagaagaagctgtctatgcaacaaaagcagttggattggagacctgagaggcgagccggaccatcccggatgcgccatgagcgagttgtcatcatcaagaatatgtttcatcctatggattttgaggatgatccgttggtgctgaatgagatcagagaagaccttcgagtagagtgttcgaagtttggacaaattaggaaactccttctctttgataggcacccagatggtgtggcctctgtgtcctttcgggatccagaggaagctgattattgtattcagactctcgatggaagatggtttggtggccgtcaaatcactgcccaggcatgggatgggactacagattatcaggtggaggaaacctcaagagaaagggaggaaaggctgagaggatgggaggctttcctcaatgctcctgaggccaacagaggccttaggcgttcagattctgtctctgcttccgaaagggcagggccttctagagcaaggcatttttcagagcaccccagcacatctaaaatgaatgctcaagaaactgcaactggaatggcgtttgaagaacctatagatgagaagaagtttgaaaagacagaagatgggggagaatttgaagaaggtgcttctgaaaacaatgctaaggaaagtagccccgaaaaagaggctgaagaaggctgccctgaaaaagaatctgaagagggctgccccaaaagagggtttgaaggcagctgctcccaaaaagagtctgaagaaggcaatcccgtaagaggatctgaagaggatagtcctaaaaaagagtctaaaaagaagacactcaaaaatgattgtgaagagaatggccttgcaaaggaatctgaagatgacctcaacaaggagtctgaagaggaggttggccccacaaaagagtccgaagaagatgactcagagaaagagtctgatgaagactgctctgaaaaacagtctgaagatggctccgaaagagaatttgaagaaaatggtctcgagaaagatttggacgaggaaggttctgaaaaggagcttcatgaaaatgttcttgacaaagagttagaagaaaatgactctgaaaactccgaatttgaagatgacggctctgaaaaagtgttagatgaggaaggctctgagagagagtttgacgaagattcagatgaaaaggaagaagaggaggatacatatgaaaaagtatttgatgatgagtctgatgagaaagaggatgaagaatatgcagatgaaaaggggcttgaagctgctgataaaaaggcggaagaaggtgatgcagatgaaaagctgtttgaagagtcagatgacaaggaagatgaagatgcagatggaaaggaagttgaagatgctgacgaaaagttgttcgaagatgatgattccaatgagaagttgtttgatgaggaggaagattccagtgagaagttgtttgacgattctgatgagagggggactttgggtggttttgggagtgttgaagaagggcccctatccactggcagcagctttattctcagtagcgatgatgatgacgatgatatttaatcccttaaacttgctttttagggagagtcctccatctacatttgcctgtgcttcagggtaattactagtagtgttacatgaacatgtgcatagtggtaggatgccatcagattaaagcattgaagtgtttcattgttacctgtacctaatggttttaaatatatgttaattgattgtttagttaaaatgtcatagttacaatgcaagtaaactggatacttgttcttttgtcagatttgttaaatgcatgcagaataatatttttaagagtattgattgaagtttgtgatattcatcaataaaaatgagttgataatatgcagaaactgaaaattggacttgagttaaattgcattttaaattcttgatattgctttatttatactgaaggttggcttttctgaggacttgaagaatctctttggagtctccttgcttcccgctggtattagcacgtatgtctccatttcctctctataaaccagaacatgttcctaaactcagaaaacaaccctctggattttttttttctgcccagtccttgcaaattaactcttgtttgttttctaccctctttccattaaaattgactctcagatgtgcaaaagtg

SEQ ID NO: 342272 - DNA, 878 bp, Homo sapiens
  misc_feature (26)..(26): n is a, c, g, or t
gtctctagaggatccacatacattgnctgatgacaaggaagatgaagatgcagatggaaaggaagttgaagatgctgacgaaaagttgttcgaagatgatgattccaatgagaagttgtttgatgaggaggaagattccagtgagaagttgtttgacgattctgatgagagggggactttgggtggttttgggagtgttgaagaagggcccctatccactggcagcagctttattctcagtagcgatgatgatgacgatgatatttaatcccttaaacttgctttttagggagagtcctccatctacatttgcctgtgcttcagggtaattactagtagtgttacatgaacatgtgcatagtggtaggatgccatcagattaaagcattgaagtgtttcattgttacctgtacctaatggttttaaatatatgttaattgattgtttagttaaaatgtcatagttacaatgcaagtaaactggatacttgttcttttgtcagatttgttaaatgcatgcagaataatatttttaagagtattgattgaagtttgtgatattcatcaataaaaatgagttgataatatgcagaaactgaaaattggacttgagttaaattgcattttaaattcttgatattgctttatttatactgaaggttggcttttctgaggacttgaagaatctctttggagtctccttgcttcccgctggtattagcacgtatgtctccatttcctctctataaaccagaacatgttcctaaactcagaaaacaaccctctggattttttttttctgcccagtccttgcaaattaactcttgtttgttttctaccctctttccattaaaattgactctcagatgtgcaaaagtg

SEQ ID NO: 342273 - DNA, 788 bp, Homo sapiens
agccaggccactcatcagagtccgggagccactggcagagagggcacggccccacactgccccagagacatataggagccaggcaaacaccagggcgagtgagctcgggccatctgctgcctgcctgtggaaggagcgctcgccagcctcacccagcccgagaaggtccacctctgcctccgccggagctgccctcattctggctccagtaagtgctgcttcttcctcctgggtttttttccactaccctattcagtaaccaggccactcctgtccctgtgggaaactcttgctgccaggaactcccagctgtctgctctcctgggcaaaaaagttccttcttcctgagccctcctctcaccatccaagatgtggtcaaaggtctgtgctgagtggaaaccctgaggcctctgctcctaggggagcctccccagctgctggcactcactgccccagcagggaccacatgcaccctggctgctcctgaacacctgtctgctggctcccctgggccccatggagacctggcggaaaggctccttccgcaacgcctccttcttcaagcagctgagcctggggcggccacggcggctccggcgacagagtagtgtgcttagccaggccagcacagcaggtggggaccacgaggagtacagcaaccgagaagtcatccgggagctacaagggaggccagatggccggcgcctgccactgtggggggacgagcagccccgggcccccctgctggccccacccaagcccccacgcctctaccgagagagctcaag

SEQ ID NO: 342274 - DNA, 242 bp, Homo sapiens
ttccatggcgcttaactcttgatccccaagtaggatcgtagccttggaggtggcttggtcattctctcagacaatcactcagaaaatcgttttgactaatcaccttcgtactggctctgactgaccaaccaccctttgtactggccacactgacaaacccatggaggggatgagagtttaagttccgtttgagaattgtctttcctggtttctctctttaagattacagttaaggataggtg

SEQ ID NO: 342275 - DNA, 799 bp, Homo sapiens
ggtagagtaagaaatcagaaactacactcggcatttcaacagaaagaattgattataaagtattggttaaataggcattcatgaaatggaaaggcaaagagaaccccaaggtgatgcagagataataacgtctggaagcagctttctcctgctagttttgagagaaaaagtgaagaggctgcagttatcagaatagagaattgtggagcaggggctctgaggaattggacctcacacttgtgaggatggggtgctgcccagctggtgccagtaactcaggagctcagaaggtgggtcttccaaggtagagcgctgccaatgagggtggttccaggagtgccataagaaagctggcacaagacccagtgcttccagcattaagggtcattgctggggctgcgctgatgggaacaacaaatggaacaaaagcatgtcccattcttctctttctgccgtcccatcctcatctattgcttcaatcagcagaatctgcaggaagccagcaggtagatgagaaatgtagtttgcagagtgccacagcctcagtaagcagggtcaagaagggtgggctcagagctaagagacagtatagtttaatttctggcacaaccaggtagtcaacaaaggacttctatccagaatacagactatcttgataagaaaatagccaaaaggagaggagaaaaataagcaaagaacttgacaagcatttcttagaagtaacaggaaagactactagacatatacaaaatgcttaacctcagtggtaatcaggtaaatgcaatttaaaatggaatac

SEQ ID NO: 342276 - DNA, 684 bp, Homo sapiens
atcatgtgcccactaagaaagacacctgtggggctgcagtggccagccatgccctcagcacggcacaaattctgtttgtgccactgaatctctccccaaagggctgctgagaggcctgtttctatagctgggctgggaatgagacagagccccttgcaggctttagagctcttcctgttgattcaggactaaaagcttttcattcaacttgtgatgtcagaaagctgggtgactgaccgccactgcacagtgacttgatggcccctttgaagcacaggcccacaaggatttgcaggtaaattgcaaatggccaatatccagtacaaacagccacccactgtgcctgtccccctggcagccactgcttttggattactgccccttcacccttggtaatgcaggcacacgggcacgcagtgcgggactggtgggcaactctgcccacggccaggcacaggatccactaggcaaagccagctgggcttctgagtcaggtggggacttggagaacttttatgtctagctggaggattgtatatgcaccaatcagcactctgtgtctagctgggggtttgtggatgcaccagtcaccactctgtatctagctaatctggtggggacttggagaacttttatgtctagctagaggattgtaaatgcaccaatcagcactctgtgtctagc

SEQ ID NO: 342277 - DNA, 382 bp, Homo sapiens
  misc_feature (366)..(366): n is a, c, g, or t
acttgttaccgcgatcgcttagactagattttctgagaatacctagttttactctcaataagccattaagtcctacattactggatcccacccacactagaaagatattcctgctattacccagagtccatagtccatagtaaagatccttcatccaagcaatgataatgataaaaactcagtctcgtctgtaagaactcccaaccaaaagaagttaaattaaatcaaatacccagaaggaccaaacaactagacagtgctaaccagataggaggtccaaaaaacaaaaaaatcacttaccggccgggcgtggtggctcaagcctgtaatcccagcactttctatggcttcttatcagtgcttatncccttaagcggatcag

SEQ ID NO: 342278 - DNA, 297 bp, Homo sapiens
tgtttttgagatggagtcttgctctgtcgcccagatgcaatgccgtcatctcggctcactgcactccagcatgggtgacagagctagactcagtaccccacacacacacacacaacaaaaaaatcacctaccaatagcacagtccctggaatgatttcttctactgtaaactgactaaagaaatacaatttggaattatgattcttaagaggttaagtgtataggctttgttatctgcctgggtttaagtataagatctatccttattagctatatgactttgggcaaagtatcaac

SEQ ID NO: 342279 - DNA, 718 bp, Homo sapiens
acttgttaccgcgatcgcttagactagattttctgagaatacctagttttactctcaataagccattaagtcctacattactggatcccacccacactagaaagatattcctgctattacccagagtccatagtccatagtaaagatccttcatccaagcaatgataatgataaaaactcagtctcgtctgtaagaactcccaaccaaaagaagttaaattaaatcaaatacccagaaggaccaaacaactagacagtgctaaccagataggaggtccaaaaaacaaaaaaatcacttaccggccgggcgtggtggctcaagcctgtaatcccagcactttgggaggccgaggtgagcggatcacaaggtcaggggtttgagaccggcctgaccaacatggtgaaaccccgtctctactaaaaataaaaaattagccaggcttggtggtgcacacctgtaatcccagctactcaggaggctgaggcaggagaatcacttgaacccgggaggcggaggttgcagtgagccgagatcatgccgctgcactccagcatgggtgacagagctagactcagtaccccacacacacacacacaacaaaaatacaatttggaattatgattcttaagaggttaagtgtataggctttgttatctgcctgggtttaagtataagatctatccttattagctatatgactttgggcaaagtatcaac

SEQ ID NO: 342280 - DNA, 683 bp, Homo sapiens
ggccactttgatgccatttgctaagacctacagctacctgacccccgacctctggaaggagactgtattcaccaagtctccctatcaggagtccatagtccatagtaaagatccttcatccaagcaatgataatgataaaaactcagtctcgtctgtaagaactcccaaccaaaagaagttaaattaaatcaaatacccagaaggaccaaacaactagacagtgctaaccagataggaggtccaaaaaacaaaaaaatcacttaccggccgggcgtggtggctcaagcctgtaatcccagcactttgggaggccgaggtgagcggatcacaaggtcaggggtttgagaccggcctgaccaacatggtgaaaccccgtctctactaaaaataaaaaattagccaggcttggtggtgcacacctgtaatcccagctactcaggaggctgaggcaggagaatcacttgaacccgggaggcggaggttgcagtgagccgagatcatgccgctgcactccagcatgggtgacagagctagactcagtaccccacacacacacacacaacaaaaatacaatttggaattatgattcttaagaggttaagtgtataggctttgttatctgcctgggtttaagtataagatctatccttattagctatatgactttgggcaaagtatcaac

SEQ ID NO: 342281 - DNA, 345 bp, Homo sapiens
acttgttaccgcgatcgcttagactagattttctgagaatacctagttttactctcaataagccattaagtcctacattactggatcccacccacactagaaagatattcctgctattacccagagtccatagtccatagtaaagatccttcatccaagcaatgataatgataaaaactcagtctcgtctgtaagaactcccaaccaaaagaagttaaattaaatcaaatacccagaaggaccaaacaactagacagtgctaaccagataggaggtccaaaaaacaaaaaaatcacttaccggccgggcgtggtgggtatcaaaggggtaccgaagctcggaaat

SEQ ID NO: 342282 - DNA, 383 bp, Homo sapiens
actcagctctcatcttcaagaagtgcactgagtttacggggataataagagagatatccattccagactgagcatacacaacccacattccacagacattagaaggaaagagaaaggagtcgaagggaagtgctagcttcaagaagcaagagaatggagccctatttccagctttgccaccaactggaaagtcatttgccctctctgggtcctagtttcctcatctgtataagaaaggactaggaccagagctcctccaatgtgcctgtgcagcaaacctctgacagtctatgggatttggaaattcagaggaggtggatgtcaatgttggcagaggtattgtggacatgtatcctcaaggatgtggaagttgagttgtccct

SEQ ID NO: 342283 - DNA, 225 bp, Homo sapiens
aaaaccagtatttggacagaaagaaaaagactttacaactcttcagcccttttagatgttgacataaatttggaactcgttctttgtttccctgaaaggagcatatattataaattataaaatacatgatttttaattgtattgtatttagtagctctgtctgtcatgagagtaatgccacgtatttctagcttacagtttattttttatctagtcaaaaactga

SEQ ID NO: 342284 - DNA, 191 bp, Homo sapiens
aattgtgttgcagtttttaacattcataacacatttcttgaataagctgcaaatgcttttaataatatatctcagagttaattttagctatgctacattggcactttttgctcctccacttcaaaaaaccaacacaagaaactattctcaaatcaagctgtgatttggatggggcattgtattttcctcaa

SEQ ID NO: 342285 - DNA, 4963 bp, Homo sapiens
  misc_feature (2720)..(2720): n is a, c, g, or t
  misc_feature (2909)..(2909): n is a, c, g, or t
  misc_feature (2916)..(2916): n is a, c, g, or t
  misc_feature (2924)..(2924): n is a, c, g, or t
  misc_feature (2966)..(2966): n is a, c, g, or t
  misc_feature (3181)..(3181): n is a, c, g, or t
  misc_feature (3376)..(3376): n is a, c, g, or t
  misc_feature (3509)..(3509): n is a, c, g, or t
  misc_feature (4041)..(4041): n is a, c, g, or t
  misc_feature (4046)..(4046): n is a, c, g, or t
  misc_feature (4122)..(4122): n is a, c, g, or t
  misc_feature (4128)..(4128): n is a, c, g, or t
  misc_feature (4144)..(4144): n is a, c, g, or t
  misc_feature (4306)..(4306): n is a, c, g, or t
  misc_feature (4333)..(4333): n is a, c, g, or t
  misc_feature (4347)..(4347): n is a, c, g, or t
  misc_feature (4391)..(4391): n is a, c, g, or t
  misc_feature (4409)..(4409): n is a, c, g, or t
  misc_feature (4443)..(4443): n is a, c, g, or t
  misc_feature (4512)..(4512): n is a, c, g, or t
  misc_feature (4553)..(4554): n is a, c, g, or t
  misc_feature (4870)..(4870): n is a, c, g, or t
  misc_feature (4914)..(4914): n is a, c, g, or t
agatgacacactgaacaaaaaaacttctcctggagtaaaatcatgtgaaagcagtgtgtgtggagaagtcttcgtgggtcattcttcccttaataggcacattagagctgacactgcacacaagccgtctgagtatcaggaatatggacaggagccatataagtgtcaacaacgtaagaaagccttcagatgtcacccctcctttcaaatgcaagaaaaggctcacactggagaaaaactctatgattgtaaagaatgtggaaaaaccttcatatcccattcaagcattcaaagacacatgataatgcacaatggagatggaacttataaatgtaagttttgtgggaaagcctgcccttgtctcagcatatatcttatacatgaacgagttcacactggagagaaaccatataaatgtaaacaatgtggtaaagcctttagttattcaacttcccttcaaatacatgaaagaactcacactggagagaagccttatgaatgtaaggaatgtgggaaagcattcggtagtcccaattccctttatgaacatagaagaactcacactggagagaagccatatgaatgcaaacaatgtggaaaagccttcagatggttccattcctttcaaatacatgaaagaactcacagtgaggagaaggcttatgaatgtaccaaatgtgggaaagcattcaagtgtcccagttatctttgtagacatgaagtgacccactctgggaaaaagccctgtgaatgtaaacaatgtgggaaagcattatcttatcttaactttcaaagacacatgaaaatgcacactagaatgagaccttataaatgtaagactgtggaaaagcctttgattctcccagttcgttttgaagacatgaaagaactcacactggagagaaaccttatgaatgcaagcactgtggtaaagccttcaatcgttccagttcctttcactatcatgaaaggactcacactggagagaaaccctatgaatgtaagcagtgtagtaaagccttcatttcttccacttcctttcgatatcatgaaaggactcacactggagagaaaccgtatgagtgtaagcaatgtgggaaagccttcagatctgcctcacaccttcaaatgcatggaaggactcacactcaagagaaaccctatgaatgtaagcagtgtggtaaagccttcattttttccacttcctttcgatatcatgaaaggactcacactggagagaaaccctatgagtgtaagcaatgtgggaaagccttcacatctgcctcacaccttcaaatgcatgaaaggactcacactggaaagcaactgtatgaatctaaacaatgtgaaaaaacctttggatctgtcagaaaccttcaaattcatgaaaagacacaccctggagagaaaccctataaggaatatggaaaagcattcaacaatttctcttcctttcaaatacatgcaacaatgcacagaggacagaatgcctatgaatgtaaagagtgtgacaaagcattcatatctgccaagatccttcgagtacatgcaagaacacaccctggagagaaaccctatgaatgtaaggaatgcggaaaagcgttcaattatttttcttctttgcgtatacacaaaaggatgcacactggagagaaaccatattaatgtaaggattgtgggaaagcattcagtttgcctggttcctttcgtagacataaaagggctcacactggagtgaaaccgtatgaatgcaaggaatgtggcaaagccttcacttcttctggttcctttcagtgtcataaaaggattcacactggagagaaaccctatgagtgtaagcagtgtggtaaagccttcatttcttccactgccattcgtagacatgaaaggactcacactggagagaaaccctatgagtgtaagcaatgtggaaaagcctttatttctttcagttccattcagtaccatgaaaggactcacactggagagaaacagtatgagtgtaagcagtgtggtaaagccttcatgtcttctactgcatttcagtatcatgaaaagacccacaccagagagaaacactatgaatgtaagcagtgtgggaaagccttcatttcttccggtagccttcgatatcatgaaaggactcacactggagagaaaccctatgaatgtaagcagtgtggtaaagccttcagatctgccactcaacttcagatgcatagaaagattcacactggcgagaaaccctatgaatgtaagcaatgtgggaaagcctacagatctgtctcacaacttctggtgcatgaaaggactcacactgtagagcaaccctatgaatataagcaatatgggaaagccttcagatttgctaagaaccttcaaatacagacaatgaatgtaaacaattaaatgtttatagcagctgcatactaacatgttattctgtattttttttttctttttgagacagagtctcgctctgtcacccaggctggagtgcagtggcgtgatctcggctcactgcaagctccacctcctgggttcacgccattctcctgcctcagtctcctgagtagctgggactacaggtgcctgccaccacacccggctgattttttgtattttttagtagagacggagtttcatcgtgttagccaggatggtctcaatctcctgacctcgtgatctgcccgcctcagtctcccaaagtgctgggattncaggtatgagccaccgtgcccggccgttattctctattttttgttgttgtttgagatgagtcttgttctgttgcccaggctggagtgcagtggcatgatctcgcctccgggttcaagcaattctcctgcctcaggctcctgaggaaaaagattcctaggattacaggtgtgcaccaccacacttggctnatttttntatttttngtagagatgaggtctcaccctattggccacactggtcttganctcctgacctgaagtgatccacctgccttagcctcccaaagtgctgggatgacaggcatgagccactgcacccagctgttattctctatttaattaattgagaagccataataaaatatctcagtgccatcatgcattagatcaagtttatgttaccacattattttttggacattgtgagtcaatattaccaagtggacaaaatcccaggcatntttttcctcatgtaaattttaattttcatgcttatatacttagaacatttatcttggtcctaattttttgttcattcataataccaaaagttatctcatgttcttcagagtgactttgtgccatatcccacagtggcatacctgtcttcaaagagggtataattcacaaaaggacttacactagaggaaaacccnatgaatgtaagctgcgtgggaaagcattttctgatctgagtggcattgaaacccacatggtattgcacatgacagataggcctctctccccgttcatttctttttttttgagacggagtcttgctctgtcgcngaggctgagaacagtggttccatctctgttcactgccacctccacctcctgggttcaagtgattctcctgccccagcctcccaagtagctgggattacaggtgaccgccaccacgcccagctaatttttgtatttttagtagagacggggcttcactatgttggccaggttcgtctcgaactcctgacctcaggtgatccacctgcctcagcctcccaaagtgctgtgcatacaggcatgagccactgcacccggccttctccccattcattttcaaagacataaaaggatgcacaataaagagagaccctctgaatgcaagcaatatggaaaagcattccattgtatcagatccttttgtagccatgaaagaactcgctgaagagaaaccctgtaaatgaagggaatgtgaaaagccttcattcctgaaatgaagcaattcatactattaatatatgagagaaatcctattataagaaattgattgctgtgcacggtagcttacctgtaattccagcacttccagaggctnaggcnggtggatcacttgaggtcaggagttcaataccagcctgggcaacatagtgaaaccctgtctctaccaaaaatacanaaattngccaggcatggtggcncgtgcctgtagtcccagctactcaggaggctgaggcaggagaatcacttgaacccaggagctggatgttgcagtgacccgagattacgccactgtaccccagcagagtgagactccatctgaaaaaaaaagcaaggggccggcacggtggttcacgcctgtnatcccagcactttgggagaccaaggcnggcagatcacctgnggtcaggagttcgagaccagcctggctaacatggcaaaaccccntcgctactaaaaatacanaaaattagatgggcatggtggcacatgcctgtantcccagctacatgggagactgaggcaggagaattgcttgaacctgggaggcggaggttgcagtgagccnagatcacagcattgcacttcagcctgggcaacaagagtgannctccatctcaaaaaaaaaaaaaaaaaaaattgaggaagcattcagttgtcccacttcctttcaaacaggaagagacactagagagaaaccctctgagataactgactgttgaattaagaagagaggcctggccggacacagtggctcacgcctgtaatcccagcactttgggaggctgaggtgggcggatcacgaggtcaggagatcaagaccatcctggctgacacggtgaaaccccgtctctactaaaaaatacaaaaaaactagctgggcgtggtggtgggcgcctgtagtcccagctactcgggaggctgangcaggagaatggcgtgaatccaggaggcagagcttgcagtgaancgagatcgcgccactgcactccagcggcgacagagcaagactccgtctc

SEQ ID NO: 342286 - DNA, 99 bp, Homo sapiens
acctgatgtcagctggcaaaggagagacattgaccacgtccagctcccgtaattcaaaggaaggcaaagaagggtatctgcagctgagaggtaacacat

SEQ ID NO: 342287 - DNA, 477 bp, Homo sapiens
aggtccgttgagtttatctattctgaggaacagaaagaaaaaagaatgaagaaaaataaacagagcctcagaacattctgttctgtttatggggactccacaaggagagggaggaaagtggcaggaatgatagctgaagaaatgtctgaaaacttcccagatttgattaaaaatatcaatctgcacatcaaagaagctcagcaaatgccaaatagtgaaaaataagagatccaaaccttgacacataataatcaaacagtcaagggccatagaaaaaaataatcttgaaagcagtaaaaaagaaacatgtcagggggatcctcaattaaaaattatcaactgatttctcatcagaaattatagaggccagaaggcaatgggatgacatattccaagtaacaaaaaaacactgtcagctgagaattattttatccagcaaaaccattcttcaaaaatgaaggaaaagcaatatattcc

SEQ ID NO: 342288 - DNA, 505 bp, Homo sapiens
cagagtgaggaaaaagaattgagaagaagtaagaggtaggcactttaggtagaacagaggtaccttggtaagaatcgagagaatgttaggaaaaatttaagggactcagttgatccaacttttttgctcaggactgtttaagaagcaggaaatatagccatgcttcttaatctccagtcaagctacctgatttgatctagatgtgattgagaactattatttttaaatgcaattataacatgagaaaaggtatgtgggaatgaccattctggcagtgtggacttgaatgggagaaactatggaagatccgtatggtcttttatattcaccagtaactggagagattatttatgatttattgtggatcttctgtatggcaggcactggattaggctttccccatcttttctatcttcattctacaattagtttggaaggtagatattgctgtttgcaggtttgttgttgttgttgttgtcgtttgttttttgagacagaatcttgc

SEQ ID NO: 342289 - DNA, 370 bp, Homo sapiens
tagagatgatgtttccctatgttgcctaagctggtttcgaactcctgggctcagcatcccccatgaagtggcgctgaaagatcacgatagcacagttccatgatgtgaaataccacaagtctgcaatttttcggtcttgagagtgtcgctgggctgagaggatggaaatctttcagtaattataccagtttgtattcgtctcacatttgggaccaaatacaaatccgatccactctttctccctgtgaatattcataaaaaacaaagtgccaattctggtctaatcatgtatggaaccaaatatgttgatgagtcctaagtatatactgtatgtatgtatacatatgaatatatatatttgtacacacta

SEQ ID NO: 342290 - DNA, 680 bp, Homo sapiens
cgccgcagctcgcgtgacgcaccgcggggcctcgcccgggtgttcgctccgccgcctgtccgcggatcggcgctgcgagccccgcggctgcctgcgggacacctgagcgcggagggtgcggcaccttggcaccttgaccctgtggcagggacatctcggcccaggaaagaatgaggtttaggcacggcctaaccacctaagtgagggcactgaagctgccgggggaagggcaaggtccgcgttgcagagcccaagcccagtggcgcaggatttgttttggtctcagtttgcttcatctctggaatggagatggtttcctatgtgatcatgaaaatttctcccagctctgaagaccttttattttcatcccccatgaagtggcgctgaaagatcacgatagcacagttccatgatgtgaaataccacaagtctgcaatttttcggtcttgagagtgtcgctgggctgagaggatggaaatctttcagtaattataccagtttgtattcgtctcacatttgggaccaaatacaaatccgatccactctttctccctgtgaatattcataaaaaacaaagtgccaattctggtctaatcatgtatggaaccaaatatgttgatgagtcctaagtatatactgtatgtatgtatacatatgaatatatatatttgtacacacta

SEQ ID NO: 342291 - DNA, 1479 bp, Homo sapiens
cgccgcagctcgcgtgacgcaccgcggggcctcgcccgggtgttcgctccgccgcctgtccgcggatcggcgctgcgagccccgcggctgcctgcgggacacctgagcgcggagggtgcggcaccttggcaccttgaccctgtggcagggacatctcggcccaggaaagaatgaggtttaggcacggcctaaccacctaagtgagggcactgaagctgccgggggaagggcaaggtccgcgttgcagagcccaagcccagtggcgcaggatttgttttggtctcagtttgcttcatctctggaatggagatggtttcctatgtgatcatgaaaatttctcccagctctgaagaccttttattttgtaagaatcattgtgaaggtatgggcttggcaaatgaatggaaagatgagcaatgggagaggaaagaattgaagagggctgtgaggtttgaagaatggcatcccccatgaagtggcgctgaaagatcacgatagcacagttccatgatgtgaaataccacaagtctgcaatttttcggtcttgagagtgtcgctgggctgagaggatggaaatctttcagtaattataccagtttgtattcgtctcacatttgggaccaaatacaaatccgatccactctttctccctgtgaatattcataaaaaacaaagtgccaattctggtctaatcatgtatggaaccaaatatgttgatgagtcctaagtatatactgtatgtatgtatacatatgaatatatatatttgtacacactaattttgcttgtgtcctcctctgtgcaatttgtttgtttagtataggggttgctgttataatgtgttaataagctgctgaaagcttggcacctattacttgaaatgacagctatgttagaagcctattaacactccatagcagcagctctgcagctactagaaatgaatttcaaagaaggtaaatgaacaaaagcgattcatatctctaaggaaagcaaataccatgcctagaaccatatatactttggaaatgtacagtgtataaaatgaaaaacctcttccagttaaagaaacagcggaagggaatatttggggaaaggaagactgcctaaaagatttccaaacaaccttgaagatgtaaatgtaaaggataccaaacataacttcctctctttgtttctattgtatttaaaccagatccatgtcaaacttataagaacagaatatagtacaggtagaggaaattcacttttcatgagcaaaagttaaatcatctggatttagctcaaacttctttttcttcatttctgagcttagaaggacaccctttgctattgttctcggaagcagggctctttatgagtcagcttgctctgcttttgaactactttacttacttttgactgtcattggaatttgcaagatggttgaaagtcctgggtaaaccttaaccatgataataaaaatgtggtaagttaaaa

SEQ ID NO: 342292 - DNA, 412 bp, Homo sapiens
ctttgatagaaaccccaatgcctggaagtccatctctagcaatatgttgacagaaaaacttggctcaggaggaggccagagagggacctctctggatgcacttggtaaaaccatcttctgctactctagctcccttggccacaggtgcgggggaaatactgccagttaatctggtaggtcggtgtaagtgagcttctcggtaatcagataagcgaggaagccgacacccacagatcgctgctggctttctcagacaggctaagcattcaatctgccaattttttccaaaattctcacctttgctagtggaggggatttcagagggtgggaaagtatcactgattctggatgatccatgatgatgtggtttcagggagaggcagatggtgccctgggtgacatcacacattac

SEQ ID NO: 342293 - DNA, 422 bp, Homo sapiens
ccagtgcagattgaccctcaaacaacatgggggttagcgccccagccccacacagttgaaaacttttgactcccccagcacttaactactaacagcctactgttgactggacgccttgcgataatgtaaatagccgatgaacacatatttcctatgtggcctgatttatatgctgtattattacaataaaataagctagagaaaagaaaacgtggttaagaaaaccataaggaagagaaaatgtgtttactatctggtaagtggaagtggatcattacaaaggtctccatcctcatggtcttcatgttgagtgggctgaggaggaagaggagaggagggatcagtcgtgctgtcttagcggaggatgactgttgatgccaatgcgaatggaatgactgcagcccgggggatacagttgttct

SEQ ID NO: 342294 - DNA, 468 bp, Homo sapiens
taaaggaaatattttaataaattagtgggtaatatctataatgactaatttatgataaattgttggtgttgacatgtactcctagttaaaacggcaactctcagcattgttgtccaggaagcacactgcaccagcattgtcttctaatttcgcagctgcctgggaggtgggcacctaggtttctccatttaactgatgaagagccaaacaccaagagacaaggttagcaatggcccagctgggactcgcaccattctgctgactctctgtcctgcctttttagtacccatgctcagccaagcatgctagaacactcaccagcgtctagggacaaagtcaagtagaaaagccaccactggtttctccatcagaaatagagagtgctgggagggatgggctcttggtcagactctgtgtgtcttatggttttgttcatcacatcccaatcccagataatatttcagaaat

SEQ ID NO: 342295 - DNA, 225 bp, Homo sapiens
tcatataagtggggacacatagagaggggtttgtaatggtcatcattctcatttttattttaggtgattcactccatggtgttcattaagttaataattaaaataatcaattgattaagtcaattaagaatgaagtgttaattgtgggtcagtggtgagaaagagggccagccatggaccaatgttgagaatgtggcacaagccaaggattatggtcaatccagt

SEQ ID NO: 342296 - DNA, 775 bp, Homo sapiens
ggacaccccttttcctggcctggacttgtctataaggagccaacacttaatcagtacaaaaggaaacagaagaatggaggaaggcattgtcttaccttgttaccgaaggtctccctcaacccacctctgtatcaattaaaaccacacagccccagttatgcagccagtgcactacaaggaaggccaccgctgcacgtcctgagggattccacagaagagcacacacaggaagtcatctgaactcactgaagaattagcgccgacgtgggctacagcaggaccctccattgaatgacaatacatttcagctgagcagctttatacataagtgcttgaagttactccttctctcagctctgttgtggatttctggcttctcagcccattgcccccagcccccaacccagctctgcagaaagtgaggtgtctgcagcgtgtgctccttggcccacagccatccgtcacctgtatctcaggtgatcccaggcacacggccatgagatattaaagcaatccctcctagtcataagagaatggtttcaatttaacaggcaaggttgagagcattttcaagttacgttcggccagatgagtactggcaacaatacctcattcttcttgcagaagggatataaggtgagagatatgaaagtccaggacatcaaacgttcctacctgactttgttcttaataacagaaattccatcttaaaaactgtacccaatccacactctgtgtgcttgctttaagaatataaaatctctcccctccatcc

SEQ ID NO: 342297 - DNA, 198 bp, Homo sapiens
agtgtctacgggtgccattaaattctaccctttggcctttctctgtgtctctgttaagaacaaaaacactatcatggaggcaaacacccattgccaataactaataactaattgccaataactaatcatcctgttttcttctgtatctgagagtttctaggggaggaacagagaaattttcgagcagagttgcctaag

SEQ ID NO: 342298 - DNA, 452 bp, Homo sapiens
tagagatggggtttcaccgtgttggccagggtgatcttgatctcctgacctcgtgatccgcccgccttggcctcccaaagtgctgggattccaggtgtgagccactgcacccagcccaatggcatgctttaacaactgcgttagtgagggtaccatctaaattgctgtagcaaagagactcttaaatcagtggttcaaacaagctacaagcttatttctctctcacgcactggtccagccacaggtagctagacctagtagaatggctctgccattttcgatatgtggtttccatctttggttccatgttagcttttccgcctcaccattttccagtccatatgaagtgagggaagagccggggaaatgcacattcagatttatgcttccatcccattggccagaaattagttacataatgacactgagctacaaggaaagctgacaaatgt

SEQ ID NO: 342299 - DNA, 367 bp, Homo sapiens
atgaatagcagagacagaaagcagaaaagaaatgaagaagagttaactatcatctaatatgcaagtgttatgggaaaaaaagtattttggaaacacagggaagtaagcaattaccaattactttgtgtaggactgggggattaggaaatgtttgtgatttttttttttttttgagatggagtcttgctttgtcacccagggctttacgatttttggaaagggtagatgaacactgaactaaaagccaccagctgcttttgtcttttagagagtaagtttgtctttaagcttgtctttgcaggaagacattgccctttcttttttagctataaaagtttaagatggcatttttttcaaatataaagct

SEQ ID NO: 342300 - DNA, 706 bp, Homo sapiens
ctgcgccccctggacatcctggcggaagtggtcccttctgatggcgccacaagcgggatcaggatagttcaggttcacggtgcacggggactccagctctcagtagccgccccccgcaccatgagcttcccagcatccaggattttctcccagtgtgacctcttccctgaagaattttccatcgtcgtaactttgagagttcccaatcttccacccaagaggaacgagtacctgctgacggtggtggcagaggagagcgacctgctgctgctcggcctgcggttgtcacctgcccagctgcacttcctgttccttcgcgaggacacggccggcgcctggcagacccgagtgtccttccgcagcccggccctggtggatggccgctggcacacactggtcctggctgtgtccgcaggcgtcttctccctcaccacggactgcggcctcccggtggacataatggccgatgtgcccttcccagccaccctgtcagtgaaaggagctcgattcttcgtcggcagccggaggagagccaaaggcctgttcatgggactggtgaggcaactggtcctgctgccgggctcagacgccaccccaaggctgtgtcccagcaggaacgccccgctggcggtgctgtccatcccacgggtcctgcaggctctcacggggaagccagaagataacgaggtgctaaaatatccctatg

SEQ ID NO: 342301 - DNA, 739 bp, Homo sapiens
gtgagccaccgcgcccggcccaaactaatttttctctaaaactttattaatatttcaaaatattttaaaagaactgaactagcaatactaaaaaaaaatctgtttgcagtttgttttcataatatgaatgccataaatgcctttaatgatttgttcaaaattatatgaagttgtagctctgtaccttctgtaaattgatttcctcaggacacatttctagttacataggcagtctctaattgaaacaaatggattagtttccagagtccacttgaataggcagttgtttgggatcttgaaaatacttatctatagaaacagtgttgtaaataagagagtctcagattatcaaatgaaacttatttaaatccatgtaactgaactaataataccagctgcagttttatcctggctgtaaggactaccatgatgggaaaaaataagaggaaaccttaccctcccccatatccatttgtggacccagatacaatccaagatcttttttatattttctcatttatcttcttcttctcttattccattgctgtttagaacatcccaggatcttattgtttgtacttatttttccaccttgctgtaataccagttcttctagtctgagtattgttgatcttgggtcttagggatgaatgtatcagccatttcataatgtatcatggtctctcaatgacagggattgtcttgcctccaactcttgctcctctttcattagatgtgc

SEQ ID NO: 342302 - DNA, 337 bp, Homo sapiens
agtggcccaaggcctcagaagactagaaggaagttcctggccattcagcatgctctcccacttctgtggcaggctcttctttatcctcaggcttcagctcagacatccctcacctgctaggccacagcagctcctgcaaagcttcccacggtccctgctgctctccctccccgcacctagtgttacttggtctacatctctctcccagcaacttgtaagctccacaacgtaaggacgcctcactcatcacagtatccccagcatctggtgctgctcctggcaccagcaggtgctcactatattgagtttattgatgaatacaagttagtacttaatc

SEQ ID NO: 342303 - DNA, 898 bp, Homo sapiens
tctcccctacttccttctcacacaattgtgtggccagagtagccggaccaatggctccaaactacccccaaatactcatccccgcctcactgcttgggcccccttggcttcccctaggccagctcacactcaaggtccagcttggatcggagctcctacaggaagccttccccagccctgctctgctcggagacctcttcctcctccatacctacctctcccacttctgtggcaggctcttctttatcctcaggcttcagctcagacatccctcacctgctaggccacagcagctcctgcaaagcttcccacggtccctgctgctctccctccccgcacctagtgttacttggtctacatctctctcccagcaacttgtaagctccacaacgtaaggacgcctcactcatcacaagaattccaccaatgcaattcaacactgcgagggggcgccactcagtacaagccaaggaacctcgcaagaggctcacagttgagtgtggaagacagacgtacacacaaataactggactatggagcaggagaatgcaaagctcttccacccaggagagcccggtggcccaagagagcacgggaccacatggggcactgttgggttgtccttgtgggtgtcctctcttgctggcctgtgacccttgtgggagcacgtgcatgagctgggcagaggaatgagggatgccctttgtgtgcttatttttcctacagagtgagttgtggtctttcggtgacctctcttggccatttaaagctgcccttgacattcactttaactggattctccagggagaggagaggggagtgccagaaggcacctgtgtaatttaccctggtgtccagcaccgcagtcttagcctggcatccccgtgtgtgcatgtgg

SEQ ID NO: 342304 - DNA, 764 bp, Homo sapiens
acacataaacagacaatggcaaccaaaccttctaaattttagaacacaggtttcctcaggggtctctgatctcttgatcattttcattttgcctggtggtttcaagacaaacttgatatagaaggtgatccttgagtcaaggcctgaaagatgaggaatcagcccccaataacttctggaatcgtgtgtcttcaggcttctggagaatgtgagagcaccaacaccaatattttgcacagcagcaggtcttatgtgggaggggcaagagtgaggaagagctatatgaaatgtgtattatttgtattagcttgtggattagtttgctgttgctgcataacacattgagtggcttaaaagaacacacatcgattatgtcagtttctggaggttaggagtccaggcatggcttagctgccatactctgcttggggtcgtagaggctgtaatccaggtgtcagccgggctgcattctcatctagaggcttgactggggaaggccgcctcagactgttggcagaatttatttcctggtggctgtagaattcatatctgcctgcttcttcaatgccaccagcagagagagaatctgtaacttctgggaaggcctggaccctcttttaaagggctcaccagattatgtcaagcccatccaggccactgttttaacttaatgtcatgtgattaaggaggggctttaattatatcggcaaagtctcttcctttgctatattttcttagttagatgccagtcacaggtcttaccc

SEQ ID NO: 342305 - DNA, 1603 bp, Homo sapiens
agggtagtgtgctccaatttttatttctccttcttatgggggatgaggatcaattatagtacaagaccatttggaaaatatgcatatatattttaaaatgaaatacaagatttccgccctcaagatctaaaccaagtaagtttgatggatggcagcacagataaagaaatcttctgaatacacatttgatttttatagctctctctttcaagagtaggatattactaagatattcagtgcaatctatcagtcctagtagtatttagaagtgacagagtgaatgctgatatttggaaaattgagcatttgaccattttggggtcactcacctggcctagtggaatagcttacactttaatacaatcaaacacagtctttctgatataaaatgtttgaatgcccagatttggttccctagttcactcaaatcatagatgttgacatacatcctgttttcataatgattttaaaaagaatgtaaatcctatggtcctccaaataaatgattcaacgtttatgtaaatgtcaagtttttgtgaatagggatttatgtctaagacagaaaaatctactgaactagttcttactgtggaactaattgtggataaaacattcgttatcatctaaattttaaatgaatgacaacagttatggacacatgcaaaaggtatcagacatagaaaatattgttgggggaaatttctgtgtggtgctaatttcttgtaagggttgtacagatagtgcttaactcaaaaagtgagagtgtggtcattgccaaataggggtttgctcagagttccttctctaggactgtatgcagaaagcatacacacacacatacgcacacagaaaaatatgatttttatatcatattcatgaaaatgtgccatatccaattataacacacacacacacacacacacacacacacacacacacacataaataaataaatgatggttcacataagaaatcctaattgctaattttaaaccaaacatttgtagttttgtttattgcaactttgctgcatgggactttgctttcataaatctatatggggttggggttaatttgccctaatttgctgacctgggacacatgtaatcactgttaaacttacacccggtaaccctgatgtgtttacatttcaaaagaaatgaaattggcctggaaaaaaattttggaagtactgtaagtcttttttctttttttttccgaagggaaatatttcaaaaaaggaaacattatgagtagacacttcaaaaaagataaaatattttacatttgttttttgactaatgtgctataaaaaggattatatttgtgagaaaagatactgatcgccaatatttcaaataccgtcttgcaatgtatagtttttagtgacattgtagtataaagctgtaatttgaaattttactttggaatgtaaagtagaaaatattagctatgtcaatgatatcttgcaaagtgttcccatttataattatttatattgtaaatagctttctgaagtaaattcgaagttaatgtgcataaaatgtatttattatgtgaggaattttttggtttaaaatatagttaccaatatgcactttga

SEQ ID NO: 342306 - DNA, 496 bp, Homo sapiens
tctaggaggtaagcaggcgcatctattcaacatggaaattaaccctccatctcctcaggccccgtaaatgcacaattacttggtgaattccaccctggagttcccaagtggcaggactctgcattccaacccatgtcttcctgaaatggggggctgtcttatctgcattcaaacccatgtcttcctgaaatggggggctgtcttacgggagtgggctgctcttctctgggctcaagtcagtacagttacctgatcaccctgtggcataaggaaggaaggcgaggagggaacagagggcggcagacgactgttggcacactcagggctcccttgaccaagcacggccctgccccatcactgcagccttcaggatgggctcagcaacgctgaggaaagaactcagctggggcctgacccagcagaagcagcaggggctggggagtgagcggaagtgcactgaaatccagctctgccacccgagggacccaggtcagat

SEQ ID NO: 342307 - DNA, 330 bp, Homo sapiens
ttatcttactgttctataagtcagaggtctgacaagagtctcactgggctaaaatcaaggtatcagcagggctgcattcctctctggaggctctagaggagaatccatttccttacttttttcagctgccagtggctgtttgcattcctcggctcatagaccccttccgtcttcaaacccagcaatgagtctttctcacattgcatcactctgatattgactcttctgcctccctcttccacctatgaggaccttgtgattactttggacccacagtgataatccaggataatctctcttttaaagtcttctgaccagcaactttaattg

SEQ ID NO: 342308 - DNA, 319 bp, Homo sapiens
cactgtctcatctttgctttattttaccagtagcaattgcatgaagagatcactcctttggagtttttccctctggttcccttgcctttaagctgactgtgtgatttaggtagctctgatttatttactgagagtggatgtttttgatctcacaaactctctgtggctctcaaatctggagctcacaacttctcgatttctgtttgcagtttggctgtgactgcaccaaggaaaggggtgcttaaacataaagacaaaatgttaaactaactcattatgaaaacagcctggttttaggagaaccagccaacagtctagt

SEQ ID NO: 342309 - DNA, 199 bp, Homo sapiens
catccatttcctcttctaacaggtgtcaaggtcccttacagggaactgcatatgcttcactggtgtatatactgtggtggaatccagaaactccctcctactacagggtctcagtgaatggggcccttcttttaacatgtccagtaaaataatggagaagtcacatgacctaagatcagccatcatgtgacctaagctc

SEQ ID NO: 342310 - DNA, 321 bp, Homo sapiens
tcatttctataacctatctggttctcgtaggtgtttcagtttgcaatcactggtctagcctacctctattccaaactaaagctattctttcgccattaataaaacgagaaccttttattctagcagacatgccgcaggaaaagttacttttcaaaaatccttctaatcttaaacaaatacagatttcattgttttgttttaacagctctgtccaagagacctttgctattgtcagaggttattctttagccaatcacaagtatctgttctaaagatcctgctcaaaaggacagcatgactgagtcaggtttaaactgcaca

SEQ ID NO: 342311 - DNA, 688 bp, Homo sapiens
accagggcctatcatgaggtgtggggctgggggagggatagcattaggagaaatacctaatgtaaatgacgagttaatgggcacaccaaaccaacaaggcacatgtaaacctatgcaacaaacctgcacattgtgcacatgtaccctagaacttaaagtatagtaataaaaaaaattcaccaaacaccacaaaaaaaatcaagattgtcaaagaaaatttccacgtcccccgaaatccaaataaatagttagacaaagcagggagttaaaccagactatggccccaattggcaaagctgtcccaaggacgacagggggaataaagctggcatggtgctctgtaagagctctgagcttgcagtcagagacatgagcacaaatctcagcactgccacttcctagctccttgacctacctacaaaacctcctgagcaacagtctttgtatttgtaaaatgtggataattgtttctaaaacccaaggctaatgtgaggatcaaatgatacatataaatatagaagtgtctaaaaactggacaccctacagtatgaattactcaaataaatgtggattactaacaaaaaaaattggggagaacagaaagtactcaacaatccccaaatcctctctcctccctacttcaaaggaagtataacagagtccaccaaatgggaatataatctccttt

SEQ ID NO: 342312 - DNA, 574 bp, Homo sapiens
gctccacaaccgaaaatagcttcctacaggcaagcttcgtgctatgttatgcctcacagcctccatattaataagcagagtgctaaccactacatgataattttgctcaaaatgcaaataaagctcacaccttagatgggttttcaggcctcacaacttattaccagcttagttagcaaagcatagccatcttcggatgagacctagaagggcctggatgcaaagaactaaaggatgatcagagtgggagattcaggaaaagaggtaccttaggaggaacggagagggaaagacagactatgattttgccagactgattctaaatacttgttgatatgggtagtaaatttcttttttgaaatattgtaatagcaagcactcaagtgtgatttcttacatggaaaatcctgacagaagggagatcctgggactgtcctagtgtatccacctattaggtttccaaactagccaacccagtgaagagaattgctctttgttgagccaggctagttacactatcttttcccactatattgctgccttagtattcatttattcattcagtcagtcattt

SEQ ID NO: 342313 - DNA, 414 bp, Homo sapiens
gtgcaacagagactgtttcaaaacaaaacaaaaacaacaacagcacaaacacctgaggttaaaataagtgaacaaatcttttcaaggtacagatcctatcacccaccccatcctgttcaggtacatgctcaataactaccctcccaggagacaccgcgccatgccccagtgagtgccccacgtgcattttactttgttaagtttttacgccctctcactggggtcagttttttttgtcttttgaagtgttttttcactacttttctgctccccacccaagagaatccaggggtcagaaattatttgttttcccctcaataccagcatctgattgtctgaccagcaatgtgtctccaagaaatggaagctaggttgggtgaagaaaatcttcatgtctcaaggggttagcttttc

SEQ ID NO: 342314 - DNA, 172 bp, Homo sapiens
ataccagtctcattcatttcccatcactacaataaaacactagtcaacaagcgggttttcagtaaccccacactccgaacaggcatttttcctcctacaattttttgtctcagatataatgccatggttacatctgacagatgttactgctttaaatcctgcttcaacactg

SEQ ID NO: 342315 - DNA, 266 bp, Homo sapiens
cctgctggggactacgccctgaaggatgtgggtcagagcagatctctgccccttccataactagacatttatagagcacctgctgtatgcagggcactgctctaggagctccctcctgatgcttacagtctgaagtgggaggaagttcgacagtggagagaaataaaattgtgacatggtgaaatgtaccagagaggacttcttgaaaaataactctttaagcagaataataaagaattgactttaaggaagtgaaacggaacggc

SEQ ID NO: 342316 - DNA, 618 bp, Homo sapiens
tggagggttggcacagtggtgatccctgaggtcccttccagctctggcagcctggcagctcctctgatgatccatccttcagggagccaaggactccccgtggaggtcctgcagggatgcccaagagttgggtggctgggaaacagctcaccgtgtgttaggctgtagacctgagtacctggccagggacccaatcgtccccagcagtcttgtcattgtgaccggccttcatctcacaggaacccaggctgggctacgtaaatgaactgagctgaactgccaggtgctggggttcaggcagagactggaggctagaagttgaggggggccaagtactgcagttgggctgggggacagtacttggggcagggttgagcttgggtccccacaccaagagctccacagtcatctcagggacccttcaacaatagccctgagggctatgcatccattttttagaggaggacatgatggggaggcacagtgggggacagtgacctggccgaggtcacacagcaagaaggagtctagatttggcttttaaccactctgcccccagccttgggcaaaggtgttcagtgtagatgtgagagtgaactgatagagaagttctagaag

SEQ ID NO: 342317 - DNA, 540 bp, Homo sapiens
agcgtcgtgtgcaggcgtccccgggctgtggataactagacacgttcttccctcattgcccaaggctcgttagaattcgccctagagctgtatcatgtattttctttcaaattaactttgcttgcaattaagcttagggaaccagcaacaaaagcaaacttggcccgaggtcgttcaccgcgaaaatggattagagaaacttcttccccgatttaaggggaaagattcctgcggccagcgctttggggaaagtgccccgaccgcagaggcgacgacaggggagcaggaagctgctcacggtagtcggcgttggcggcagcggtggccttcctcatctgggcgatgtgggctccgagaagagtaaggataacatcctggaaatgacttctgtacggtttgagcccaactgcacactcatgacttggagctgccctgtggagttacagtttaccaaacacattcatgaacataatctcatttactaaaaactttgtgagaattttcttttactaaaattttttcttattacaaaaaaaaaag

SEQ ID NO: 342318 - DNA, 162 bp, Homo sapiens
aattgttgaggggatcaaatgaaatatgtgaaaacaacttgtaagtcatcaagtaccatataaaattaggcagtgatccattatgtagtcaaatctttaaaatttgcagctagaatattataattagatgtttactagataacacatggcgcattcataatc

SEQ ID NO: 342319 - DNA, 448 bp, Homo sapiens
atttttctcttgcctgtctcctccctgcacaaacctggctagcttctgttgctagtcattagaaccacctggagaggtctttgaattacaaatccctgggcactgagaccagttgaattagaatctctggcaggtgggagctgggaatctgtattaaactccactgatacagtttattttttgcttaggaagattttctatggaaatcatggttaattattgctattgctttccttctatccattagtttgcttctctgtacaagaaagagattttagtagttttgcggagtttcttctgtgtaagaaaataaaatttgtatatctttttatagtttttagagggctcctattaacatttcattcaatcctcaacaattctgggaggtaggaaggtaggtcagatttgatcgttttaaatatctggaaattggagttcagagaattta

SEQ ID NO: 342320 - DNA, 210 bp, Homo sapiens
tgtcctctggtagaaaaaaaaatgaagaaataataactgattcaggaagtggtaacaggttgtggattagcttacagaaaagaccactcacttactaattactttcttgggctccccacttgtcccaaaatgtgtgtgtgtgtgtgtgtgtgtgtcttgtctgtctgtctgtccgtaagtggtagagtctggagatggaccacagtttaa

SEQ ID NO: 342321 - DNA, 268 bp, Homo sapiens
ctgggcaggatgccaccctttctacaataagttcggtcccagggattcccccaacacacacacacatacattctctcttactcacatcctcacacacactcacacaccccaccacactcacacactttcaaaatccaccgactctcacgctcacactcgccagccctttcccttgctctgtcacttccctccaagtccccgccccacacagcctcctgcagtcccagcccccttggtgccagccatctctggtgccagccatctcccc

SEQ ID NO: 342322 - DNA, 101 bp, Homo sapiens
gcaaacatgctgttgattgctaaatgtaagtctgatcatgatgcagaataaatgtctttttttaatgtgcaaagaaaaaagaatactgtatataatatata

SEQ ID NO: 342323 - DNA, 959 bp, Homo sapiens
atgtttggggagaataggaaaccaaggaaagttatgatgagggtacattaaattaaaaagaggatcttgggaggagccaagaagtatgagaacgagtgagtagaaaagttagagcattaggagacagtgaaattggagaaccccaggaaataaagtggttcaagaagacaaaatgataaatgggaaaatgctttttggtagtcatagatgactggaaaattatctactcctcaataaataggtcatatgcatttatgtctatattttcttaactgttaatttcacaactgagtgaagtgatacagttagctcaatggctgacatatagtaagcacttaatgagtattatttatcactacttggatctgtcattgttcacttatttcctcaatatagaaaactgagagttgtccttgaatttttctttctcctcaatcccaatattaaatcaattacagagtctcattgactatacttcctgtgtgtctcaaaaatacgttttgtgtttattccaactgcctctgtctttgctcacatgtgtaagcctttctgcattatttttccctttgcctgtaaggtccctttcaccttggcctcaatacttggctcaagtagtacccctttgtaaattttacctgaatgtctcagccagaattaggcatttatttcactgtgctctttaagcaactagtagagatttcatttgaggcacttaatttgtaatcatttatttgcatgcctgtcttttaattaaaacatagccattcaggcatagtgttctaaatatgtttatttcctacctcccatattggtacatggtaacatgtttggttttcagttaacaatatgttgagaaattgaataagtgaaaatatttacataaatagtgtttgtataactaaaaataggtgtctgatgagttcggtgatttcattgagggtacacttagtccattgtca

SEQ ID NO: 342324 - DNA, 302 bp, Homo sapiens
aatccagaagcagcattgttgttatcttagcactgttttctctttgtgtatgctttatgcaagctgattgatttttagcgttagcctagatgaactatctgtggaataaattatttgtggtttggaactacatgtatttgcttccttctcttttcaggattggaatactgtgggtaatgaagggttaattttagttcatgataatacaaaagctgaatggtttcggggaatggaagtgtacttagctaacaataactcatgcagcaaactttctggcatgtctcctacgtgtagggactgag

SEQ ID NO: 342325 - DNA, 455 bp, Homo sapiens
tgtctggtgtggaaaaaccagagtgtgtatacaactactcagtcaagaactaaatgtgcatttccaatgtcattcacgcggcaattatttggaaataaggatgggatcatgcaattttgccaacagtaaatatacagatttggtaacttcaagtgcctataatgtccaccagacagaggccttaaagcacattccacccatgttttcctccttgagaaaggcaatttgattgttaaaagaaacagtggccaggcacagtgacccacacctgtaatcccagcgctctgggaagccgggacaggaggatcacttgaagccaggagttcaagaccagcctgggcaacacagtgagaccccatgtctactaaaaatacaaaaattagccgagtgtggtgatgagcgcctgtgatcctcagcttcccaagtagctgggattacaggcatgcgccaccacg

SEQ ID NO: 342326 - DNA, 1003 bp, Homo sapiens
tggtaagtgaaagaagccaactgaaaaggctacatactatatgactccaactacatggcattctggaaaaggcaaaacgatggagacagtaaaaagatcaggggttgccatgggcttaagatggggggagggaggagtggggagagggaacgaggaaggagtgggtagaacataaaagatttttagggaagtgaaactatcctgtatgatactggtaataggggaaacatgtcattacacatgttaaagtccatagaatacataacacaaagtaaactataaaattagttaataataatatatcaatattcactcctttgtaataaatgtaccacactaacacaatatgttaatgagggggaaactgttgggatgaagaaggtatatgggaactcactgttttctgctcaattttctgtatatctaaaaaatgaagtcttttaatttagaaaaatatatctaagctatattttaaggccttaatactgtgacattaaagtgtttagacacctaaataggacacacgtattttacagttatcatgggcattttttcacattagcaaagagaggtgtaattctggcagaaatgctcagcagaatgtcatctagaatttgctttaaaataatccagttggagatgaaaggatagcaaagaggcctagatgaaaccagatgggccatttgtttctaattatagaagctgagtgttaaatatgtacaaatttattatactatgctccctatttttatgtgcttcagaacgtccataataaaagtggggggaggatatttatggttaagaaattaaaggaggccggccgggcgcggtggctcacgcctgtaatcccagcactttgggaggccaaggcaggcagatcacgaggtcaggagatcgagaccatcctggctaacatggtgaaaccccgtctctactaaaaatacaattgtgccactgcactccagcctgggcaaaagagcgagactccgtctcaaaaaaaaaa

SEQ ID NO: 342327 - DNA, 144 bp, Homo sapiens
tatctctccagcaatggatcctaaccagattgaaatgtctgaaacaactgacatagaattcagaatatggatggccaagaaagctcaacgagattcaagagaaaattaaaacccaatccaagaaaactcaaaaaatgatccaag

SEQ ID NO: 342328 - DNA, 398 bp, Homo sapiens
atttattcactatcatgagaacagcatgggaaagacctgcccccttgattcaattatctcccaccaggtctctcccacaacacgtgggaattcaagatgagatttggatggggacacagccaaaccatatcactctaagaagtagatgtagctccattttatagatgaggaagctgagacttctccctaagaaatgttatccaaggcaagactgggaggccactagaattacccaagcacagagaggagcttgagggtgggaggagagagagaacagcctagcggaaagcctggaagtgaggaataacagggagaattggcagggggtggggtgctgagtatttcagtaggcaggggtgtggagttgaagggtgtaagaggtaagtggtggtgagact

SEQ ID NO: 342329 - DNA, 627 bp, Homo sapiens
tctactttatctcctagagatctaggtagttcccaaaggaataatgctttacggagtctaatgttgatttattaggtaaaaacagaaaatgacttttttttttacccacaagttccataccaaaaaatgaatgtaaacttcttatgcagtttcacacattgaaaatgcaggttattttaattccattgcatttttcagaattctcaatcgcaatcctctgacaactgttgaagatccgtatctctttaaattactggcattaaaatatctgtaagtactatagtactcttgggagtcatgagatgatttatactctttttaaatttttcatcaaagattaagtattttgcatttaggctaaaatgtcataatttaaattttaactgagttattgaaaaacattattggcaaaggaaaggatgtgtaatggtcaagatagccagcaggggaaagagaacagtgttgaagaacccatatagatttggaacatgtagacacatggaggaatattacttaaccaagaaagcaaaggggaaaaggtgttcattattctaaaaaggaagaaaagagtaaataatcaagatgggtgaatgcaatatgaaaatgagaagtaagataatggtaaaa

SEQ ID NO: 342330 - DNA, 363 bp, Homo sapiens
tctactttatctcctagagatctaggtagttcccaaaggaataatgctttacggagtctaatgttgatttattaggtaaaaacagaaaatgacttttttttttacccacaagttccataccaaaaaatgaatgtaaacttcttatgcagtttcacacattgaaaatgcaggttattttaattccattgcatttttcagaattctcaatcgcaatcctctgacaactgttgaagatccgtatctctttaaattactggcattaaaatatctagacgtgggaacaacgcaagtcccacttacaacacttaagaacattctcatgatgaccgttgaactggaaaaactgtaagttatttttttctt

SEQ ID NO: 342331 - DNA, 880 bp, Homo sapiens
aacttctcattgaacaccactcccagctttcctacccccatttctcttcacaggtgtgcagagaagtctacattcccatgtcaagtaagtggggtgggtagatgggagggcatatgagagcggggcagcaattttatgtcttagttggaaggaagtttagagttcattgagtccaaatcctctttactaggtgaggaaactgaggcacaggagggggaggtgccattagccagggagtcagagccaggacttagaacctggtccatgcctcctagtttgttcctgaccaatcctcccagctcacccactccttttgctctcacctctgactccctacaggctacagctagagagttgactcctctatttgaggtaagagtgtctggatttgggataaggtgacctcagtttgcaggtctcatgggggagatcagagggtcctttgttgagaagaggggacttggtccacagtgagcaaaggaatttgtctaaattgctattaagggagatcatctcccaaggtgggccaagcctgaaccctcagccctccatttcttccctttcttttgccttcagattgacaggcctcggaagtcaaaataagtggtttcctagaccgggtcgagagcaagtctctattggtcccaactgagttttttcagctggtttttcaaccaaacagcacctcatctcccagtgaggggaagggaaggctgggctgagagcagcaaggctgctcatctcacctctccccacccagccatgccagccgccacacctggtggggagaggtgggcctcacctgggtcccctggcagtgctctgtgaagggtcttgacattgcactgtaataataaaggtgtgtgtgaagtatcaaata

SEQ ID NO: 342332 - DNA, 398 bp, Homo sapiens
taattgggcttgggggttcaggaggaggcagaaaagagagaagtctacattcccatgtcaagctacagctagagagttgactcctctatttgagattgacaggcctcggaagtcaaaataagtggtttcctagaccgggtcgagagcaagtctctattggtcccaactgagttttttcagctggtttttcaaccaaacagcacctcatctcccagtgaggggaagggaaggctgggctgagagcagcaaggctgctcatctcacctctccccacccagccatgccagccgccacacctggtggggagaggtgggcctcacctgggtcccctggcagtgctctgtgaagggtcttgacattgcactgtaataataaaggtgtgtgtgaagtatcaaata

SEQ ID NO: 342333 - DNA, 664 bp, Homo sapiens
gttctgctgccagcccatctcccgggctggaaagccgcaagcccttggcactttcttctgccccttgcctgacagtgtttgcctttctttggatgatggagcagtgagatcatccaggtgccccccaggggcttggcagagctgcttacttggatctgctccaggtcagccaacaagatggatttaagggtggatttaaacagagttgacaacaggttccagggtctttggcaggggtggggtaagggggccacactttggtcaccttcctgaggatcctgtcgcccttatcagcacgacctgagtggatgggcatcagacacaataagagagagaggcctatgtatcaggaccccgctggataaatgggggtttggggatcttctgtgatttgcatttcttcaataactgctgccaggaagacggatgatgaagggttaaggacacacagaagagatgagactcccaatataacaagcagggaataagacttccaactccaaacaccagtcttctgaatgtgcctgccagaattctgatcatgaagactgccgaagtgttctgaccttgcacctcagaattccaaccccgtacattagttccaacctgggacatcagcattctgaccttgcccgctagagttttaattacgaagagcaactct

SEQ ID NO: 342334 - DNA, 1037 bp, Homo sapiens
tgagctcagaaagtctttttccttctagggactgcctttttcacccaaactgttccctctgccccctcccccgacaaggcctgtcctgtaagagttaggctagcagggtaggagcaatgctatgaaaccactgctgggacccaggtcttcccagtccttcaccccgcaggtcaccctgagaaacacactaagaactccatcccccagacaggacagtcccatctacccgcagcttgagtcttggccctagtaccttgagggtgttgggggtgatggtgtaaccatcttcctcaggaattttcagccccggtgggcagggcagggcgaagtcatcgtgcaggtattttccactcatggcactctctaacagcctgtggagaagaaaagaggtgaggatgccccactgactatggttcctataccatctgccctcacccattttcctgccttacaggtgaagacagggaagccccacagcaaaaaggagaggcccagactgtgagttcccagcccggggctccatctaccggcttgacgctggaactgggaagcacagctggggttcagagggcgatgggctccctaggcggcccttcccctgtgactggccttccctctgacacatgcggctttacccacctttgtctgtccctgatgtctactgcactccacacagagccatatagggtcagctgccattgccggaggatgccgacctggaatgactcatcccctagggcagcaaggggcagctcgtgagccacgcccctctgtcagccatgccagacagcagaggccctgcccgccctgccacccaaaggggctcaggccacatggtctgctccaggagctgcctcactgtgtcccactgaccccaggttctgcagaagggcctcactgggtgcccttagggatggaaagggttgaaaggctgtactccaaagcagagtcttgcttttctctcccgtattttgggggttcagctgggattagaaaaaaatgtctttccaccaaattaaagaaagctttgaaaacca

SEQ ID NO: 342335 - DNA, 998 bp, Homo sapiens
agcatgtagtaaacggtccagaagacggtgaaacagcctaccagcaccaaggtcttgagggtgttgggggtgatggtgtaaccatcttcctcaggaattttcagccccggtgggcagggcagggcgaagtcatcgtgcaggtattttccactcatggcactctctaacagcctttgtctgtccctgatgtctactgcactccacacagagccatatagggtcagctgccattgccggaggatgccgacctggaatgactcatccccgacatccctgatgaccagcctgtaggtccctcgggctctctccccccagcatcgcacagtggagaaggtccagtcattgaagccgttgggatccctgaggaaagaacacagcagaaacaggtggaaggcgtgggccagagagctgaccttcccccagcaacactttcttactgtagtagccgtggaaacaacctgggagggtgccacgagggcttctcaggtgccccttgcccctggggtctcatggaaggaggaaattgtgttaacgtggtgtggtggaaaaagcaagcatggagcgcgcacaggcttggagtcccacggatctaggtttattcttgttctcttgggcacttactagctccatgacttgttttctttttctttctttttttttttggagacagggtctcactctgttatccaagctggagtgcagtggcatgatcacagctcactgcagccttgacttcctgggttcaagtgatcctcccacctcagtctcctgagtagctgggactataggcctgtaaggctaatctttaaatttttttgtagagacagggtctcactttgttgcccaggctggtcttgaactcctgagttcaagtgattctcctgccttgacctcccaaagtgctgggattacaggtgtgagccaccacacccagccagtttcctcatttgtaaaaggaggttacaaagtctaatctagggggttcttagaaggattag

SEQ ID NO: 342336 - DNA, 1131 bp, Homo sapiens
tgagctcagaaagtctttttccttctagggactgcctttttcacccaaactgttccctctgccccctcccccgacaaggcctgtcctgtaagagttaggctagcagggtaggagcaatgctatgaaaccactgctgggacccaggtcttcccagtccttcaccccgcaggtcaccctgagaaacacactaagaactccatcccccagacaggacagtcccatctacccgcagcttgagtcttggccctagtaccttgagggtgttgggggtgatggtgtaaccatcttcctcaggaattttcagccccggtgggcagggcagggcgaagtcatcgtgcaggtattttccactcatggcactctctaacagcctgtggagaagaaaagaggtgaggatgccccactgactatggttcctataccatctgccctcacccattttcctgccttacaggtgaagacagggaagccccacagcaaaaaggagaggcccagactgtgagttcccagcccggggctccatctaccggcttgacgctggaactgggaagcacagctggggttcagagggcgatgggctccctaggcggcccttcccctgtgactggccttccctctgacacatgcggctttacccacctttgtctgtccctgatgtctactgcactccacacagagccatatagggtcagctgccattgccggaggatgccgacctggaatgactcatcccctagggcagcaaggggcagctcgtgagccacgcccctctgtcagccatgccagacagcagaggccctgcccgccctgccacccaaaggggctcaggccacatggtctgctccaggagctgcctcactgtgtcccactgaccccaggttctgcagaagggcctcactgggtgcccttagggatggaaagggttgaaaggctgtactccaaagcagagtcttgcttttctctcccgtattttgggggttcagctgggattagaaaaaaatgtctttccaccaaattaaagaaagctttgaaaaccactggcctagagaatacctaactgactggaggatgggagggtggagctcaatttccagtctataggctgatactaaagatattcacaattcatgg

SEQ ID NO: 342337 - DNA, 1466 bp, Homo sapiens
tgagctcagaaagtctttttccttctagggactgcctttttcacccaaactgttccctctgccccctcccccgacaaggcctgtcctgtaagagttaggctagcagggtaggagcaatgctatgaaaccactgctgggacccaggtcttcccagtccttcaccccgcaggtcaccctgagaaacacactaagaactccatcccccagacaggacagtcccatctacccgcagcttgagtcttggccctagtaccttgagggtgttgggggtgatggtgtaaccatcttcctcaggaattttcagccccggtgggcagggcagggcgaagtcatcgtgcaggtattttccactcatggcactctctaacagcctgtggagaagaaaagaggtgaggatgccccactgactatggttcctataccatctgccctcacccattttcctgccttacaggtgaagacagggaagccccacagcaaaaaggagaggcccagactgtgagttcccagcccggggctccatctaccggcttgacgctggaactgggaagcacagctggggttcagagggcgatgggctccctaggcggcccttcccctgtgactggccttccctctgacacatgcggctttacccacctttgtctgtccctgatgtctactgcactccacacagagccatatagggtcagctgccattgccggaggatgccgacctggaatgactcatccccgacatccctgatgaccagcctgtaggtccctcgggctctctccccccagcatcgcacagtggagaaggtccagtcattgaagccgttgggatccctgaggaaagaacacagcagaaacaggtggaaggcgtgggccagagagctgaccttcccccagcaacactttcttactgtagtagccgtggaaacaacctgggagggtgccacgagggcttctcaggtgccccttgcccctggggtctcatggaaggaggaaattgtgttaacgtggtgtggtggaaaaagcaagcatggagcgcgcacaggcttggagtcccacggatctaggtttattcttgttctcttgggcacttactagctccatgacttgttttctttttctttctttttttttttggagacagggtctcactctgttatccaagctggagtgcagtggcatgatcacagctcactgcagccttgacttcctgggttcaagtgatcctcccacctcagtctcctgagtagctgggactataggcctgtaaggctaatctttaaatttttttgtagagacagggtctcactttgttgcccaggctggtcttgaactcctgagttcaagtgattctcctgccttgacctcccaaagtgctgggattacaggtgtgagccaccacacccagccagtttcctcatttgtaaaaggaggttacaaagtctaatctagggggttcttagaaggattag

SEQ ID NO: 342338 - DNA, 901 bp, Homo sapiens
agagcaatgcccatttcacggatgggcacactcttggcatcaactctcttggtccaatggcaaccctatatattgcacacgggacactttctgtggggactctgagatgcagagggaccagataacaagcaggaaaggtagggcctggtgtgagggcacgagactcaccgacatccctgatgaccagcctgtaggtccctcgggctctctccccccagcatcgcacagtggagaaggtccagtcattgaagccgttgggatccctgaggaaagaacacagcagaaacaggtggaaggcgtgggccagagagctgaccttcccccagcaacactttcttactgtagtagccgtggaaacaacctgggagggtgccacgagggcttctcaggtgccccttgcccctggggtctcatggaaggaggaaattgtgttaacgtggtgtggtggaaaaagcaagcatggagcgcgcacaggcttggagtcccacggatctaggtttattcttgttctcttgggcacttactagctccatgacttgttttctttttctttctttttttttttggagacagggtctcactctgttatccaagctggagtgcagtggcatgatcacagctcactgcagccttgacttcctgggttcaagtgatcctcccacctcagtctcctgagtagctgggactataggcctgtaaggctaatctttaaatttttttgtagagacagggtctcactttgttgcccaggctggtcttgaactcctgagttcaagtgattctcctgccttgacctcccaaagtgctgggattacaggtgtgagccaccacacccagccagtttcctcatttgtaaaaggaggttacaaagtctaatctagggggttcttagaaggattag

SEQ ID NO: 342339 - DNA, 163 bp, Homo sapiens
agggaattttcagcagtgaaactattttgcatgatgctgtattgaggatttaggacattacgtaattgccaaaacccacaatctgtgaaactcaaagaatgaactctaacgtaaactatggactttagttgataatgatgtatcaacagtggttcatcaattg

SEQ ID NO: 342340 - DNA, 1123 bp, Homo sapiens
agagagcttattcaactcttaattccattataaataatatttgaatgaatgtgttttacatctggaatgatttttatcatctgagtaaaggaaatatgtttgatggtagttgggaactttgaaggtattacgggctacagatgagaaaaaaatgttactacgtcatttcatgtttacatactgaccagcattttcaatgaaataagcttattactataggactataaaatgtttttcaaaggtttaactgtccagggcagatacttaagactatctgatcatccattaaaaacttttcacatagtcttgcttaaatggatccattatgtttacccattatattgttctcagctgtagttttaagaaatttatttcatttgttaatacttactttccattaccttccccttttctgtgacaatccgttgatacttgaagacctctcttgtattcatcttagggttaatatttttaaggccaaacagcctaaattctatggtaatcaactccagccttgtgtaatgaaatcttctgcataaagataggtttaaatcaaatcagattgcagattttattgaagaaattgtgtttttaagagttgacaaatatatgttgtatggctaaaacaaagaaaatacttctgttgcttctgcatttagtagaagaaaaactatatatgtttgtgaccaaagtataaaatatgattctttccagggaggtaaaggttatgcagaagattttcactagcagctctaaaaggctaccctcaattaattgccatgaacatttcatagccctagaaggatgttggctcatttcagtgtcatcctggtttattctttattgtattattcagcagtcattttaacactatgctagacactttagagattcagaagagtaacagggtttctgttctcatgaagcttatcagagacagaaaacatatgagttagatctaattggaggcaactgaaatatatagtggagttagtgtggttatcagcacataaatgagtgatccatcaacaaaaggagaaattgggagggttttatgggccaaaaacagcatgattaaatgtgatagagtatatgtcatgttttaggtgtgatgaacattcag

SEQ ID NO: 342341 - DNA, 569 bp, Homo sapiens
  misc_feature (500)..(500): n is a, c, g, or t
ggttcaatttattcacataaaagtttatataattttatctttgtgcataatttctgtttttctcatcagtgagatgaacacattgattctcaatcctctcagcagagtatttcctgtatggacattgtattctgctagaaacttcaaagatgtcagaataatcaaaatctctttgtctaggagtttgaaattcaaaaaattatgtatgacattttatacctttgcattatcttcaatgagcattatgagctgtaattcactcgactgaagtgtagattatcccagaattaattattccagtctagtgataaaaaccagcctcatttattgaaccggatagcttgccggcaagctatccggttcaattaaactttttctttgtttttagagacaggatcctgctatgttgcccaggctggagtgcagtggttattcacaggcatgatcataacatactacagccttgaactcctaggctcaagcaatcctccagcctcagnctcccgagtagctgggattacaggcacccgccaccatgcgcagttaattttttgtattttaagtagaga

SEQ ID NO: 342342 - DNA, 209 bp, Homo sapiens
agtgtattggctctgttccagggaatgacacaatcaataatgatgtgtcgttgtttagtgcattaatccaaattctcatgaagtagcagtcaggctgtggctccaatgctgaacttgttaaagaaggtataggaaaaatttaggatgaatttttgatcaactctttaaaaaggatttcttttttttttttttttttttttttttttgag

SEQ ID NO: 342343 - DNA, 439 bp, Homo sapiens
tgatcattccacctcagcctcccaagtagctgggactacagacatgcaccaccatgcctggctaattttttgtagagacaagttttcaccatattgcccaggctggtctcgaactcctgagctcaagtgatacacctgcctcggcctcccaaaggttgggattacaggtgtgagccaaggcaccctagtgccttacctatctttgttctcactttagagcattcaagtcaaatgcctaaagagatcacagaggaaaagtacctgagtttctaagtaaccaggatcttgtcacttttttttttttactttaaatacatactgattttttttttttacaaagtggtctctctagagtatataagcttttggcttaataaaatctgtatctgcctctgataaatccaatatttggtaaataatagctagattcactctgttt

SEQ ID NO: 342344 - DNA, 526 bp, Homo sapiens
tggtgcgtgcctgtagtcccagctactcgggaggctgaggcaggagaatcgcttgaatccaggaggcagaggttgcagtgagccgagatcatatcactgcactccagcctggtgacacagtgagactcggtctcaaaaaaaaaagagaaaaaagaaaggaaaaaaaaaaggaactgacccaaaagggaaaaaaagttaattgcgtctggatgaatcacaggtaagaaagaagtacaaagaaaaaacgcacagaaacttaaagcaccgcacgctcacaccatggggaagagaatgcacaccaacgagggcaaactaggcagacgtgcccaggcggctcctgggggccctgtgataaagtctaaacagaagtgatgcaagcccaggaagaaggacctgctataacccacatgggggaaggaagatggggtatcccctctggagggcagcccccagctggtgagcaggcatcactcccagctcccagggccccacctagagagggacacctgaatgtcaccttccatag

SEQ ID NO: 342345 - DNA, 779 bp, Homo sapiens
cagccccactttatcatttacataagctattgggcataataggcctatgattttgctaccttgttttagccatttgtctgctgtagtttccaggaactcgccatttagccaacctcttctgaatctgctttaatttttcaaagtgattcttaaaatgcgaatcaaaaactaaagtcatttctccagatgtccttaatagtaaaaggccaacatcacatcattgactcttcctgagcttatgaacaaataaaaccgcaggtctccttcacaagaagctgactgctaaatatggtctgccctggtctgtgatttttaaatgagaatctatagttctggcctgaatttctatatttctcatgagaggtttgtgattatcaaacacaccatagtatgaaatcatcagaatatttaaaatgaagccctatgcaagtatgaaataccttatcatttaaatatatagactgtacactgacaggatgtctctggcattaaatgtcttttatgattatcgttacatgttttattgttattgttacatgttttagtgggttttttttttaactttttaaaaaatatgccttttaaagtgtgttaaggctggctgcagtggctcatgcctgtaatcccagcatttttggaggctgaggcgggcgcatcacatgaggtcaggagttcaagaccagactggccaacatgggaaaaccccgtctctactaaaaatacaaaaagcaggagaatcacttgagcccaggaggcagaggttgcagagttaagatggt

SEQ ID NO: 342346 - DNA, 638 bp, Homo sapiens
ctactttggcctcccaaagtgctgggattacaggtgtgagccaccacgctcagccaggcatatccacagatgcaggttcagtgttaccctactctgtgacagttgttaccccattcagatgtctattcttgaagaaatgtggagaagcaaaatctctaagagccaagtactagcaagaaaggagaaccttaatacttgcatgttagcacaatttagaagttaatatttaagggacagccatctagctggtgattacaaacaggacaagatggaggaggagagactacacaatcagtgaagagagcagttagaaaagaggcagctcccttgcaccctaccgcctggaggagggaggacggtgggagaagcagctcttcctaaaagcacaacgccaggccccaaagaggagcatcacggccttagagggagttaaagagcgccagaacacagtgccctggatgccccactttcagattcactcttctttacaagcagggcaaaaggaacagagagaagtctgtgttgtttgcatctgttgatacaggaaaacattcctggttcttcattgattcatgagcaattataattagatcgtcatctttctggagaggcagctgtgaactcaactaatgaacaat

SEQ ID NO: 342347 - DNA, 1649 bp, Homo sapiens
ggtcggcctctgctgcgcctgcgtggtcgggaggggaagtgaggcggtttcctcggcgccttttccggcagcggcggcggcagaactgggaggaggagttggaggccggagggagcccgcgctcggggcggcggctggaggcagcgcaccgagttcccgcgaggatccatgacctgacggggccccggagccgcgctgcctctcgggtgtcctgggtcggtggggagcccagtgctcgcaggccggcgggcgggccggagggctgcagtctccctcgcggtgagaggaaggcggaggagcgggaaccgcggcggcgctcgcgcggcgcctgcggggggaagggcagttccgggccgggccgcgcctcagcagggcggcggctcccagcgcagtctcagggcccgggtggcggcggcgactggagaaatcaagttgtgcggtcggtgatgcccgagtgagcggggggcctgggcctctgcccttaggaggcaactcccacgcaggccgcaaaggcgctctcgcggccgagaggcttcgtttcggtttcgcggcggcggcggcgttgttggctgaggggacccgggacacctgaatgcccccggccccggctcctccgacgcgatggggaaggtgctatccaaaatcttcgggaacaaggaaatgcggatcctcatgttgggcctggacgcggccggcaagacaacaatcctgtacaagttgaagctgggccagtcggtgaccaccattcccactgtgggtttcaacgtggagacggtgacttacaaaaatgtcaagttcaacgtatgggatgtgggcggccaggacaagatccggccgctctggcggcattactacactgggacccaaggtctcatcttcgtagtggactgcgccgaccgcgaccgcatcgatgaggctcgccaggagctgcaccgcattatcaatgaccgggagatgagggacgccataatcctcatcttcgccaacaagcaggacctgcccgatgccatgaaaccccacgagatccaggagaaactgggcctgacccggattcgggacaggaactggtatgtgcagccctcctgtgccacctcaggggacggactctatgaggggctcacatggttaacctctaactacaaatcttaatgagcattctccacccatcccctggaaggagagaaatcaaaaacccattcataggattatcgccaccatcacctctttcaattgccactttctcttcttttgaatttgaactctggagttactgttctacagtttggcggggacggggcttgggggttttctcttttgtttgtttccctttctttttccttttttttttttttttttttgttggctttgcgttaggatgctctgatctgacatttgacatgaacacaaagttgctagatgctcttgttgacttccagcagatgggatgggggaaacacagcagttcttggtaaagtcctttgtaataatagtttgatttttttatttcgagagaatctttcattttcctatgtatgcttttttccttttttgcccagtttccttatcacttgctgtagatggcttattttgcattcatgcagactatgttgcaagtctgtttcatctagtaaactgaaaattattgctta

SEQ ID NO: 342348 - DNA, 649 bp, Homo sapiens
cccgggctgcaggaattcggcacgaggcctaaactggaggaaacttgaaaccctcatgttaaatcttaaatgtagtatttctaacttgtgaagacagattggtaggcagccatttttttgtgtcttaaaataactgggggcatagttaaaattttatacatcaagtgattgctattattgaatgttgcaggtgagatgtggttatttttagtttatttgaaatgtttgactggaaaggggggagggggaagcaaatatttgaaatttggaaaaccctaaaccttttggtaagaaattgtaattttcacttaaaattttctttaaggatataagaggtttataattgatgtagttaaattgaacaataaccattggtgactggagcaggtaattatagcctgcagaaaaaattatctaagaattttaaaaataagatcctgaagttgtttaattgcatccatttctgtatttatgtgaatttataaactgcagtaagttttgaatgaggttaatcttgtttaatataagtaaatgagtctgtagactgtgatctccccaaactaaaaagtacagtacttggaattgtgttctttatggttgtagtgttggtaaagcactaatatgcagaaaataaaggaattacacagtg

SEQ ID NO: 342349 - DNA, 534 bp, Homo sapiens
actctagaggatcccggcagctatcctagtacactgtctcctttaaggaaggaagcgtgatgaatgaatgatgtgtagacttgagggatgactattaaaggggacgtaggatgaagagaaagaacctacagatgacaatgaatgtaaacttatttttcttcatgtgtaagcagtgtgctcgctggtgatatccagatcctaacaagattacttggttagctggttaggaccagtaactggattgcgaccactatgataatattttgaaccaaatgttaatgcttgatgcagaattgtaaagcagcatctggttcctatatagccttaaggattaattttagtgatcctcaaggaattaaatagggaatttcagaaatgtagactgcaaaggcagtatacaggaaaaggtggagtgggttttgtttatgagggtgtctgaaaactaaaattgagcgggatagcttgccggcaagctatccggttcaatgccgtaacattctattccactccattccactcgggttgattccactc

SEQ ID NO: 342350 - DNA, 4032 bp, Homo sapiens
ggtcggcctctgctgcgcctgcgtggtcgggaggggaagtgaggcggtttcctcggcgccttttccggcagcggcggcggcagaactgggaggaggagttggaggccggagggagcccgcgctcggggcggcggctggaggtaaccccttgggccgagctggaaaggcgggccacctcggtcttcgctcctttgtggagctctggcagtaactcccctccctctctgtttctctgcaggcagcgcaccgagttcccgcgaggatccatgacctgacggggccccggagccgcgctgcctctcgggtgtcctgggtcggtggggagcccagtgctcgcaggccggcgggcgggccggagggctgcagtctccctcgcggtgagaggaaggcggaggagcgggaaccgcggcggcgctcgcgcggcgcctgcggggggaagggcagttccgggccgggccgcgcctcagcagggcggcggctcccagcgcagtctcagggcccgggtggcggcggcgactggagaaatcaagttgtgcggtcggtgatgcccgagtgagcggggggcctgggcctctgcccttaggaggcaactcccacgcaggccgcaaaggcgctctcgcggccgagaggcttcgtttcggtttcgcggcggcggcggcgttgttggctgaggggacccgggacacctgaatgcccccggccccggctcctccgacgcgatggggaaggtgctatccaaaatcttcgggaacaaggaaatgcggatcctcatgttgggcctggacgcggccggcaagacaacaatcctgtacaagttgaagctgggccagtcggtgaccaccattcccactgtgggtttcaacgtggagacggtgacttacaaaaatgtcaagttcaacgtatgggatgtgggcggccaggacaagatccggccgctctggcggcattactacactgggacccaaggtctcatcttcgtagtggactgcgccgaccgcgaccgcatcgatgaggctcgccaggagctgcaccgcattatcaatgaccgggagatgagggacgccataatcctcatcttcgccaacaagcaggacctgcccgatgccatgaaaccccacgagatccaggagaaactgggcctgacccggattcgggacaggaactggtatgtgcagccctcctgtgccacctcaggggacggactctatgaggggctcacatggttaacctctaactacaaatcttaatgagcattctccacccatcccctggaaggagagaaatcaaaaacccattcataggattatcgccaccatcacctctttcaattgccactttctcttcttttgaatttgaactctggagttactgttctacagtttggcggggacggggcttgggggttttctcttttgtttgtttccctttctttttccttttttttttttttttttttgttggctttgcgttaggatgctctgatctgacatttgacatgaacacaaagttgctagatgctcttgttgacttccagcagatgggatgggggaaacacagcagttcttggtaaagtcctttgtaataatagtttgatttttttatttcgagagaatctttcattttcctatgtatgcttttttccttttttgcccagtttccttatcacttgctgtagatggcttattttgcattcatgcagactatgttgcaagtctgtttcatctagtaaactgaaaattattgcttaatcaaactgccgtttgtcttttatatttaaggccttccccccccttccttatgagttctaacttagtaatttcaaatgtgaccttttatatctaagaccagtatagtaaacttagcccacagtggcaaataatgagtaatattgtaatatgttccagttgcacctcagtatgttaaacaggtaatgtaagaagttctctgaaatgtcagcaagtaagttctgaaacacatcatgcatgagtaggaataaaacccaagttccccataacgtagataacttaatgctgcataaaaatatgaaagtgtaacccatgaaggacactttttctttccactgcaaagttagccactttgctgtttttcctcttttttaaactttgaaaatagactctttccagaaattggagcaataatggtgttaccacacacagattaaataatttgtagatattttaagtgacttttgggcaaaactggaatgtatacttttaccttgtttcaaacacctaagaccagtaatttaaaaattactaaaaggtttactttgttcattaataaaacatttaacaattcaaattatatgcaccttttacctagttgaaaaaaatacacattcctgttttcacattatagcaactgattaagctgaagctgtaagtcattttttatagatgagtgatccgcatctccatcaattagaacactggaaaagatgttttataaaagaggtatttaattttgtttgtaggattaactcatgcaaataataaaaaagatatcctgttggttcaatagtacactgtctcctttaaggaaggaagcgtgatgaatgaatgatgtgtagacttgagggatgactattaaaggggacgtaggatgaagagaaagaacctacagatgacaatgaatgtaaacttatttttcttcatgtgtaagcagtgtgctcgctggtgatatccagatcctaacaagattacttggttagctggttaggaccagtaactggattgcgaccactatgataatattttgaaccaaatgttaatgcttgatgcagaattgtaaagcagcatctggttcctatatagccttaaggattaattttagtgatcctcaaggaattaaatagggaatttcagaaatgtagactgcaaaggcagtatacaggaaaaggtggagtgggttttgtttatgagggtgtctgaaaactaaaattgagcgggatatcatggtatagttggacagtattggtccttcacactttggccatattgtataatggagcttttaccaaagatgtatgagaagtgtaagactataaaaaaatgaactattcaaagtaaaactcttaacaaacattttacttaaagcagatgcaaaagggtattctcatgtaggctcctgttggtgcagagggattttttgatttcaggatacaactaaagtacgaagttctcagtttcactttagtagaaagagctctagaaatgaggctgataaacacatctaagaacactggttgctttctaaaatttccaaagctccaccataaatgtaatttttagtgtttcaaatgattgcattttaaagtatataaatatgggttatccaatatcaatgctatagtaacatcctgaaacaaaacaagcacaaaggtataaatgcctaaactggaggaaacttgaaaccctcatgttaaatcttaaatgtagtatttctaacttgtgaagacagattggtaggcagccatttttttgtgtcttaaaataactgggggcatagttaaaattttatacatcaagtgattgctattattgaatgttgcaggtgagatgtggttatttttagtttatttgaaatgtttgactggaaaggggggagggggaagcaaatatttgaaatttggaaaaccctaaaccttttggtaagaaattgtaattttcacttaaaattttctttaaggatataagaggtttataattgatgtagttaaattgaacaataaccattggtgactggagcaggtaattatagcctgcagaaaaaattatctaagaattttaaaaataagatcctgaagttgtttaattgcatccatttctgtatttatgtgaatttataaactgcagtaagttttgaatgaggttaatcttgtttaatataagtaaatgagtctgtagactgtgatctccccaaactaaaaagtacagtacttggaattgtgttctttatggttgtagtgttggtaaagcactaatatgcagaaaataaaggaattacacagtg

SEQ ID NO: 342351 - DNA, 3804 bp, Homo sapiens
ggtcggcctctgctgcgcctgcgtggtcgggaggggaagtgaggcggtttcctcggcgccttttccggcagcggcggcggcagaactgggaggaggagttggaggccggagggagcccgcgctcggggcggcggctggaggcagcgcaccgagttcccgcgaggatccatgacctgacggggccccggagccgcgctgcctctcgggtgtcctgggtcggtggggagcccagtgctcgcaggccggcgggcgggccggagggctgcagtctccctcgcggtgagaggaaggcggaggagcgggaaccgcggcggcgctcgcgcggcgcctgcggggggaagggcagttccgggccgggccgcgcctcagcagggcggcggctcccagcgcagtctcagggcccgggtggcggcggcgactggagaaatcaagttgtgcggtcggtgatgcccgagtgagcggggggcctgggcctctgcccttaggaggcaactcccacgcaggccgcaaaggcgctctcgcggccgagaggcttcgtttcggtttcgcggcggcggcggcgttgttggctgaggggacccgggacacctgaatgcccccggccccggctcctccgacgcgatggggaaggtgctatccaaaatcttcgggaacaaggaaatgcggatcctcatgttgggcctggacgcggccggcaagacaacaatcctgtacaagttgaagctgggccagtcggtgaccaccattcccactgtgggtttcaacgtggagacggtgacttacaaaaatgtcaagttcaacgtatgggatgtgggcggccaggacaagatccggccgctctggcggcattactacactgggacccaaggtctcatcttcgtagtggactgcgccgaccgcgaccgcatcgatgaggctcgccaggagctgcaccgcattatcaatgaccgggagatgagggacgccataatcctcatcttcgccaacaagcaggacctgcccgatgccatgaaaccccacgagatccaggagaaactgggcctgacccggattcgggacaggaactggtatgtgcagccctcctgtgccacctcaggggacggactctatgaggggctcacatggttaacctctaactacaaatcttaatgagcattctccacccatcccctggaaggagagaaatcaaaaacccattcataggattatcgccaccatcacctctttcaattgccactttctcttcttttgaatttgaactctggagttactgttctacagtttggcggggacggggcttgggggttttctcttttgtttgtttccctttctttttccttttttttttttttttttttgttggctttgcgttaggatgctctgatctttcattttcctatgtatgcttttttccttttttgcccagtttccttatcacttgctgtagatggcttattttgcattcatgcagactatgttgcaagtctgtttcatctagtaaactgaaaattattgcttaatcaaactgccgtttgtcttttatatttaaggccttccccccccttccttatgagttctaacttagtaatttcaaatgtgaccttttatatctaagaccagtatagtaaacttagcccacagtggcaaataatgagtaatattgtaatatgttccagttgcacctcagtatgttaaacaggtaatgtaagaagttctctgaaatgtcagcaagtaagttctgaaacacatcatgcatgagtaggaataaaacccaagttccccataacgtagataacttaatgctgcataaaaatatgaaagtgtaacccatgaaggacactttttctttccactgcaaagttagccactttgctgtttttcctcttttttaaactttgaaaatagactctttccagaaattggagcaataatggtgttaccacacacagattaaataatttgtagatattttaagtgacttttgggcaaaactggaatgtatacttttaccttgtttcaaacacctaagaccagtaatttaaaaattactaaaaggtttactttgttcattaataaaacatttaacaattcaaattatatgcaccttttacctagttgaaaaaaatacacattcctgttttcacattatagcaactgattaagctgaagctgtaagtcattttttatagatgagtgatccgcatctccatcaattagaacactggaaaagatgttttataaaagaggtatttaattttgtttgtaggattaactcatgcaaataataaaaaagatatcctgttggttcaatagtacactgtctcctttaaggaaggaagcgtgatgaatgaatgatgtgtagacttgagggatgactattaaaggggacgtaggatgaagagaaagaacctacagatgacaatgaatgtaaacttatttttcttcatgtgtaagcagtgtgctcgctggtgatatccagatcctaacaagattacttggttagctggttaggaccagtaactggattgcgaccactatgataatattttgaaccaaatgttaatgcttgatgcagaattgtaaagcagcatctggttcctatatagccttaaggattaattttagtgatcctcaaggaattaaatagggaatttcagaaatgtagactgcaaaggcagtatacaggaaaaggtggagtgggttttgtttatgagggtgtctgaaaactaaaattgagcgggatatcatggtatagttggacagtattggtccttcacactttggccatattgtataatggagcttttaccaaagatgtatgagaagtgtaagactataaaaaaatgaactattcaaagtaaaactcttaacaaacattttacttaaagcagatgcaaaagggtattctcatgtaggctcctgttggtgcagagggattttttgatttcaggatacaactaaagtacgaagttctcagtttcactttagtagaaagagctctagaaatgaggctgataaacacatctaagaacactggttgctttctaaaatttccaaagctccaccataaatgtaatttttagtgtttcaaatgattgcattttaaagtatataaatatgggttatccaatatcaatgctatagtaacatcctgaaacaaaacaagcacaaaggtataaatgcctaaactggaggaaacttgaaaccctcatgttaaatcttaaatgtagtatttctaacttgtgaagacagattggtaggcagccatttttttgtgtcttaaaataactgggggcatagttaaaattttatacatcaagtgattgctattattgaatgttgcaggtgagatgtggttatttttagtttatttgaaatgtttgactggaaaggggggagggggaagcaaatatttgaaatttggaaaaccctaaaccttttggtaagaaattgtaattttcacttaaaattttctttaaggatataagaggtttataattgatgtagttaaattgaacaataaccattggtgactggagcaggtaattatagcctgcagaaaaaattatctaagaattttaaaaataagatcctgaagttgtttaattgcatccatttctgtatttatgtgaatttataaactgcagtaagttttgaatgaggttaatcttgtttaatataagtaaatgagtctgtagactgtgatctccccaaactaaaaagtacagtacttggaattgtgttctttatggttgtagtgttggtaaagcactaatatgcagaaaataaaggaattacacagtg

SEQ ID NO: 342352 - DNA, 2252 bp, Homo sapiens
ctagttctagatcgcgagcggccgctcgcgaatctagttcaaatgtgaccttttatatctaagaccagtatagtaaacttagcccacagtggcaaataatgagtaatattgtaatatgttccagttgcacctcagtatgttaaacaggtaatgtaagaagttctctgaaatgtcagcaagtaagttctgaaacacatcatgcatgagtaggaataaaacccaagttccccataacgtagataacttaatgctgcataaaaatatgaaagtgtaacccatgaaggacactttttctttccactgcaaagttagccactttgctgtttttcctcttttttaaactttgaaaatagactctttccagaaattggagcaataatggtgttaccacacacagattaaataatttgtagatattttaagtgacttttgggcaaaactggaatgtatacttttaccttgtttcaaacacctaagaccagtaatttaaaaattactaaaaggtttactttgttcattaataaaacatttaacaattcaaattatatgcaccttttacctagttgaaaaaaatacacattcctgttttcacattatagcaactgattaagctgaagctgtaagtcattttttatagatgagtgatccgcatctccatcaattagaacactggaaaagatgttttataaaagaggtatttaattttgtttgtaggattaactcatgcaaataataaaaaagatatcctgttggttcaatagtacactgtctcctttaaggaaggaagcgtgatgaatgaatgatgtgtagacttgagggatgactattaaaggggacgtaggatgaagagaaagaacctacagatgacaatgaatgtaaacttatttttcttcatgtgtaagcagtgtgctcgctggtgatatccagatcctaacaagattacttggttagctggttaggaccagtaactggattgcgaccactatgataatattttgaaccaaatgttaatgcttgatgcagaattgtaaagcagcatctggttcctatatagccttaaggattaattttagtgatcctcaaggaattaaatagggaatttcagaaatgtagactgcaaaggcagtatacaggaaaaggtggagtgggttttgtttatgagggtgtctgaaaactaaaattgagcgggatatcatggtatagttggacagtattggtccttcacactttggccatattgtataatggagcttttaccaaagatgtatgagaagtgtaagactataaaaaaatgaactattcaaagtaaaactcttaacaaacattttacttaaagcagatgcaaaagggtattctcatgtaggctcctgttggtgcagagggattttttgatttcaggatacaactaaagtacgaagttctcagtttcactttagtagaaagagctctagaaatgaggctgataaacacatctaagaacactggttgctttctaaaatttccaaagctccaccataaatgtaatttttagtgtttcaaatgattgcattttaaagtatataaatatgggttatccaatatcaatgctatagtaacatcctgaaacaaaacaagcacaaaggtataaatgcctaaactggaggaaacttgaaaccctcatgttaaatcttaaatgtagtatttctaacttgtgaagacagattggtaggcagccatttttttgtgtcttaaaataactgggggcatagttaaaattttatacatcaagtgattgctattattgaatgttgcaggtgagatgtggttatttttagtttatttgaaatgtttgactggaaaggggggagggggaagcaaatatttgaaatttggaaaaccctaaaccttttggtaagaaattgtaattttcacttaaaattttctttaaggatataagaggtttataattgatgtagttaaattgaacaataaccattggtgactggagcaggtaattatagcctgcagaaaaaattatctaagaattttaaaaataagatcctgaagttgtttaattgcatccatttctgtatttatgtgaatttataaactgcagtaagttttgaatgaggttaatcttgtttaatataagtaaatgagtctgtagactgtgatctccccaaactaaaaagtacagtacttggaattgtgttctttatggttgtagtgttggtaaagcactaatatgcagaaaataaaggaattacacagtg

SEQ ID NO: 342353 - DNA, 1855 bp, Homo sapiens
gctcggtacccgctgatccgcttaagtgacttttgggcaaaactggaatgtatacttttaccttgtttcaaacacctaagaccagtaatttaaaaattactaaaaggtttactttgttcattaataaaacatttaacaattcaaattatatgcaccttttacctagttgaaaaaaatacacattcctgttttcacattatagcaactgattaagctgaagctgtaagtcattttttatagatgagtgatccgcatctccatcaattagaacactggaaaagatgttttataaaagaggtatttaattttgtttgtaggattaactcatgcaaataataaaaaagatatcctgttggttcaatagtacactgtctcctttaaggaaggaagcgtgatgaatgaatgatgtgtagacttgagggatgactattaaaggggacgtaggatgaagagaaagaacctacagatgacaatgaatgtaaacttatttttcttcatgtgtaagcagtgtgctcgctggtgatatccagatcctaacaagattacttggttagctggttaggaccagtaactggattgcgaccactatgataatattttgaaccaaatgttaatgcttgatgcagaattgtaaagcagcatctggttcctatatagccttaaggattaattttagtgatcctcaaggaattaaatagggaatttcagaaatgtagactgcaaaggcagtatacaggaaaaggtggagtgggttttgtttatgagggtgtctgaaaactaaaattgagcgggatatcatggtatagttggacagtattggtccttcacactttggccatattgtataatggagcttttaccaaagatgtatgagaagtgtaagactataaaaaaatgaactattcaaagtaaaactcttaacaaacattttacttaaagcagatgcaaaagggtattctcatgtaggctcctgttggtgcagagggattttttgatttcaggatacaactaaagtacgaagttctcagtttcactttagtagaaagagctctagaaatgaggctgataaacacatctaagaacactggttgctttctaaaatttccaaagctccaccataaatgtaatttttagtgtttcaaatgattgcattttaaagtatataaatatgggttatccaatatcaatgctatagtaacatcctgaaacaaaacaagcacaaaggtataaatgcctaaactggaggaaacttgaaaccctcatgttaaatcttaaatgtagtatttctaacttgtgaagacagattggtaggcagccatttttttgtgtcttaaaataactgggggcatagttaaaattttatacatcaagtgattgctattattgaatgttgcaggtgagatgtggttatttttagtttatttgaaatgtttgactggaaaggggggagggggaagcaaatatttgaaatttggaaaaccctaaaccttttggtaagaaattgtaattttcacttaaaattttctttaaggatataagaggtttataattgatgtagttaaattgaacaataaccattggtgactggagcaggtaattatagcctgcagaaaaaattatctaagaattttaaaaataagatcctgaagttgtttaattgcatccatttctgtatttatgtgaatttataaactgcagtaagttttgaatgaggttaatcttgtttaatataagtaaatgagtctgtagactgtgatctccccaaactaaaaagtacagtacttggaattgtgttctttatggttgtagtgttggtaaagcactaatatgcagaaaataaaggaattacacagtg

SEQ ID NO: 342354 - DNA, 2387 bp, Homo sapiens
ggtcggcctctgctgcgcctgcgtggtcgggaggggaagtgaggcggtttcctcggcgccttttccggcagcggcggcggcagaactgggaggaggagttggaggccggagggagcccgcgctcggggcggcggctggaggcagcgcaccgagttcccgcgaggatccatgacctgacggggccccggagccgcgctgcctctcgggtgtcctgggtcggtggggagcccagtgctcgcaggccggcgggcgggccggagggctgcagtctccctcgcggtgagaggaaggcggaggagcgggaaccgcggcggcgctcgcgcggcgcctgcggggggaagggcagttccgggccgggccgcgcctcagcagggcggcggctcccagcgcagtctcagggcccgggtggcggcggcgactggagaaatcaagttgtgcggtcggtgatgcccgagtgagcggggggcctgggcctctgcccttaggaggcaactcccacgcaggccgcaaaggcgctctcgcggccgagaggcttcgtttcggtttcgcggcggcggcggcgttgttggctgaggggacccgggacacctgaatgcccccggccccggctcctccgacgcgatggggaaggtgctatccaaaatcttcgggaacaaggaaatgcggatcctcatgttgggcctggacgcggccggcaagacaacaatcctgtacaagttgaagctgggccagtcggtgaccaccattcccactgtgggtttcaacgtggagacggtgacttacaaaaatgtcaagttcaacgtatgggatgtgggcggccaggacaagatccggccgctctggcggcattactacactgggacccaaggtctcatcttcgtagtggactgcgccgaccgcgaccgcatcgatgaggctcgccaggagctgcaccgcattatcaatgaccgggagatgagggacgccataatcctcatcttcgccaacaagcaggacctgcccgatgccatgaaaccccacgagatccaggagaaactgggcctgacccggattcgggacaggaactggtatgtgcagccctcctgtgccacctcaggggacggactctatgaggggctcacatggttaacctctaactacaaatcttaatgagcattctccacccatcccctggaaggagagaaatcaaaaacccattcataggattatcgccaccatcacctctttcaattgccactttctcttcttttgaatttgaactctggagttactgttctacagtttggcggggacggggcttgggggttttctcttttgtttgtttccctttctttttccttttttttttttttttttttgttggctttgcgttaggatgctctgatctgacatttgacatgaacacaaagttgctagatgctcttgttgacttccagcagatgggatgggggaaacacagcagttcttggtaaagtcctttgtaataatagtttgatttttttatttcgagagaatctttcattttcctatgtatgcttttttccttttttgcccagtttccttatcacttgctgtagatggcttattttgcattcatgcagactatgttgcaagtctgtttcatctagtaaactgaaaattattgcttaatcaaactgccgtttgtcttttatatttaaggccttccccccccttccttatgagttctaacttagtaatttcaaatgtgaccttttatatctaagaccagtatagtaaacttagcccacagtggcaaataatgagtaatattgtaatatgttccagttgcacctcagtatgttaaacaggtaatgtaagaagttctctgaaatgtcagcaagtaagttctgaaacacatcatgcatgagtaggaataaaacccaagttccccataacgtagataacttaatgctgcataaaaatatgaaagtgtaacccatgaaggacactttttctttccactgcaaagttagccactttgctgtttttcctcttttttaaactttgaaaatagactctttccagaaattggagcaataatggtgttaccacacacagattaaataatttgtagatattttaagtgacttttgggcaaaactggaatgtatacttttaccttgtttcaaacacctaagaccagtaatttaaaaattactaaaaggtttactttgttcattaataaaacatttaacaattcaaattatatgcaccttttacctagttgaaaaaaatacacattcctgttttcacattatagcaactgattaagctgaagctgtaagtcattttttatagatgagtgatccgcatctccatcaattagaacactggaaaagatgtcgttcagaggtaggaaaccgagc

SEQ ID NO: 342355 - DNA, 1520 bp, Homo sapiens
actctagaggatcccggcagctatcctagtacactgtctcctttaaggaaggaagcgtgatgaatgaatgatgtgtagacttgagggatgactattaaaggggacgtaggatgaagagaaagaacctacagatgacaatgaatgtaaacttatttttcttcatgtgtaagcagtgtgctcgctggtgatatccagatcctaacaagattacttggttagctggttaggaccagtaactggattgcgaccactatgataatattttgaaccaaatgttaatgcttgatgcagaattgtaaagcagcatctggttcctatatagccttaaggattaattttagtgatcctcaaggaattaaatagggaatttcagaaatgtagactgcaaaggcagtatacaggaaaaggtggagtgggttttgtttatgagggtgtctgaaaactaaaattgagcgggatatcatggtatagttggacagtattggtccttcacactttggccatattgtataatggagcttttaccaaagatgtatgagaagtgtaagactataaaaaaatgaactattcaaagtaaaactcttaacaaacattttacttaaagcagatgcaaaagggtattctcatgtaggctcctgttggtgcagagggattttttgatttcaggatacaactaaagtacgaagttctcagtttcactttagtagaaagagctctagaaatgaggctgataaacacatctaagaacactggttgctttctaaaatttccaaagctccaccataaatgtaatttttagtgtttcaaatgattgcattttaaagtatataaatatgggttatccaatatcaatgctatagtaacatcctgaaacaaaacaagcacaaaggtataaatgcctaaactggaggaaacttgaaaccctcatgttaaatcttaaatgtagtatttctaacttgtgaagacagattggtaggcagccatttttttgtgtcttaaaataactgggggcatagttaaaattttatacatcaagtgattgctattattgaatgttgcaggtgagatgtggttatttttagtttatttgaaatgtttgactggaaaggggggagggggaagcaaatatttgaaatttggaaaaccctaaaccttttggtaagaaattgtaattttcacttaaaattttctttaaggatataagaggtttataattgatgtagttaaattgaacaataaccattggtgactggagcaggtaattatagcctgcagaaaaaattatctaagaattttaaaaataagatcctgaagttgtttaattgcatccatttctgtatttatgtgaatttataaactgcagtaagttttgaatgaggttaatcttgtttaatataagtaaatgagtctgtagactgtgatctccccaaactaaaaagtacagtacttggaattgtgttctttatggttgtagtgttggtaaagcactaatatgcagaaaataaaggaattacacagtg

SEQ ID NO: 342356 - DNA, 1365 bp, Homo sapiens
  misc_feature (66)..(66): n is a, c, g, or t
tggtgactatgcctagagtctctagatgagcataactgtgagtcaccgtggctgtgaggatccagntaatggcatggtactaggctagcactagtgatccgtatgttttgatgccaaatgttaatgcttgatgcagaattgtaaagcagcatctggttcctatatagccttaaggattaattttagtgatcctcaaggaattaaatagggaatttcagaaatgtagactgcaaaggcagtatacaggaaaaggtggagtgggttttgtttatgagggtgtctgaaaactaaaattgagcgggatatcatggtatagttggacagtattggtccttcacactttggccatattgtataatggagcttttaccaaagatgtatgagaagtgtaagactataaaaaaatgaactattcaaagtaaaactcttaacaaacattttacttaaagcagatgcaaaagggtattctcatgtaggctcctgttggtgcagagggattttttgatttcaggatacaactaaagtacgaagttctcagtttcactttagtagaaagagctctagaaatgaggctgataaacacatctaagaacactggttgctttctaaaatttccaaagctccaccataaatgtaatttttagtgtttcaaatgattgcattttaaagtatataaatatgggttatccaatatcaatgctatagtaacatcctgaaacaaaacaagcacaaaggtataaatgcctaaactggaggaaacttgaaaccctcatgttaaatcttaaatgtagtatttctaacttgtgaagacagattggtaggcagccatttttttgtgtcttaaaataactgggggcatagttaaaattttatacatcaagtgattgctattattgaatgttgcaggtgagatgtggttatttttagtttatttgaaatgtttgactggaaaggggggagggggaagcaaatatttgaaatttggaaaaccctaaaccttttggtaagaaattgtaattttcacttaaaattttctttaaggatataagaggtttataattgatgtagttaaattgaacaataaccattggtgactggagcaggtaattatagcctgcagaaaaaattatctaagaattttaaaaataagatcctgaagttgtttaattgcatccatttctgtatttatgtgaatttataaactgcagtaagttttgaatgaggttaatcttgtttaatataagtaaatgagtctgtagactgtgatctccccaaactaaaaagtacagtacttggaattgtgttctttatggttgtagtgttggtaaagcactaatatgcagaaaataaaggaattacacagtg

SEQ ID NO: 342357 - DNA, 1041 bp, Homo sapiens
gtcgtctagaggatcccaagtcagttacacaaagtggagcttttaccaaagatgtatgagaagtgtaagactataaaaaaatgaactattcaaagtaaaactcttaacaaacattttacttaaagcagatgcaaaagggtattctcatgtaggctcctgttggtgcagagggattttttgatttcaggatacaactaaagtacgaagttctcagtttcactttagtagaaagagctctagaaatgaggctgataaacacatctaagaacactggttgctttctaaaatttccaaagctccaccataaatgtaatttttagtgtttcaaatgattgcattttaaagtatataaatatgggttatccaatatcaatgctatagtaacatcctgaaacaaaacaagcacaaaggtataaatgcctaaactggaggaaacttgaaaccctcatgttaaatcttaaatgtagtatttctaacttgtgaagacagattggtaggcagccatttttttgtgtcttaaaataactgggggcatagttaaaattttatacatcaagtgattgctattattgaatgttgcaggtgagatgtggttatttttagtttatttgaaatgtttgactggaaaggggggagggggaagcaaatatttgaaatttggaaaaccctaaaccttttggtaagaaattgtaattttcacttaaaattttctttaaggatataagaggtttataattgatgtagttaaattgaacaataaccattggtgactggagcaggtaattatagcctgcagaaaaaattatctaagaattttaaaaataagatcctgaagttgtttaattgcatccatttctgtatttatgtgaatttataaactgcagtaagttttgaatgaggttaatcttgtttaatataagtaaatgagtctgtagactgtgatctccccaaactaaaaagtacagtacttggaattgtgttctttatggttgtagtgttggtaaagcactaatatgcagaaaataaaggaattacacagtg

SEQ ID NO: 342358 - DNA, 1670 bp, Homo sapiens
ggtcggcctctgctgcgcctgcgtggtcgggaggggaagtgaggcggtttcctcggcgccttttccggcagcggcggcggcagaactgggaggaggagttggaggccggagggagcccgcgctcggggcggcggctggaggcagcgcaccgagttcccgcgaggatccatgacctgacggggccccggagccgcgctgcctctcgggtgtcctgggtcggtggggagcccagtgctcgcaggccggcgggcgggccggagggctgcagtctccctcgcggtgagaggaaggcggaggagcgggaaccgcggcggcgctcgcgcggcgcctgcggggggaagggcagttccgggccgggccgcgcctcagcagggcggcggctcccagcgcagtctcagggcccgggtggcggcggcgactggagaaatcaagttgtgcggtcggtgatgcccgagtgagcggggggcctgggcctctgcccttaggaggcaactcccacgcaggccgcaaaggcgctctcgcggccgagaggcttcgtttcggtttcgcggcggcggcggcgttgttggctgaggggacccgggacacctgaatgcccccggccccggctcctccgacgcgatggggaaggtgctatccaaaatcttcgggaacaaggaaatgcggatcctcatgttgggcctggacgcggccggcaagacaacaatcctgtacaagttgaagctgggccagtcggtgaccaccattcccactgtgggtttcaacgtggagacggtgacttacaaaaatgtcaagttcaacgtatgggatgtgggcggccaggacaagatccggccgctctggcggcattactacactgggacccaaggtctcatcttcgtagtggactgcgccgaccgcgaccgcatcgatgaggctcgccaggagctgcaccgcattatcaatgaccgggagatgagggacgccataatcctcatcttcgccaacaagcaggacctgcccgatgccatgaaaccccacgagatccaggagaaactgggcctgacccggattcgggacaggaactggtatgtgcagccctcctgtgccacctcaggggacggactctatgaggggctcacatggttaacctctaactacaaatcttaatgagcattctccacccatcccctggaaggagagaaatcaaaaacccattcataggattatcgccaccatcacctctttcaattgccactttctcttcttttgaatttgaactctggagttactgttctacagtttggcggggacggggcttgggggttttctcttttgtttgtttccctttctttttccttttttttttttttttttttgttggctttgcgttaggatgctctgatctgacatttgacatgaacacaaagttgctagatgctcttgttgacttccagcagatgggatgggggaaacacagcagttcttggtaaagtcctttgtaataatagtttgatttttttatttcgagagaatctttcattttcctatgtatgcttttttccttttttgcccagtttccttatcacttgctgtagatggcttattttgcattcatgcagactatgttgcaagtctgtttcatctagtaaactgaaaattattgcttaggtaaagacagaaaccccccc

SEQ ID NO: 342359 - DNA, 1423 bp, Homo sapiens
ggtcggcctctgctgcgcctgcgtggtcgggaggggaagtgaggcggtttcctcggcgccttttccggcagcggcggcggcagaactgggaggaggagttggaggccggagggagcccgcgctcggggcggcggctggaggcagcgcaccgagttcccgcgaggatccatgacctgacggggccccggagccgcgctgcctctcgggtgtcctgggtcggtggggagcccagtgctcgcaggccggcgggcgggccggagggctgcagtctccctcgcggtgagaggaaggcggaggagcgggaaccgcggcggcgctcgcgcggcgcctgcggggggaagggcagttccgggccgggccgcgcctcagcagggcggcggctcccagcgcagtctcagggcccgggtggcggcggcgactggagaaatcaagttgtgcggtcggtgatgcccgagtgagcggggggcctgggcctctgcccttaggaggcaactcccacgcaggccgcaaaggcgctctcgcggccgagaggcttcgtttcggtttcgcggcggcggcggcgttgttggctgaggggacccgggacacctgaatgcccccggccccggctcctccgacgcgatggggaaggtgctatccaaaatcttcgggaacaaggaaatgcggatcctcatgttgggcctggacgcggccggcaagacaacaatcctgtacaagttgaagctgggccagtcggtgaccaccattcccactgtgggtttcaacgtggagacggtgacttacaaaaatgtcaagttcaacgtatgggatgtgggcggccaggacaagatccggccgctctggcggcattactacactgggacccaaggtctcatcttcgtagtggactgcgccgaccgcgaccgcatcgatgaggctcgccaggagctgcaccgcattatcaatgaccgggagatgagggacgccataatcctcatcttcgccaacaagcaggacctgcccgatgccatgaaaccccacgagatccaggagaaactgggcctgacccggattcgggacaggaactggtatgtgcagccctcctgtgccacctcaggggacggactctatgaggggctcacatggttaacctctaactacaaatcttaatgagcattctccacccatcccctggaaggagagaaatcaaaaacccattcataggattatcgccaccatcacctctttcaattgccactttctcttcttttgaatttgaactctggagttactgttctacagtttggcggggacggggcttgggggttttctcttttgtttgtttcccccatcccatctgctggaagtcaacaagagcatctagcaactttgtgttcatgtcaaatgtcagatcagagcatcctaacgcaaagccaacaaaaaa

SEQ ID NO: 342360 - DNA, 3934 bp, Homo sapiens
ggtcggcctctgctgcgcctgcgtggtcgggaggggaagtgaggcggtttcctcggcgccttttccggcagcggcggcggcagaactgggaggaggagttggaggccggagggagcccgcgctcggggcggcggctggaggcagcgcaccgagttcccgcgaggatccatgacctgacggggccccggagccgcgctgcctctcgggtgtcctgggtcggtggggagcccagtgctcgcaggccggcgggcgggccggagggctgcagtctccctcgcggtgagaggaaggcggaggagcgggaaccgcggcggcgctcgcgcggcgcctgcggggggaagggcagttccgggccgggccgcgcctcagcagggcggcggctcccagcgcagtctcagggcccgggtggcggcggcgactggagaaatcaagttgtgcggtcggtgatgcccgagtgagcggggggcctgggcctctgcccttaggaggcaactcccacgcaggccgcaaaggcgctctcgcggccgagaggcttcgtttcggtttcgcggcggcggcggcgttgttggctgaggggacccgggacacctgaatgcccccggccccggctcctccgacgcgatggggaaggtgctatccaaaatcttcgggaacaaggaaatgcggatcctcatgttgggcctggacgcggccggcaagacaacaatcctgtacaagttgaagctgggccagtcggtgaccaccattcccactgtgggtttcaacgtggagacggtgacttacaaaaatgtcaagttcaacgtatgggatgtgggcggccaggacaagatccggccgctctggcggcattactacactgggacccaaggtctcatcttcgtagtggactgcgccgaccgcgaccgcatcgatgaggctcgccaggagctgcaccgcattatcaatgaccgggagatgagggacgccataatcctcatcttcgccaacaagcaggacctgcccgatgccatgaaaccccacgagatccaggagaaactgggcctgacccggattcgggacaggaactggtatgtgcagccctcctgtgccacctcaggggacggactctatgaggggctcacatggttaacctctaactacaaatcttaatgagcattctccacccatcccctggaaggagagaaatcaaaaacccattcataggattatcgccaccatcacctctttcaattgccactttctcttcttttgaatttgaactctggagttactgttctacagtttggcggggacggggcttgggggttttctcttttgtttgtttccctttctttttccttttttttttttttttttttgttggctttgcgttaggatgctctgatctgacatttgacatgaacacaaagttgctagatgctcttgttgacttccagcagatgggatgggggaaacacagcagttcttggtaaagtcctttgtaataatagtttgatttttttatttcgagagaatctttcattttcctatgtatgcttttttccttttttgcccagtttccttatcacttgctgtagatggcttattttgcattcatgcagactatgttgcaagtctgtttcatctagtaaactgaaaattattgcttaatcaaactgccgtttgtcttttatatttaaggccttccccccccttccttatgagttctaacttagtaatttcaaatgtgaccttttatatctaagaccagtatagtaaacttagcccacagtggcaaataatgagtaatattgtaatatgttccagttgcacctcagtatgttaaacaggtaatgtaagaagttctctgaaatgtcagcaagtaagttctgaaacacatcatgcatgagtaggaataaaacccaagttccccataacgtagataacttaatgctgcataaaaatatgaaagtgtaacccatgaaggacactttttctttccactgcaaagttagccactttgctgtttttcctcttttttaaactttgaaaatagactctttccagaaattggagcaataatggtgttaccacacacagattaaataatttgtagatattttaagtgacttttgggcaaaactggaatgtatacttttaccttgtttcaaacacctaagaccagtaatttaaaaattactaaaaggtttactttgttcattaataaaacatttaacaattcaaattatatgcaccttttacctagttgaaaaaaatacacattcctgttttcacattatagcaactgattaagctgaagctgtaagtcattttttatagatgagtgatccgcatctccatcaattagaacactggaaaagatgttttataaaagaggtatttaattttgtttgtaggattaactcatgcaaataataaaaaagatatcctgttggttcaatagtacactgtctcctttaaggaaggaagcgtgatgaatgaatgatgtgtagacttgagggatgactattaaaggggacgtaggatgaagagaaagaacctacagatgacaatgaatgtaaacttatttttcttcatgtgtaagcagtgtgctcgctggtgatatccagatcctaacaagattacttggttagctggttaggaccagtaactggattgcgaccactatgataatattttgaaccaaatgttaatgcttgatgcagaattgtaaagcagcatctggttcctatatagccttaaggattaattttagtgatcctcaaggaattaaatagggaatttcagaaatgtagactgcaaaggcagtatacaggaaaaggtggagtgggttttgtttatgagggtgtctgaaaactaaaattgagcgggatatcatggtatagttggacagtattggtccttcacactttggccatattgtataatggagcttttaccaaagatgtatgagaagtgtaagactataaaaaaatgaactattcaaagtaaaactcttaacaaacattttacttaaagcagatgcaaaagggtattctcatgtaggctcctgttggtgcagagggattttttgatttcaggatacaactaaagtacgaagttctcagtttcactttagtagaaagagctctagaaatgaggctgataaacacatctaagaacactggttgctttctaaaatttccaaagctccaccataaatgtaatttttagtgtttcaaatgattgcattttaaagtatataaatatgggttatccaatatcaatgctatagtaacatcctgaaacaaaacaagcacaaaggtataaatgcctaaactggaggaaacttgaaaccctcatgttaaatcttaaatgtagtatttctaacttgtgaagacagattggtaggcagccatttttttgtgtcttaaaataactgggggcatagttaaaattttatacatcaagtgattgctattattgaatgttgcaggtgagatgtggttatttttagtttatttgaaatgtttgactggaaaggggggagggggaagcaaatatttgaaatttggaaaaccctaaaccttttggtaagaaattgtaattttcacttaaaattttctttaaggatataagaggtttataattgatgtagttaaattgaacaataaccattggtgactggagcaggtaattatagcctgcagaaaaaattatctaagaattttaaaaataagatcctgaagttgtttaattgcatccatttctgtatttatgtgaatttataaactgcagtaagttttgaatgaggttaatcttgtttaatataagtaaatgagtctgtagactgtgatctccccaaactaaaaagtacagtacttggaattgtgttctttatggttgtagtgttggtaaagcactaatatgcagaaaataaaggaattacacagtg

SEQ ID NO: 342361 - DNA, 2948 bp, Homo sapiens
ggtcggcctctgctgcgcctgcgtggtcgggaggggaagtgaggcggtttcctcggcgccttttccggcagcggcggcggcagaactgggaggaggagttggaggccggagggagcccgcgctcggggcggcggctggaggcagcgcaccgagttcccgcgaggatccatgacctgacggggccccggagccgcgctgcctctcgggtgtcctgggtcggtggggagcccagtgctcgcaggccggcgggcgggccggagggctgcagtctccctcgcggtgagaggaaggcggaggagcgggaaccgcggcggcgctcgcgcggcgcctgcggggggaagggcagttccgggccgggccgcgcctcagcagggcggcggctcccagcgcagtctcagggcccgggtggcggcggcgactggagaaatcaagttgtgcggtcggtgatgcccgagtgagcggggggcctgggcctctgcccttaggaggcaactcccacgcaggccgcaaaggcgctctcgcggccgagaggcttcgtttcggtttcgcggcggcggcggcgttgttggctgaggggacccgggacacctgaatgcccccggccccggctcctccgacgcgatggggaaggtgctatccaaaatcttcgggaacaaggaaatgcggatcctcatgttgggcctggacgcggccggcaagacaacaatcctgtacaagttgaagctgggccagtcggtgaccaccattcccactgtgggtttcaacgtggagacggtgacttacaaaaatgtcaagttcaacgtatgggatgtgggcggccaggacaagatccggccgctctggcggcattactacactgggacccaaggtctcatcttcgtagtggactgcgccgaccgcgaccgcatcgatgaggctcgccaggagctgcaccgcattatcaatgaccgggagatgagggacgccataatcctcatcttcgccaacaagcaggacctgcccgatgccatgaaaccccacgagatccaggagaaactgggcctgacccggattcgggacaggaactggtatgtgcagccctcctgtgccacctcaggggacggactctatgaggggctcacatggttaacctctaactacaaatcttaatgagcattctccacccatcccctggaaggagagaaatcaaaaacccattcataggattatcgccaccatcacctctttcaattgccactttctcttcttttgaatttgaactctggagttactgttctacagtttggcggggacggggcttgggggttttctcttttgtttgtttccctttctttttccttttttttttttttttttttgttggctttgcgttaggatgctctgatctgacatttgacatgaacacaaagttgctagatgctcttgttgacttccagcagatgggatgggggaaacacagcagttcttggtaaagtcctttgtaataatagtttgatttttttatttcgagagaatctttcattttcctatgtatgcttttttccttttttgcccagtttccttatcacttgctgtagatggcttattttgcattcatgcagactatgttgcaagtctgtttcatctagtaaactgaaaattattgcttaatcaaactgccgtttgtcttttatatttaaggccttccccccccttccttatgagttctaacttagtaatttcaaatgtgaccttttatatctaagaccagtatagtaaacttagcccacagtggcaaataatgagtaatattgtaatatgttccagttgcacctcagtatgttaaacaggtaatgtaagaagttctctgaaatgtcagcaagtaagttctgaaacacatcatgcatgagtaggaataaaacccaagttccccataacgtagataacttaatgctgcataaaaatatgaaagtgtaacccatgaaggacactttttctttccactgcaaagttagccactttgctgtttttcctcttttttaaactttgaaaatagactctttccagaaattggagcaataatggtgttaccacacacagattaaataatttgtagatattttaagtgacttttgggcaaaactggaatgtatacttttaccttgtttcaaacacctaagaccagtaatttaaaaattactaaaaggtttactttgttcattaataaaacatttaacaattcaaattatatgcaccttttacctagttgaaaaaaatacacattcctgttttcacattatagcaactgattaagctgaagctgtaagtcattttttatagatgagtgatccgcatctccatcaattagaacactggaaaagatgttttataaaagaggtatttaattttgtttgtaggattaactcatgcaaataataaaaaagatatcctgttggttcaatagtacactgtctcctttaaggaaggaagcgtgatgaatgaatgatgtgtagacttgagggatgactattaaaggggacgtaggatgaagagaaagaacctacagatgacaatgaatgtaaacttatttttcttcatgtgtaagcagtgtgctcgctggtgatatccagatcctaacaagattacttggttagctggttaggaccagtaactggattgcgaccactatgataatattttgaaccaaatgttaatgcttgatgcagaattgtaaagcagcatctggttcctatatagccttaaggattaattttagtgatcctcaaggaattaaatagggaatttcagaaatgtagactgcaaaggcagtatacaggaaaaggtggagtgggttttgtttatgagggtgtctgaaaactaaaattgagcgggatagcttgccggcaagctatccggttcaatgccgtaacattctattccactccattccactcgggttgattccactc

SEQ ID NO: 342362 - DNA, 1691 bp, Homo sapiens
ggtcggcctctgctgcgcctgcgtggtcgggaggggaagtgaggcggtttcctcggcgccttttccggcagcggcggcggcagaactgggaggaggagttggaggccggagggagcccgcgctcggggcggcggctggaggcagcgcaccgagttcccgcgaggatccatgacctgacggggccccggagccgcgctgcctctcgggtgtcctgggtcggtggggagcccagtgctcgcaggccggcgggcgggccggagggctgcagtctccctcgcggtgagaggaaggcggaggagcgggaaccgcggcggcgctcgcgcggcgcctgcggggggaagggcagttccgggccgggccgcgcctcagcagggcggcggctcccagcgcagtctcagggcccgggtggcggcggcgactggagaaatcaagttgtgcggtcggtgatgcccgagtgagcggggggcctgggcctctgcccttaggaggcaactcccacgcaggccgcaaaggcgctctcgcggccgagaggcttcgtttcggtttcgcggcggcggcggcgttgttggctgaggggacccgggacacctgaatgcccccggccccggctcctccgacgcgatggggaaggtgctatccaaaatcttcgggaacaaggaaatgcggatcctcatgttgggcctggacgcggccggcaagacaacaatcctgtacaagttgaagctgggccagtcggtgaccaccattcccactgtgggtttcaacgtggagacggtgacttacaaaaatgtcaagttcaacgtatgggatgtgggcggccaggacaagatccggccgctctggcggcattactacactgggacccaaggtctcatcttcgtagtggactgcgccgaccgcgaccgcatcgatgaggctcgccaggagctgcaccgcattatcaatgaccgggagatgagggacgccataatcctcatcttcgccaacaagcaggacctgcccgatgccatgaaaccccacgagatccaggagaaactgggcctgacccggattcgggacaggaactggtatgtgcagccctcctgtgccacctcaggggacggactctatgaggggctcacatggttaacctctaactacaaatcttaatgagcattctccacccatcccctggaaggagagaaatcaaaaacccattcataggattatcgccaccatcacctctttcaattgccactttctcttcttttgaatttgaactctggagttactgttctacagtttggcggggacggggcttgggggttttctcttttgtttgtttccctttctttttccttttttttttttttttttttgttggctttgcgttaggatgctctgatctgacatttgacatgaacacaaagttgctagatgctcttgttgacttccagcagatgggatgggggaaacacagcagttcttggtaaagtcctttgtaataatagtttgatttttttatttcgagagaatctttcattttcctatgtatgcttttttccttttttgcccagtttccttatcacttgctgtagatggcttattttgcattcatgcagactatgttgcaagtctgtttcatctagtaaactgaaaattattgcttaaaaaaaaaaaaataaataatgaagaaatgaaaaaaataaaaa

SEQ ID NO: 342363 - DNA, 1606 bp, Homo sapiens
ggtcggcctctgctgcgcctgcgtggtcgggaggggaagtgaggcggtttcctcggcgccttttccggcagcggcggcggcagaactgggaggaggagttggaggccggagggagcccgcgctcggggcggcggctggaggcagcgcaccgagttcccgcgaggatccatgacctgacggggccccggagccgcgctgcctctcgggtgtcctgggtcggtggggagcccagtgctcgcaggccggcgggcgggccggagggctgcagtctccctcgcggtgagaggaaggcggaggagcgggaaccgcggcggcgctcgcgcggcgcctgcggggggaagggcagttccgggccgggccgcgcctcagcagggcggcggctcccagcgcagtctcagggcccgggtggcggcggcgactggagaaatcaagttgtgcggtcggtgatgcccgagtgagcggggggcctgggcctctgcccttaggaggcaactcccacgcaggccgcaaaggcgctctcgcggccgagaggcttcgtttcggtttcgcggcggcggcggcgttgttggctgaggggacccgggacacctgaatgcccccggccccggctcctccgacgcgatggggaaggtgctatccaaaatcttcgggaacaaggaaatgcggatcctcatgttgggcctggacgcggccggcaagacaacaatcctgtacaagttgaagctgggccagtcggtgaccaccattcccactgtgggtttcaacgtggagacggtgacttacaaaaatgtcaagttcaacgtatgggatgtgggcggccaggacaagatccggccgctctggcggcattactacactgggacccaaggtctcatcttcgtagtggactgcgccgaccgcgaccgcatcgatgaggctcgccaggagctgcaccgcattatcaatgaccgggagatgagggacgccataatcctcatcttcgccaacaagcaggacctgcccgatgccatgaaaccccacgagatccaggagaaactgggcctgacccggattcgggacaggaactggtatgtgcagccctcctgtgccacctcaggggacggactctatgaggggctcacatggttaacctctaactacaaatcttaatgagcattctccacccatcccctggaaggagagaaatcaaaaacccattcataggattatcgccaccatcacctctttcaattgccactttctcttcttttgaatttgaactctggagttactgttctacagtttggcggggacggggcttgggggttttctcttttgtttgtttccctttctttttccttttttttttttttttggtgggcttggccttgggtctcccgtggccggtaaacctacccgtgtaatgtctccataatcaggtccctctctcttaataagggaagctcaagagagcttaatattcggatttggaaaccccgggagccatgctaaggattcatatccatgatatctaaggattacagtggtgggtgtcctccacccttaaattccgtgtggggggagctttcttggcacagtaaacaacagcattacctttaattataat

SEQ ID NO: 342364 - DNA, 444 bp, Homo sapiens
gaattgggagaacagtctgtggcaggaggagaaacagcccaagcagctcctcagaggaggcaggccaaagagggaagagctttagattcttttcttatggtcagggcaacctctagcaatggaaagcccagatgtctcaaagacctggacggcactgccatggcattctccttgatttgcgagctggtgcatagtcctgaagagtcccttttaaaattcttcactctgaggaatcacttaaaacaaatcatgattcttgaaatctgcctctaacccccaaatagttttttttccacggtgaagaactggaatatttctgtgtgtttgctttgctctccatgggtaacctctcttcctgcatgataaatacacatttgaaaatattgatttgctgctacccctttgaaaagcttaagaaggctgacctctgcctcagcgttctct

SEQ ID NO: 342365 - DNA, 411 bp, Homo sapiens
gtgtcaacaattttggcattgcagaagaccatggagacaacttttttatttctccatcacacaaggactgaagatacaaaaatgagtttttctttcctatggccttggactagctatatacgatagtaattagcaagcaggctctgaattacacgagcccctcccactgactcttgtactttttagctataagaacctaagcacgaacttcgcagagctccagtgcttctgttttgaaaagagataatatttcctatgggatagggttgtctgggggtactaaatgagaactacatacaaagtacttaatggaaggtatgtaggactcaatagaggtagctattaaattgtatgtaagtaacaaatcctgataatgttcaattctgaataaaacttagcaaggtagtttta

SEQ ID NO: 342366 - DNA, 105 bp, Homo sapiens
atctatatctacttacatgtagtagtaaaaaagataatgcatacatactaatatttcattgtttagctaaggagaaaatcgatctcccatactataaactccctt

SEQ ID NO: 342367 - DNA, 342 bp, Homo sapiens
atgggctgtaaacaggggagtaattacatgggctggcaaggctagcagatgtctttagggaactagagagccaaaggagccaggagggcctggtatgtgaccctggccacttgtaccagccagcctgtgcacaagagggaacagcttgtgctccccatggagggacagggaagcaattaactccaacattcccttctcaaggaaccccccagctcctctctaccccctgaaatcccagccagcctcagagagtatcatggtaataagccagatcccaacactgccccccaacaactgccccctatcccaacttgggaaccttttacttagagcttgctcttt

SEQ ID NO: 342368 - DNA, 598 bp, Homo sapiens
gattcgagctagttctgctgtcttcgtgcgcccatagtatcatggtgattactggtctgctacacgtctgccagtgagctaaatttgtattttttaagtagagatggggtttcactatgttcgtcaggctagtctcgaactcctgacctcaggtgacccaccctccttagccttccgaagtgctgggattacaggtgtgagccactgcacctggcctaaacaatatactctcttaagaaataacacacttcttaaattttaaagcattttgactagtggttctttttttttctgtgtttgaaatttggctagttgggttggctatagtaatcatctggagatttttatgcctgaagcttgattgccctctagcaagtccaaagcaagaagaggttcttccccacagggatcaatttgttgcttttcctttctgcagcttctgccataatgtttgaacacagagttagacgttgacattttctcatgctgttccttctgtcttcccacaagggttttcttagacatagattcttaccgtatatagaccttggttctttttttttttttttaaatcctgattgtgaagtgtgtttagtca

SEQ ID NO: 342369 - DNA, 531 bp, Homo sapiens
ctatccatagaggtatccatccatatgtttttctgcaaaatgtttttactttacattccagccattttctggcctcctagaaacccagttgtgtggaagtcagtaagggctaccctactatgcatttacaaggacacctttcttactgccttcagtgtgaatgccaccccttgaaacacaactctaaccaaagttactggactcagaggtgatccaaaggtgaggccctggctcagagtttattttgcaagatccagtcaaatgcatctcaaattgaggcccagaaaatactcattttaacaaactttccagatgattgtgatgctggtgattaacaggctcttttgatgactcttttggactctgatggctctttgtcttttctagaatattccttttaacaagacaggggaataaaggtagcagactagacagaagtgcactagtagttatcggtgccaattctgcctcgagtactgagttgggcttgtatgatttgttaatgtaacttaattgaattttacccagtgt

SEQ ID NO: 342370 - DNA, 395 bp, Homo sapiens
aaaacattataatgttttgtctgatatttccaatgtttttgagcatggacataaatagagactattttatagtagaaagttgtgaaacatgtgaattggccctcattctgtcttacattctaagtccaaatattaattatccaacagtctgctcattatattgagcagacatatatgcacaaacacaggcatgcactcagcatgtgagaaatgaatagagactgagtaactaagaaagtttgttccttatggccattttctttagaatgtgttggattaagactacttaaagaacttcaaaaatcataatgtattttagagagattataaattattttttcataaagtctatatgtatagctgcctcacttttctgactatagatagtacactcc

SEQ ID NO: 342371 - DNA, 269 bp, Homo sapiens
tgttgaagatcctgagttctggtcccagctctgggggcttattagctgtgtgaccttggcaaggtatttaccctttctgagctcagtttcctttcctacaaaatggggaaaacatctcaggattgttgtgaggttgtttcatattaatccacttaacacataaggtttacctacactccaggctctattcttggcacagaggaataaaaaatgaatatagcatgtgtcctacccttagggaacttgtagtctttaaggataagattgta

SEQ ID NO: 342372 - DNA, 771 bp, Homo sapiens
gcagagctcgtgttgtctaacctgttttctggttgggcagataaacaggccatgaaatgagtgcacacagtgctcacgggaaccaagagctggctgggcgccgggtgccaagcgcaggggccctggaggggctggtccagctggcgtggcctcagtgtggtgggcggcccggtgagcacctgctgctctaggggctggcttccttgtcctctcccagcaccctgtatgtctgctgtgttctcagaaacaaagttcgagaccaaaggctggcgagccagggccctggctggaggcagacgagatgggtgcaggatctagaacgtgcttccaggcgtgtgctcagcggggagtgcggcctggcttggttgcattcttattgtagatttgcttttagaacaggtggtcttaaaaaggcctggatgctttgccagagcgtaggagccctgctgtgtacacaggcgtggcttacgattgttggtaacttaagacttcgagtcttgaatcaatcaccagaaaaaaaaaaaaaaaaaaaatcctaggaggtggcccaatccgagctgccatacagaaagtgtgtgcatgtggacctgtgtgtgcacgtacgcgcctgcctgctaacggcaatgaagacagaaacttacagagagaaagtggctcccatctgcaggttccagaagccaggctcttgtctgcaggcgagaatgctgtgtggtgtggccagaaacaagtgtgagcagagcctgctcggctctgagaccaagcttatcaccc

SEQ ID NO: 342373 - DNA, 467 bp, Homo sapiens
aaaagtttttttttgttttttattttgtggaaaacaaaagcagaaaaactaaaaccccaaactccagaaaaaatcctaaaaaatatgttttttcttaaaaaatactgtatgtctctactcctctccctccctcccaacagcccttcttgtgttctttcttttctaagtgccctatcccccccacatatacatgcacttctaagagaaggaaatctttctctgggaccccgtattcccctggcctccaagaacccttttcccagctccagattcttgcactctcaagagcaagtctctccaaggaatcatcttccctctctcaggatgtgtgcatctgctcagcctcccactcttacctttctgccccagaccccccaccccccaattctcctgggccaaagagccctttttccacgcagcccaggggccccagcctcctggcctccacgcctgcgcggctagcggat

SEQ ID NO: 342374 - DNA, 621 bp, Homo sapiens
ttttcttctctacttccataatagtgtagtagttaatagcatggataaatgtcagttgttctgaggctgagtaactgactttcactttctgaagtgaaagaactcgaaatttgagtcccaattccatcattccctatgatcttcatgtttcattaggcaaattgtttaaactcactttcctcatccataataacaataatagtactgcctctttcaaagcattgtcagaatttattgagattatatataataatagcagtgtgtgtatatatacgaatgtatatgcctagcacactgaagtgatttctcacagttaataataaaaatcaagggagtaggaggttcagaaaaagtaacgccaaaatgtgtatacaatctaacaattaaagaacattgtgttgccagatgattcagtaccctctaaaaagatgaacttcagatgatcctaaaatgaacatgatagaaggaaaaatattttccctcaccaaggagattgtaattaatgtttgaatcactcgatgcttatgaatccagcagagggataaatacctatatttatatacatacacacagaagatattaatatatatgcttttgaaacatgcccccacacatttatat

SEQ ID NO: 342375 - DNA, 179 bp, Homo sapiens
tcacacaaagattcattaggagctagctctagccctgatgctgggatacagaaatggatatgacagtgtccttatctccaaggatctcacaatataatagggaacacaggcaaatacacatgcaattatactatagcatcacaaatggtgttataaaggaaagtccaaggtgccatgag

SEQ ID NO: 342376 - DNA, 341 bp, Homo sapiens
cactgcacgtatttgagagcattattttggcccaggaatcacaaaacagagttttaaaactgttctttaaaatcctaacctgctagcaggctctagactctaactcatgaaagcctctgtgagtttggagtgtgcctgtcattgctgtgtagttccttgaacttttattggaaggtgaagatgtgatgtgtagatactgagcaagagaaaatggttggggggcaaagggtgatcgtgtttgaggttataaacaaccacaaaaccgcctttgagagttgagtgctctgaacgttaagagcttgcaaaccctttagaatggctgggctttgtatggttgactg

SEQ ID NO: 342377 - DNA, 2234 bp, Homo sapiens
gtcaacaacccccgaggaaatttccaccccaatagaaacaacatatagaacggaacattcaggtccaccagagtgggcaacttaaatcctggagctaaaatatgggtacagtgtccatcagatcctgcccctaagactgctgaccttgtagctattggagcagaatatgaaggcacagtacaatttcctaaagatgaaaaacagtatcatgttcccctccatttttgttactacagagaataacctgtctgctagtaatcagcacctggatcaccatgtctgaggctgagaatgagttcatcaactgggtagccactgctgcaatagaagccaactgcagtcagtgctggctctgtgttgagttgccagaggccgctgggaatgggctaccttggagaattgtccctgctaacatttctgaatggatatgccaataccaatgggagtgggataacacttggttttgttttgattttttgagccagagtgtctctctgtcgcccaggctggagtgcagtggcacgatcttggctcagtgcaacctctgcctcctgggttcaagcgattctcctgcctcagcctcccaagtagctgggattataggtgcatgtcgccacgcctggctaattttttgtatttttagtagagacggggtttcaccgtattgcccaggctgatgtcaaactcctgagttcaggtgatctgccctcctcggcctcccaaagtgctgggattgcaggtgtgagccaccgcgcctggcccgggataacacttgaaatccaacctggacttcttttaaccaaacagtctatttttgcccttgcccaaacaaaacacagcacctttgttacttcaattacacattacagcgatacaattataggagaactcttcctgttccctggggggccctctaggtatgcgaatcctacaggtggcaatacctgcttggacggggagacacacttgggggtggccattaattccattcaccatctgggataatatttctctccccagtaatctagatgcttacaaacattgctggttatgaatgcgccggactccctggtgacggtaccctatcacagtattctcccctgccaccggtacaatcctgcttcagcaacaaattcaaacattcagcttacatgtagaaaaagctcttaatgatagtagcatggaacttatgttgtaatcagataaatttgctcagctgtgtactgtcatgttgcaaagtcaaatggcattaggtttgcttactgcagcccaaggaaaggtttgccccttactgcatcctgaatgttatgtgtatatccctgacaattctcacaatatgaatctccttgcgaagccatgaggggtgtggtttttattaattatgcttttagttctcctgtgcttaccctgtatctgtaatctatatcaattgtggcttccctgtgtatccgtaagagtattttcctacagttgagtatcagattgaggccaaatgtggaggaaaagttaaatattaaatttgaactcaattgaacatggacacaaacaatggtcaccaagtcccggaacaggttgtgtgagccccttgaggcattcatccagcgctgtttcagataaatctctatttcaatctattcctatatgttagttattgaaaaacaacagacaatcgcaaaaacaagttgacctttttgtgttccttgagcctggtcatgaagggccctcgtgcctggagctcatgccaaacaactcattacaaaagagctagggtcctagattgtgccgaagcttcatgagacctctcctcgtctgtgcacggacgagtggccgactctggagcccaggctgttgtttcctagtctggtggtgaatccgccatagtctggtgagtgcagtgtccgactctcgagcccaggctgttgctgttgcttcccagtctggtggtgaatcctccatagtctggtgagtataaatacatatatctcttttcctttctccccttcccattgcaacttgcttactatatcatttgcttattatatctgcattgccatttatgtgggataaagcttgtttacccttaaaggtattgtatgtgtgccttttcttctcccctcactcgtctctcgcacagaacactaggcaggggtaggaggaactgggagtggggggaccacagggacaaatggctgtgttcatttctcaggggccaggccacccacccatccccctct

SEQ ID NO: 342378 - DNA, 254 bp, Homo sapiens
aagaggaaactgagcacagaagaggtcacgtggttttccactatccacagctggttagaagcagaataagggttgaaacccaaatgcctgcagcatcctggcatcacagagccttcatggtcttaaaggtgggatgaattattctataccagaataatgttttggatggcagtattggaaaactatctgccttgaaagttgcttcagatgaatgaaaacctattatttttaaaaagtaaagcacttcaaatgtg

SEQ ID NO: 342379 - DNA, 814 bp, Homo sapiens
ttaaatgtcccacacacaagacaaatacgtgttcaaatacatcagtctctgaagcctctgcaccactctacacgctgctccttctgactagaatgccctcctgcccctccttccacctgtcaaactcccaatcaccctttaaaaccagattgaattattttcttctgtgaagctttccctgacaccccgggaaagaataatgtttccacagtgttttgtcatttactccataaaagaaacaaaaacatgtatttttaaaagtatctgttatctctaatagcttgtaaacatcttgaggaaagagactaagttttgcttctttttcccccaaagagaactttattaaaacatttaccatctctttagagagaggttttaccatctctttagaaagctccagaatctacaaccaggaataagtgttaatgggatagaaccaatgagagaacagcatatgatagtgaaatgtactttattattaatacgaattcagtgggctcacagaatgaacctttttgccaaacggggggaaagcattttctgtaaagtatctttagaaaaatatgtataatttgaaaaatggttatccaaatttaacatttgtcatataaaaggctcataaaacgtgtgtggctgtgtttctcaaaattgtggggtcaattggtcacattatgcctagacattctggttttgttcttggggttaataatggttgtggtcttataagaaaaggaaatctggaaatcttgtccctgttattaatacacctgtcattactaataaaagtggtttgttgatatgctaaataggttga

SEQ ID NO: 342380 - DNA, 773 bp, Homo sapiens
cggggggggggaccggctcgggacctaagtaagggtttcacagccaaaggcttggacacaaggacaggatgacggaccgttgtgagtaccgtgagaaatccaagtctagcaggaaaaacggaaagctttcgcaatgggaatcgaaatttaagccttcaatataaaaccccggtatccagccaaattcaacattactgcaagtcttagagatttaaacattcatttgattcagagctaaatattcaccataatccaggagggtctccttccccactgcagaggcagaacgtccaagaatggagtaagattagtcatagtaaagtctcagtctgaatatttagcaagagaaacaggcagcagaggaacccaaaggcagtaaatcaaatattctaaaacccaaagttcattattttcatccaaaagactttcacagaaacacattactcacagccatgtatatcttggacagagtttcagatggaatgacttgtctgaaatttgtaaagcttaatataggttttgggggaattattttaatattcaaagaatgttttattatagtcctttgtgttaaaatttagccttactaattataacaataactcataaagttctaaattcagaaggaatgtctgttctttatcaagtgtatgtaactattttttagaaatgccatctactttctagaaacactaaagttattgttttctaagttaaataactataatttatatatctattaaaaaggtacttctcttcccaaaaaactagta

SEQ ID NO: 342381 - DNA, 1609 bp, Homo sapiens
cacaagctcacctcttggagctgcttctcctacacttctcagcccattgctttgccaccccctcatgtgccagggcatcccattccaggcttcctgcaaggaaacggttggaagtgggaaaggggagctagggattgaggggttaagggacctcacactaagaaggggctgtgctttgatcccctgcctcttgcactaccaatgtctcaagacataatattcatctcttgctgtcagacccattctatattctaaaagcttctgctccttccttcccaatttctcctttgtagcaggaaattacacccagccctcatctcaattaatgctaaataaagctattgtttttccaaaacacaaatctacactgggtctcaatatcagtgatgaggcttacaaaccaacacgttttctgccatgaggatttctctttaggccagaagtacaaaacaaaaaaaccaatggattttaaccaaaatgatttgaaatataggtgaggattcaggagaaggcaaaagctagaaacacttggggttgtcaacatgagtattacattaacattgcttgatgagaacctctaatgatactgacaacataaattacctagggtaaaggatagctgcaacaatgaaacaggaaagaagagagggagagagaggaaagggaaggaagaaaggaaggagggagaagggaagaaagaaacaatgtctaacccaaccctatcttgaaagttgaactcaagtagaaaaatggatagaaacaaaattctctagtactcatccaggaaaccattcttcaatgttgcatgtggctgtttgccaaggcacacaaagtgcttgtaggcagcaaccatatgctacaagaattgtaaactgcatacagtttgtttgaagtagacagtgaggataataacaaagttgctaggcaggaaaaaaaatcaggaaaaaagcttgtcgctatttgagaatctgtatatttttaaaggcttaaaatattataaccacagggtatccagccaaattcaacattactgcaagtcttagagatttaaacattcatttgattcagagctaaatattcaccataatccaggagggtctccttccccactgcagaggcagaacgtccaagaatggagtaagattagtcatagtaaagtctcagtctgaatatttagcaagagaaacaggcagcagaggaacccaaaggcagtaaatcaaatattctaaaacccaaagttcattattttcatccaaaagactttcacagaaacacattactcacagccatgtatatcttggacagagtttcagatggaatgacttgtctgaaatttgtaaagcttaatataggttttgggggaattattttaatattcaaagaatgttttattatagtcctttgtgttaaaatttagccttactaattataacaataactcataaagttctaaattcagaaggaatgtctgttctttatcaagtgtatgtaactattttttagaaatgccatctactttctagaaacactaaagttattgttttctaagttaaataactataatttatatatctattaaaaaggtacttctcttcccaaaaaactagta

SEQ ID NO: 342382 - DNA, 435 bp, Homo sapiens
ccccctcctccaatattggggattacaatttgacatgagatttgggcaaggacagaaatacaaaccatatcaattgtgatattaaaaatttaagagaaagttatcaaatatagtgttcaaaaccttttctttggggtaagagtagctttaaaatttttctgggattctctatctccttaatgccaaattctaacctgtgtaatatttagcctagaacatcaataaaacaggaatgcaggtggttggagggcatagaagcctcttcatgatgtaattgctgtccatgttttgttgttgttgttgttgtttttttgagacagggtcttgttctgttacccaggctggagtgcagtggcacaatcatggctcattgtagcctcagcctctgggctaaaataatcctcccacctcacctcctccccaccagtagcttga

SEQ ID NO: 342383 - DNA, 150 bp, Homo sapiens
ttgggtaaaagtgggcatttttcagttagacatttacctaattttaatgaaaatacaatgaccctagaacatcctgcccatgattctgcccaagtttatgcaaacagaaaaaatttattttggaaaaaaccggatcttaaactgaaattc

SEQ ID NO: 342384 - DNA, 325 bp, Homo sapiens
ccaggagacatttttgcccttaggtgattttggcatggcaacatacagtactgaagcggtcaacaatagtttcaccaacatggaaaatccaatggagtatatttccaaacgtctttgttacccaaatgcaaaaagttctctggtttgccagacacagatatcataagtaacagcgaaagtaaccttcccatagcccatcttccttctgggcattaagcacgtgaacacacacatcacagattgctactctgatcactatggaggcagaatctgcaacatgttatcttctgtatagccacaacatccgaagtggagtagtcccttg

SEQ ID NO: 342385 - DNA, 236 bp, Homo sapiens
gaagttacccagtaacctccatttcattacatatcaaagtgttttctactttggtagaagagaagtgacctctctcttcactcaggtagggagtcccagaaaaccagagccccagtgaagtccatctagaggaatttttcacacgaccaacagataaattttctttccaagtaaagccaagtgctgggtccagggtgctaggctatcaacacaagcacaatgaggaagacttctct

SEQ ID NO: 342386 - DNA, 645 bp, Homo sapiens
aaagagcattccagccagaggcaacagggtgtgcaaagtcctgaggtgggacagcaaattgagataatgaaggaccaggaagaaagttgatatggagtttttgctctgttgcccaggctggagtgcaatggcatgatcttggctcactgaaacctccacctcctgggttcaagtgattctcctgcctcagcctcccgagtagctgggattataggagcctgccaccacacccatctaattttcgtatttttagtagagacggggtttcaccatgttggccaggctggtctcaaactcttgacctcaggtgatccacctgccctggcctcccaaagtgctgggattacaggtgtgagccaccgcacctggcccagatttgcattttaaataacccttctggctacaatgccaataaaaattggaggagcaagagtgactgagggcagacctgggaggaggtcactgcaggtgtccagatgagagatgacaatggcctggaccaggatggggaggagagagagagagaagcggaaggctttttttgcaaagtaaatgagtaggacagatgcagctatgtaagggacagcatccataagaacctaaaatcaagatatgccagaatcattggccttattgatcatttgc

SEQ ID NO: 342387 - DNA, 701 bp, Homo sapiens
aaagagcattccagccagaggcaacagggtgtgcaaagtcctgaggtgggacagcaaattgagataatgaaggaccaggaagaaaggcagggtagctagagaagattctcagaattgatgtaatcagatttgcattttttttttgatatggagtttttgctctgttgcccaggctggagtgcaatggcatgatcttggctcactgaaacctccacctcctgggttcaagtgattctcctgcctcagcctcccgagtagctgggattataggagcctgccaccacacccatctaattttcgtatttttagtagagacggggtttcaccatgttggccaggctggtctcaaactcttgacctcaggtgatccacctgccctggcctcccaaagtgctgggattacaggtgtgagccaccgcacctggcccagatttgcattttaaataacccttctggctacaatgccaataaaaattggaggagcaagagtgactgagggcagacctgggaggaggtcactgcaggtgtccagatgagagatgacaatggcctggaccaggatggggaggagagagagagagaagcggaaggctttttttgcaaagtaaatgagtaggacagatgcagctatgtaagggacagcatccataagaacctaaaatcaagatatgccagaatcattggccttattgatcatttgc

SEQ ID NO: 342388 - DNA, 124 bp, Homo sapiens
tcatatttttctaaaagtatttttactctattactattactaaaatagcatgcacatgaattaaagaatgcattcaaataaatgtatgtacaatgcaaaacagatctccccactcagcctccag

SEQ ID NO: 342389 - DNA, 373 bp, Homo sapiens
agcattggaagatcaaatcttccatgtcgcactattgcttctgacaatgtatcaaaccgcatcactttttcagctttggatcttaccctctgcagaagttccttatgtaatagatttcatgttaagaaaacagggtttcctgcagttctgaacattcacagaaactcgattcaccaccagaatcttaggaggcattttggcgtctgatgcaatttagaacttaaatggagacacaatctgatgcctgacctgaattgtttaactataaaatatgttcctattaggaaagtcacatacaacaaaaggaaacatactgtgagagaagactggggaaaaattaaatgacttcccaaagcctaaacctctgaaaaat

SEQ ID NO: 342390 - DNA, 770 bp, Homo sapiens
tgcctgcccagtttctaattggccccacatgccctttctgtatgggaaatagatattttttttgtataagccttttctctagatgtaagcagctaaatctcgtgtttctctgggggcctgtttagctgggggcacagttccgattttcccctccccctaacccccctagtgcatcccttcttgactgctctagggaggttcttctgacctctgagtgtcagtcagtcagcctgttgggaatgctgacttttctggtggtggttatcggcctgggaggcttggtttcccctctcctgagccttaggcctctgatcatcttgatttgattttttttgcttggtgtttgggtggtagagggggtgagatttgagatagaagttggggacgaagacagaaatcaaaggtggaaagatagtttatctgaagtgaatctctgggattctttgcctgaaatgggagctaacttgtgagattaagagtgggagagtgggtttggtgttcttgggggaagctgcctgtgtgggggagggtgtgtcctgactaggaggcctgctctctttatctcttggaagttggaatgagggagtgggagaaactgggtgaaagccgaatgtaggaacagtttctacacctctgagcaggtaaaagtggccctaatctctgagctctcatactcaattcagcagttttaatttttccttttgaatgagagagggtccttgaagcttgaaccttcaccaggcctgcttcttccctgcagctcccacccc

SEQ ID NO: 342391 - DNA, 370 bp, Homo sapiens
tcaggaagataaaacacagagaggtttggacaaaacagattgaaggaagggagagatgttgctttctgagccattagggagcttgcctggattagggtatcaagttgattctcttggggatcttgttgaggcccacttggagcagccgttagtgacttgatctgtggaagctgggtcccgtgcagaccaagacctggaaattcaagtaatgatgggcctggtgagccagaacctcatctgacctcatgccatctagtcagaaagaacagctgatgtggtgaagtgccaaaagcctcctgcaaagtctggactgattgacttcctagagaatcctagtccagttgaatgagctcatggacccttcccagga

SEQ ID NO: 342392 - DNA, 197 bp, Homo sapiens
aagtattggaatttggttggcattgcatggaatctgtagatcacaactgggaacaattgatatcagtattgagtatttcaatccatgaacatggtatatcttcctattgatataggtctttagtttttctcagtaatgttttatcgttttttggggttgttttgtttgtttgtttgttttttgacggagttgcactc

SEQ ID NO: 342393 - DNA, 423 bp, Homo sapiens
gtccataaattggaaaaaaaaaaaaaaagaaacttttcttgttagactcagcccaccacatcaagaagtaacacaataggaactctgggatccttagccttttacctatttaactgtatttttaaaagatagggcattggccgggcgcagtggctcaccctgtaatcccagcactttgggaagctgaggtgggcggatcacctgaggtcgggagttcgagaccagcctgaccaacatggtgaaaccctgtctctatttaaaaaataccaaaaaattagccgggcatggtggcaggcacctgtagtcccagctactcaagaggctgaggcaggagaatggcgtgaacccggaaggcggagcttgcagtgagctgagattgtgccactgcactccagcctgggcaacagagcaagactccatctc

SEQ ID NO: 342394 - DNA, 274 bp, Homo sapiens
tcactgtacctcagcatctgtcaacttatttaaatgtgtgtgttggttttctgtgccttgggatctactcattcattagaatgtgtgttttggttagattgtgccccagtatctatgtattgaaatgtgtgtgttggttcactcagcctttccatttatctatgtattgaaatgtgtgtgttggttcattgtgccatggcatctgtctatttattgaaatgagtatgttggttttctggacctgggtatctgtctatttattgaaatgtgcgtg

SEQ ID NO: 342395 - DNA, 241 bp, Homo sapiens
tatggggctgtgagaagacgacgggacgggacgtggcggccgagtgtgtgcgaaacctaaacgaacgcatccggcgggacgtcagggtctacatcagcctcctgcccctgggcgatggactcaccttggccttcaagatctagggctggcccctagtgagtgggctcgagggagggttgcctgggaaccccaggaattgaccctgagttttaaattcgaaaataaagtggggctgggacac

SEQ ID NO: 342396 - DNA, 1140 bp, Homo sapiens
tctagacgcatactcccaaccacaccacctctgagttaggctaggtactgaggctggtgttttaaatttggcctgagggaccagccggtgccccggctctccgtgcccgccgcgctggccctgggctcagccgcactgggcgccgccttcgccactggcctcttcctggggaggcggtgccccccatggcgaggccggcgagagcagtgcctgcttccccccgaggacagccgcctgtggcagtatcttctgagccgctccatgcgggagcacccggcgctgcgaagcctgaggctgctgaccctggagcagccgcagggggattctatgatgacctgcgagcaggcccagctcttggccaacctggcgcggctcatccaggccaagaaggcgctggacctgggcaccttcacgggctactccgccctggccctggccctggcgctgcccgcggacgggcgcgtggtgacctgcgaggtggacgcgcagcccccggagctgggacggcccctgtggaggcaggccgaggcggagcacaagatcgacctccggctgaagcccgccttggagaccctggacgagctgctggcggcgggcgaggccggcaccttcgacgtggccgtggtggatgcggacaaggagaactgctccgcctactacgagcgctgcctgcagctgctgcgacccggaggcatcctcgccgtcctcagactcttggtcacctcctgccgggcacttccttccggagggccggctcccgcaaggaactacctccggaaacccgccttcgtctggaactccttccaagacccagagactaccagacagaacacaacactatacacaacgaaccaggattagacagacaactacagcagaaccccgcagaccaagctagtacgacaccgaccacggaaggcagatacacgagaagctcacactaaaagaaagggaatagcaagaaagtatctaaagaaatagcgagccagtagcgacaacatgaagagcaaacagagactgaataagaacaacccgatacaaaaggcaggacgaaaacagaagcaaggacaacaaccacacaagcagaggataaaaagatgataaaaacagcaagcacccaacgccacacagaactatcga

SEQ ID NO: 342397 - DNA, 985 bp, Homo sapiens
acgtgacctgtcactgcctcccgccgcctcctgcccgcgccatgacccagccggtgccccggctctccgtgcccgccgcgctggccctgggctcagccgcactgggcgccgccttcgccactggcctcttcctggggaggcggtgccccccatggcgaggccggcgagagcagtgcctgcttccccccgaggacagccgcctgtggcagtatcttctgagccgctccatgcgggagcacccggcgctgcgaagcctgaggctgctgaccctggagcagccgcagggggattctatgatgacctgcgagcaggcccagctcttggccaacctggcgcggctcatccaggccaagaaggcgctggacctgggcaccttcacgggctactccgccctggccctggccctggcgctgcccgcggacgggcgcgtggtgacctgcgaggtggacgcgcagcccccggagctgggacggcccctgtggaggcaggccgaggcggagcacaagatcgacctccggctgaagcccgccttggagaccctggacgagctgctggcggcgggcgaggccggcaccttcgacgtggccgtggtggatgcggacaaggagaactgctccgcctactacgagcgctgcctgcagctgctgcgacccggaggcatcctcgccgtcctcagagtcctgtggcgcgggaaggtgctgcaacctccgaaaggggacgtggcggccgagtgtgtgcgaaacctaaacgaacgcatccggcgggacgtcagggtctacatcagcctcctgcccctgggcgatggactcaccttggccttcaagatctagggctggcccctagtgagtgggctcgagggagggttgcctgggaaccccaggaattgaccctgagttttaaattcgaaaataaagtggggctgggacaccaccggaagcacacgccccacccactagaaccaagcctaacacacacaacaaagcgg

SEQ ID NO: 342398 - DNA, 1016 bp, Homo sapiens
acgtgacctgtcactgcctcccgccgcctcctgcccgcgccatgacccagccggtgccccggctctccgtgcccgccgcgctggccctgggctcagccgcactgggcgccgccttcgccactggcctcttcctggggaggcggtgccccccatggcgaggccggcgagagcagtgcctgcttccccccgaggacagccgcctgtggcagtatcttctgagccgctccatgcgggagcacccggcgctgcgaagcctgaggctgctgaccctggagcagccgcagggggattctatgatgacctgcgagcaggcccagctcttggccaacctggcgcggctcatccaggccaagaaggcgctggacctgggtaggggcacgcggccgggatcccggagggccgaggtttccgggccgacccccactctgggctgagcccgtctgtgtcctggtcccaggcaccttcacgggctactccgccctggccctggccctggcgctgcccgcggacgggcgcgtggtgacctgcgaggtggacgcgcagcccccggagctgggacggcccctgtggaggcaggccgaggcggagcacaagatcgacctccggctgaagcccgccttggagaccctggacgagctgctggcggcgggcgaggccggcaccttcgacgtggccgtggtggatgcggacaaggagaactgctccgcctactacgagcgctgcctgcagctgctgcgacccggaggcatcctcgccgtcctcagagtcctgtggcgcgggaaggtgctgcaacctccgaaaggggacgtggcggccgagtgtgtgcgaaacctaaacgaacgcatccggcgggacgtcagggtctacatcagcctcctgcccctgggcgatggactcaccttggccttcaagatctagggctggcccctagtgagtgggctcgagggagggttgcctgggaaccccaggaattgaccctgagttttaaattcgaaaataaagtggggctgggacac

SEQ ID NO: 342399 - DNA, 1552 bp, Homo sapiens
tctagacgcatactcccaaccacaccacctctgagttaggctaggtactgaggctggtgttttaaatttggcctgagggaccagccggtgccccggctctccgtgcccgccgcgctggccctgggctcagccgcactgggcgccgccttcgccactggcctcttcctggggaggcggtgccccccatggcgaggccggcgagagcagtgcctgcttccccccgaggacagccgcctgtggcagtatcttctgagccgctccatgcgggagcacccggcgctgcgaagcctgaggctggtcagcagggcgcgggacggaaacgggcgtccctctcgacccctgcgggtcccacgtggctgtgtgaccttgggctgggccctggccctccctgggcttccggcttccctgggccgggtgcggtgggcgttgccgaagggccagtcccccaggccacgcccagaaccgcgcccctggggcttgggacccccagggcgaaggtgggtgacctgcatggctggtgccaccctctcctttcacgcagctgaccctggagcagccgcagggggattctatgatgacctgcgagcaggcccagctcttggccaacctggcgcggctcatccaggccaagaaggcgctggacctgggtaggggcacgcggccgggatcccggagggccgaggtttccgggccgacccccactctgggctgagcccgtctgtgtcctggtcccaggcaccttcacgggctactccgccctggccctggccctggcgctgcccgcggacgggcgcgtggtgacctgcgaggtggacgcgcagcccccggagctgggacggcccctgtggaggcaggtgagcgcccgcgcctagctctgcagccccaggcgggggcgcaacggctgacccgctccctccgcaggccgaggcggagcacaagatcgacctccggctgaagcccgccttggagaccctgggtgagcaccgaagcgggaagggctttgaagccattcattgcaaacgaggctgctgtgtggccgagctgtgactgggcctgccgggcaggttaagggcagggccggttgtcacagagcccgggccggcctgggaggggcctcagggccgcgggggccgcggactcagcgcacctgcctccctccccccgaagacgagctgctggcggcgggcgaggccggcaccttcgacgtggccgtggtggatgcggacaaggagaactgctccgcctactacgagcgctgcctgcagctgctgcgacccggaggcatcctcgccgtcctcagagtcctgtggcgcgggaaggtgctgcaacctccgaaaggggacgtggcggccgagtgtgtgcgaaacctaaacgaacgcatccggcgggacgtcagggtctacatcagcctcctgcccctgggcgatggactcaccttggccttcaagatctagggctggcccctagtgagtgggctcgagggagggttgcctgggaaccccaggaattgaccctgagttttaaattcgaaaataaagtggggctgggacac

SEQ ID NO: 342400 - DNA, 928 bp, Homo sapiens
acgtgacctgtcactgcctcccgccgcctcctgcccgcgccatgacccagccggtgccccggctctccgtgcccgccgcgctggccctgggctcagccgcactgggcgccgccttcgccactggcctcttcctggggaggcggtgccccccatggcgaggccggcgagagcagtgcctgcttccccccgaggacagccgcctgtggcagtatcttctgagccgctccatgcgggagcacccggcgctgcgaagcctgaggctgctgaccctggagcagccgcagggggattctatgatgacctgcgagcaggcccagctcttggccaacctggcgcggctcatccaggccaagaaggcgctggacctgggcaccttcacgggctactccgccctggccctggccctggcgctgcccgcggacgggcgcgtggtgacctgcgaggtggacgcgcagcccccggagctgggacggcccctgtggaggcaggccgaggcggagcacaagatcgacctccggctgaagcccgccttggagaccctggacgagctgctggcggcgggcgaggccggcaccttcgacgtggccgtggtggatgcggacaaggagaactgctccgcctactacgagcgctgcctgcagctgctgcgacccggaggcatcctcgccgtcctcagagtcctgtggcgcgggaaggtgctgcaacctccgaaaggggacgtggcggccgagtgtgtgcgaaacctaaacgaacgcatccggcgggacgtcagggtctacatcagcctcctgcccctgggcgatggactcaccttggccttcaagatctagggctggcccctagtgagtgggctcgagggagggttgcctgggaaccccaggaattgaccctgagttttaaattcgaaaataaagtggggctgggacac

SEQ ID NO: 342401 - DNA, 1206 bp, Homo sapiens
tctagacgcatactcccaaccacaccacctctgagttaggctaggtactgaggctggtgttttaaatttggcctgagggaccagccggtgccccggctctccgtgcccgccgcgctggccctgggctcagccgcactgggcgccgccttcgccactggcctcttcctggggaggcggtgccccccatggcgaggccggcgagagcagtgcctgcttccccccgaggacagccgcctgtggcagtatcttctgagccgctccatgcgggagcacccggcgctgcgaagcctgaggctggtcagcagggcgcgggacggaaacgggcgtccctctcgacccctgcgggtcccacgtggctgtgtgaccttgggctgggccctggccctccctgggcttccggcttccctgggccgggtgcggtgggcgttgccgaagggccagtcccccaggccacgcccagaaccgcgcccctggggcttgggacccccagggcgaaggtgggtgacctgcatggctggtgccaccctctcctttcacgcagctgaccctggagcagccgcagggggattctatgatgacctgcgagcaggcccagctcttggccaacctggcgcggctcatccaggccaagaaggcgctggacctgggcaccttcacgggctactccgccctggccctggccctggcgctgcccgcggacgggcgcgtggtgacctgcgaggtggacgcgcagcccccggagctgggacggcccctgtggaggcaggccgaggcggagcacaagatcgacctccggctgaagcccgccttggagaccctggacgagctgctggcggcgggcgaggccggcaccttcgacgtggccgtggtggatgcggacaaggagaactgctccgcctactacgagcgctgcctgcagctgctgcgacccggaggcatcctcgccgtcctcagagtcctgtggcgcgggaaggtgctgcaacctccgaaaggggacgtggcggccgagtgtgtgcgaaacctaaacgaacgcatccggcgggacgtcagggtctacatcagcctcctgcccctgggcgatggactcaccttggccttcaagatctagggctggcccctagtgagtgggctcgagggagggttgcctgggaaccccaggaattgaccctgagttttaaattcgaaaataaagtggggctgggacac

SEQ ID NO: 342402 - DNA, 1273 bp, Homo sapiens
tctagacgcatactcccaaccacaccacctctgagttaggctaggtactgaggctggtgttttaaatttggcctgagggaccagccggtgccccggctctccgtgcccgccgcgctggccctgggctcagccgcactgggcgccgccttcgccactggcctcttcctggggaggcggtgccccccatggcgaggccggcgagagcagtgcctgcttccccccgaggacagccgcctgtggcagtatcttctgagccgctccatgcgggagcacccggcgctgcgaagcctgaggctggtcagcagggcgcgggacggaaacgggcgtccctctcgacccctgcgggtcccacgtggctgtgtgaccttgggctgggccctggccctccctgggcttccggcttccctgggccgggtgcggtgggcgttgccgaagggccagtcccccaggccacgcccagaaccgcgcccctggggcttgggacccccagggcgaaggtgggtgacctgcatggctggtgccaccctctcctttcacgcagctgaccctggagcagccgcagggggattctatgatgacctgcgagcaggcccagctcttggccaacctggcgcggctcatccaggccaagaaggcgctggacctgggcaccttcacgggctactccgccctggccctggccctggcgctgcccgcggacgggcgcgtggtgacctgcgaggtggacgcgcagcccccggagctgggacggcccctgtggaggcaggtgagcgcccgcgcctagctctgcagccccaggcgggggcgcaacggctgacccgctccctccgcaggccgaggcggagcacaagatcgacctccggctgaagcccgccttggagaccctggacgagctgctggcggcgggcgaggccggcaccttcgacgtggccgtggtggatgcggacaaggagaactgctccgcctactacgagcgctgcctgcagctgctgcgacccggaggcatcctcgccgtcctcagagtcctgtggcgcgggaaggtgctgcaacctccgaaaggggacgtggcggccgagtgtgtgcgaaacctaaacgaacgcatccggcgggacgtcagggtctacatcagcctcctgcccctgggcgatggactcaccttggccttcaagatctagggctggcccctagtgagtgggctcgagggagggttgcctgggaaccccaggaattgaccctgagttttaaattcgaaaataaagtggggctgggacac

SEQ ID NO: 342403 - DNA, 293 bp, Homo sapiens
ccgaagccccgcctcccacggcccggttggccccgccctcccgcaggtcctgtggcgcgggaaggtgctgcaacctccgaaaggggacgtggcggccgagtgtgtgcgaaacctaaacgaacgcatccggcgggacgtcagggtctacatcagcctcctgcccctgggcgatggactcaccttggccttcaagatctagggctggcccctagtgagtgggctcgagggagggttgcctgggaaccccaggaattgaccctgagttttaaattcgaaaataaagtggggctggg

SEQ ID NO: 342404 - DNA, 328 bp, Homo sapiens
aaagtgagactccatctcaaaaaaaaaaaaaaaaaactacttagctctgccaatgaactgataaacagaatgagctttttattaatgcatgaatagcttacattaaagtagagatgcaaatgtatattacaatatgagtgaatgtgattttagaggtttatatgaaaacatatgatgaaataattgagtttttttttaaagaagacaaaagtcagtcatcaggaaaatgcagactaaaacaacaactactcatcagaatggctaaaatgttagttagattgtgatgcagctggagcttctcataacttactgatgtgaattttaagtg

SEQ ID NO: 342405 - DNA, 699 bp, Homo sapiens
cgggaaggaagtcaaagaagtgagaaaggggaacagtggccatgagcctacaatggagtacacagggtcaggttaggtggtaccttgcaggccacgataaattttacattttattttaagggtaaagtgaagtcactgaagagttttgagcaaaagaatggcatgatccaagctgcactataaaaagatacttgtagaattctggttctggtaatagtggaatagcatgcatcacactaatccccgcagagagcaattataaactctggacaaaatatataaagcatctgttggaggtactggtgagcaaccaagagcaagtagaagcaagaaagaattcaactttggaaagaaagaaacacactgagtgaaatccatgtttatatggccttaccctcaattcaacagtgcactgtgactagaactcaaggagaaaactgtagtctggttggcaggaggaatcaagggaaatctggcactgctagagtagctggatactgaggaggaatattctaggaagggtaatgggggaggcccaaaatctgcatataaacttccctcaactcttggctgagccctggactgtgcatgtgtaggaaagattctaagaagtgcagggagaaaaaactgctgagaagccaaagaaactgccaccacaggggagacagagtttgttgttcaaatcccaccaagtagagg

SEQ ID NO: 342406 - DNA, 367 bp, Homo sapiens
ggttcaacataagattttatctggaggatgaagacatgagccagttagtccaaacaagctaatccgggaatcagaggaacggggatagagaaccttgggatggagggaagccagcagcccctgtacacatcagccccctgatggacggcgtgcccctgggacacctgattcccttgctctcagaatgaccgtgcatggtaggcaggacaagcaccatgactgccaccttaatgcccaaaactagttagaaggggccggagcccagacaaaaacttgggatgtctgacttctgggcccatgtttttttccacgggggcaggactgggcggagtctctattccgggacctaggcatcatccacagagca

SEQ ID NO: 342407 - DNA, 513 bp, Homo sapiens
gtcggacacggtggctcacacctgtaatgttatgtataccttagcgcaattaaaaaacaaaaacagtctggttcagtgggtttgttatccgatcttccctgctgaacactgtcgattacaactgtatatgtgaaaataataaaattaaagaacaaactccaaactgcacagaattaccagacactgaaacactgagagaacataatctctgaggccaggtgcagtggctcatgcctgtaatcctagcaccttgggaggccaaagcaggaggatcacttgaggccacgagttcaagaccagccagggcaacatagcgaagcctcatctccacaaaaattttaaaaacttagctgggcagccaggcacggtggctaacacctgtaatcccagcactttgggaggccaaggtgggcggatcacttgaggtcaggagtttaagaccagcctggccaacacagcgaaacctcatcttcacagaaacttttaaaacttagctggacggccgggtgcagt

SEQ ID NO: 342408 - DNA, 257 bp, Homo sapiens
tatgttagggggtggaaaagtatgtatgccaagacatggaggttcaagcctggaagagaaggggctgaggacagaggtccaatccgtatattagagtattaaggagtttagacttcattcagtgaaccgtggaatcctgtagaagttttaagcaggagtataatgtcatcgcacctccttttgcagtttagccaggcgatcatgacagctgaacctaggccaacggtggtctggaatggaatgggacagatggaaaa

SEQ ID NO: 342409 - DNA, 1104 bp, Homo sapiens
aggcaaggacacagagaaagaggactacttataggaatataagttaatacaagccttacagaagtctgactttgagccaggacttgaagcagacactatggctcatgcagaaaagaaacttcttcccacaagactgccagcgaaattttgcagactcaagatgttcggagagtttggacaatcatcacagtttttggacgcctatctgagagactggattctctgttgggaatatctaggtatcagatggtgccaagacttcagaggagggggacattccctgtttattagagggaaaagaatctggagcttctgcaatccaggataaaagagaaagctgagaagaaagggcagtttggagagagagaccatcttctgtgaagtttattcagctcataagtgtgaataaaaaattgctaaatgtgaactcaaagagacagtgcagttttacatctgagtccactgaatgcatcacagaagcagcatgtgcagcaacaggagtccaataggtgagaaaagatatggaagacatgctttgaactttcacaaaccataaaattggcgaggggaggagccaattatatcaatattgtgagaggcaggaacttcagttgcaggtgtctatctctctctgcagttctaggtttattgaagggatggatagagtctttgtacccttcaatacccaacagagctttacactcaaggagtgttctataaatgtccaacacatgcataacatagtccaaatgcacgtaatggacatcaatagcaagatgagagaataagggcagaggccttatctgcaaagaaatattttgtttaatgagaaggttgagattgttggctaaaatatcagacttccagatttgagatcttaactatcttcctttattaccaattgcagtggataaattagagttagctattgttactccatttctatcaaagtacattcagtcactattctggagagtaaatcctcaaaaacttctaattctttacagtatgtaattgttctaacacagaacccgagggccatagtaataatgaaatataaaatattgttaaatgtgcaccatttagaatggtgggaaacctaat

SEQ ID NO: 342410 - DNA, 665 bp, Homo sapiens
aggcaaggacacagagaaagaggactacttataggaatataagttaatacaagccttacagaagtctgactttgagccaggacttgaagcagacactatggctcatgcagaaaagaaacttcttcccacaagactgccagcgaaattttgcagactcaagatgttcggagagtttggacaatcatcacagtttttggacgcctatctgagaccatcttctgtgaagtttattcagctcataagtgtgaataaaaaattgctaaatgtgaactcaaagagacagtgcagttttacatctgagtccactgaatgcatcacagaagcagcatgtgcagcaacaggagtccaatagcgtcaaccaccaggaaacaaggatcacggagcatgtgagaaaatggtaattgagaaggctgatcaaggaacacactaaaattggaggcatgaaacacttgcagaattgtcccaatggtccatctggggatcctgggaacaagtgtctttcaagccacgaccagtctttctacttcttcctcatactttgtatctggcttgtgtacatgtcacagaatcaggtactaaaacaagaggtgatacagaaataagctatcccaaatatagcattaagtgaaacaaacacatcgtatactagttattatatccggaag

SEQ ID NO: 342411 - DNA, 404 bp, Homo sapiens
gttgctgctctttattaggtctgagtttagcacatttagagatccatcgatccattcaagagctactgctgaaacaaaattcaactttggtcaagataaaattttctctttaaaatcaatatattccatgtcataaaagactgctcttcatttcaagttactagcattctgtgcttgaattccaacatatgtttttctatataatcttttaatcattttaaaaaagattttatcttttattcattactatataatttttaattatttgaaaatgatcaattatttaacaataatcgtgttaaattaaaaccaattcagtaagactcatcattcccctaccctacctttggtagtattgtggaaacaaaaatgctaaagtgggagtttgtatccttaaaaagcct

SEQ ID NO: 342412 - DNA, 637 bp, Homo sapiens
cctgaaataaccactaatctattttcagttcctatagatttccctattctagaaatttaatatgaatggaattacataatatgtgactcctttggattttaagttgaggggattcataaaaggtcagaagtgaaacattcataggaagtagttgattgagccaggtgtagtggctcgcagctgtaatcccagtgtggatgagggggaaggatggcttgagtccaggagttggaggctgcagggagccatgatcgagccactgcactccagcctgggtgacattgtgagactctgactcttagaaataaaaaagctgaccaggctcagtggctcatggctgtaatcacagggcttcgggaggccaaggcaggtagatcacttgaggtcgggagttcgagaccagcctggccaacatgatgaaaccccatctctactaaaaacacaaaaaattagccggccatggtgggagctgcctgtaatcccagctacttgggaggctgaggcagaagaactgcttgaaccccagaggcaggggttgcagtgagccaagatcatgccatttcactccagcctgggcaacagagtgagactccatgtcaaaaaaaaaaaccaatacatatatatatataaaataagg

SEQ ID NO: 342413 - DNA, 473 bp, Homo sapiens
cctgaaataaccactaatctattttcagttcctatagatttccctattctagaaatttaatatgaatggaattacataatatgtgactcctttggattttaagttgaggggattcataaaaggtcagaagtgaaacattcataggaagtagttgattgagccaggtgtagtggctcgcagctgtaatcccagtgtggatgagggggaaggatggcttgagtccaggagttggagaccagcctggccaacatgatgaaaccccatctctactaaaaacacaaaaaattagccggccatggtgggagctgcctgtaatcccagctacttgggaggctgaggcagaagaactgcttgaaccccagaggcaggggttgcagtgagccaagatcatgccatttcactccagcctgggcaacagagtgagactccatgtcaaaaaaaaaaaccaatacatatatatatataaaataagg

SEQ ID NO: 342414 - DNA, 547 bp, Homo sapiens
cattcatctatcgatctaacgccaacatgcatactcacacagagacccatatcaaaaatatttaaatgcaacatgggcaggacttaaaaccgtaaacaccagtagaagcaaatgatgctaaccatacctctgaagtgccacaagataaagtatcataaatgcagaggaatgattccattgctttgtgcatatttaaaaggatatggcgctgagaggtccaatctgttatagacaattcaaaaataagccagaatctaggagggtttacatcccactggggcgagatttaaaagcagccctttccatctggccagttctcctgcctccaggaaccctgcaagcctagatcccacgacagtgtattgggcacagatttcaaagtggcattctgtgctgagcactatgagggctgactcggacctttcccccagctggctgcactctcgggccacattgtttcctgcccctccctggaaggtatgtacccttgaagataaagacatcttcatagcagcctaggtaggcttgcccacctcctgcctgaact

SEQ ID NO: 342415 - DNA, 821 bp, Homo sapiens
tggtgcggggggcgcacttctgagacggaagagcatctaggagctgaatcctccacgcgggtcgcccaggttgatctgaatttctggggaatggcttggctgcccgcccgggaccaggccgaccctccttgacggtggcgtagagggctggagcctgggtactgcgaggctcctcgcatggctgggcccgccgcgaggggttgcagagcggctcagggatcgattcaagcatcgtctctcctccctcgcccccagacagagctgggcgcggggttccccttccagatggagcgagggtctcggggtggccccggaaaaggggagcccgcggccacggctacgtattgccatctcgcgagcagagatgtcacctcctgcctttggaggaaagggagcccggtggggatgagcgcatttagcccaatgctgggaacaaagcgcactccgcgcttctgcgatttcgctccattttgaaatgtgttggcgctttggtggggccgctgcggtgggcaaggccgggggcgctgttaatggaggaacctcagggggacggtccttcgtaggaaactctatcctggctctgcgcgcgctttaaggaaatggcttccctccaggacctcgagggatgcagcttttgcgcggatgacggtggggtgctgaaccagccggtgcgcctctggaaatgtctgggcacggatcctggggccatcgacgactcctccccattcccagcaggcgggagctcttacattccgagcgagtgacccctctcaccctctggcgctcacacacctgtaactccaaacctccgtctcagaatg

SEQ ID NO: 342416 - DNA, 1792 bp, Homo sapiens
  misc_feature (7)..(7): n is a, c, g, or t
  misc_feature (136)..(136): n is a, c, g, or t
gatgacncaggcagcactagagatgcgtgttgttagactcttgcccttactgtataggacacttaattgccactttctgttggctcactgggtacgatgaaatttgtccataagtaggaatataatgctgaacttntgggaacgcgtcataatgggaacagttagatgttcgaggctttaagaaaattctggtataaatctgtcttactctgcatctagtagacagcctggcatgtaattgatgttccttaaatatttatcgaattaacccagaattttctaaactaaatttagcatgtaccactatttgttattcttgccaccaccccccattcccctagctcctcacactacctgccaatgtcatcctaaggtacatgtggatacctaggttgtagaaatgctggactacacaattgctgagttactctctggctgtagattatatgatgaggtattttacaatcagcttttgaaggtcaacattgaataatgctcttttaaaaaaattatatcctcagtgtttttccatggaaaaataagtgaaaattcttttaagagttgctgtttggtgaaaagaacaaacatgactttcaaagaaaatgttttactatcaccaaaatctcccaagtgaataagtaccacagaaattacttattgcacctgtatctgccattggctgtgaaaaaggctgcaaaaagtagggctgaaagggaaactttagaaactaatactctgaaagatgttttcctatggattaaatttagtgtctttctgaaagttgggggcaaattcccagatactaatagcatctttgctaagtgtctgattatcttctatcccctaggaggaaagagtggtccatgttgctgtaactactactatgagtgcttatgctgtattgtttttaaagagtaaaacctttaagtactaatagttgtcttttctcattcacaggagcagaaaggtgcagttgtttattctcttagccttttttttttcctgtatttcccacaaatctagaaataattattggagttaatatgaaagataaataggcttttctttttactttttaatttttttctttaaatcataaaaaaccttgggatttagaaaaatgtcaaaatcgacaaataaagatgaatcattggaatgagactcttccttggttctactagctagttatataaccttatttaagtcatttatgcttcttggagctcagttttctcaccaacaaggtgataaaagggttaatttagaatgatcctttgacatttcataattgtacaattaatatgtacgatcaggaagtcctaggcaggcagagttgttttctgatttccaaagattaagcccctgatgaaaaatctggaacaaatagagaattttcattattgtgttcatttgctaataatagctttattgagatataattcactctgaaaaagtatacaattaagtggtttttactatattcacagagttgtgcaacaataaccactcactaattacagaatattttataactcccaaaagaaatcctgtaaccattagtgatcacttcccactacctcctccccacaactcctggaaaccactatatgctttttgtctccatgcctattctggacatttcatataaatggaaccatacaacatgtgacctattgtatgtggcttctttcacttagcaaaatattttgagagttcatgcatgttgtaacacgtatgaatacttcattcctttttattactaaataataatccatcatatgaatataccaca

SEQ ID NO: 342417 - DNA, 377 bp, Homo sapiens
atatgtttactgcagcactgttcacaggagcaaagtcttggaaccaacccaaatgcccatcaacgatagactggatacagaaatgtggaatgcaccatatgtcctcatctgaaagtctctgcaggatggtctgactcacgcgagtggttttgagataagttgtgttatacctcaagttaggtaaagtcgagagatgaactaacttaaaaagtagtgatgtttacatagaatctaaattggaaaagacaataatatcagcattagaaagtttgcctttaagtaaaaaaaattattagccataataggttttacattcttcgtaatagaatatcctaaagcaataaaacctccactatgtgaactctaagttctgaaca

SEQ ID NO: 342418 - DNA, 4984 bp, Homo sapiens
cgctcagctgcttctccggcggaacccaggctggaccgcgggccccggcctgggggccactgctgccaccgccgccgccacctcgtctcctccccgtccccgcccagccccaggtctccccgcctcactcgggcccgtggccggggtcactccccgccgcccctccccgcacggatgccgaaggtgaaggcgctgcagtgcgccctggcgctggagatcagctcagtaacttgcccaggagtcgtgcttaaagacaaagaggacatctatcttagcatctgtgtgtttggccaatacaaaaagacacaatgtgtcccagccacttttcccctggtcttcaatgccagaatggtgtttgaaaaggtgttcccggacgcagtagatcctggagatgtggttacacagcttgaatatgatacagcagtgttcgagttgatacagctagttccaccagtgggtgaaacactgtctacgtatgacgaaaatacacgagatttcatgtttccgggtccaaaccaaatgtctggacaccatgattcaaaccgccaggttaccatgaggaggatttctggccttcgaggaaatgctccaaggctggaattttctacgacttcagtgattactgaatgtctgataagttcaaggaaatgccacactcaggataaatttatttaccatttggctccagttgaaaaatcacatggcagactgcaaaacagaacatcaagatcacaaaagaaaaaatccaagtcacctgagagaagtaaatactgtataaatgcaaaaaactacgaacagcctacaatttcttcaaaatcacactctccatctccctacacaaaaagacgcatgtgtgagctatctgaagacaccaggcggcggctggcccatttaaatctgggaccctatgagttcaaaaaagaaacagataaacctccatttgtgattagacatgttgatcccccaagtcccagggctgatactttattgggatcttctggaagagactgtgaaagagatggatggtcaagggtgcacaatgatcattctcatcttggctgctgccgacccaaggattataaggttatcaggacaccccatgggagagacttcgatgactctttagaaaaatgtgaagagtatttgagcccaaggtcgtgtagtaagccccggcattcagcgaggaccttgctagtccattcagcaccctcaacaatgccaaagcattctccaagccctgtgttaaatagagcttctctcagggaaagatttcattctgattggtgttcaccttcaaactgcgatgagatccatgaccgggtaaaaaatgtcttgaaatcacatcaggctcatcaaagacatttatatgatgagagagacctagagaaagatgatgaactggaactgaaaagaagtcttttatgtagagactctgcctatgacagtgaccccgagtatagctcatgtcagcagccacgtggcactttccatttggatgacggtgaatactggtccaacagggcagcctcttataagggaaaatcccaccgacccatctttgagaacagcatggacaagatgtacaggaacttatacaaaaaggcctgtagttctgcttcacatacacaggaaagcttctgagaccatccatgataaacctcattagtgtccgtgtcaatttctcaatgaaaatgtttgatgtgatcaatatctgtattcctttttttaaaaaaaatgggattataactaagtacaatagttatacttgaataagttcattacttcaaatggtaaattatcataggcaagccttttaaaataattattacagaagagtctgctgtgttacaaacattagagctctgtcacacaatcacaacttccaatatgtgacaaggatattctgttacatgtacacctcatattccatctgcaaatccaagaatagttcctttctagaaatgttttttttgccttactcaccttgcaattttcttctcatctacttaactggttatcttgcctgtgtaagatttaattaatattgactaccttttcttggtgatgaacaaaatgatatcctatacagaaatgaatttcctaagggtttaaaccctgttttcactaacattttctactttttcctttttcagaacaggctattctatttcttagctcataggctttctttttaaagactatatgatcattcactcctttttctctggaagaactgtgtaagttgcttaaaatgcatagcagttagctagaaatatcagtgccatggatgatcaaaaatttgaataactaatttttaaagataaaattctttgcatgattttttttctagggccataccttttggtgcaaccagaatcagaaaatggcctctgttagtaagcttatagaaacctaaaaataataatggaattatattgtaatttgactgcttggaatttgtgtaagtaccatatggcccaaggcactattatagtatcctcactttaaaaaaaaaaacacttggaaccacaatgtgagtaaaatattatagcagaacgctttgtggtagacactgaaaatgttgttgattgatggatagaattaacttctcctcccccaccccagcacacacctgtgaagccaatgatactataaagacataaagaaatcagctactttatatttaatagagagtgaggggagggaaaggagagtgtaggaataagtgaactgggcttatagtcttgaagagttgcctaaaagataatattttctcattgactctgtttttgattaattttacagttatgattgaaaaagaacaaaatgaacttcctttaaaatgaaattaaaatgtgaaacttgctgacttatttttgtagtagaacttgttaacatcatgttaagggtgctttagtatcacagtctgtgatatatcagaaagggcattagagctatctctatgagccaggagtcctaggctttagtatcccatgtctgccgttttctagctgagtctatttaattctcagatcctttgtttcctcagctatcaaatgataagaatgtagtagaccccaaactatgttctgtggaccaagatcactgttttaggagataatcgtaggaatgtaggtataagtatgtaattggccatctaagtttaggaaaatctgtttgctacacacatacacacacacacacacacacacacacacacacacacctcttagagagtcatatgtaggattatagaggtaaaaagagatgatattaatgctggaatagcgcctgtaaactggggctgtctacagcaaattaggatatatggtcactgtgctcattgtgaacagtagcttgttcgaggctttaagaaaattctggtataaatctgtcttactctgcatctagtagacagcctggcatgtaattgatgttccttaaatatttatcgaattaacccagaattttctaaactaaatttagcatgtaccactatttgttattcttgccaccaccccccattcccctagctcctcacactacctgccaatgtcatcctaaggtacatgtggatacctaggttgtagaaatgctggactacacaattgctgagttactctctggctgtagattatatgatgaggtattttacaatcagcttttgaaggtcaacattgaataatgctcttttaaaaaaattatatcctcagtgtttttccatggaaaaataagtgaaaattcttttaagagttgctgtttggtgaaaagaacaaacatgactttcaaagaaaatgttttactatcaccaaaatctcccaagtgaataagtaccacagaaattacttattgcacctgtatctgccattggctgtgaaaaaggctgcaaaaagtagggctgaaagggaaactttagaaactaatactctgaaagatgttttcctatggattaaatttagtgtctttctgaaagttgggggcaaattcccagatactaatagcatctttgctaagtgtctgattatcttctatcccctaggaggaaagagtggtccatgttgctgtaactactactatgagtgcttatgctgtattgtttttaaagagtaaaacctttaagtactaatagttgtcttttctcattcacaggagcagaaaggtgcagttgtttattctcttagccttttttttttcctgtatttcccacaaatctagaaataattattggagttaatatgaaagataaataggcttttctttttactttttaatttttttctttaaatcataaaaaaccttgggatttagaaaaatgtcaaaatcgacaaataaagatgaatcattggaatgagactcttccttggttctactagctagttatataaccttatttaagtcatttatgcttcttggagctcagttttctcaccaacaaggtgataaaagggttaatttagaatgatcctttgacatttcataattgtacaattaatatgtacgatcaggaagtcctaggcaggcagagttgttttctgatttccaaagattaagcccctgatgaaaaatctggaacaaatagagaattttcattattgtgttcatttgctaataatagctttattgagatataattcactctgaaaaagtatacaattaagtggtttttactatattcacagagttgtgcaacaataaccactcactaattacagaatattttataactcccaaaagaaatcctgtaaccattagtgatcacttcccactacctcctccccacaactcctggaaaccactatatgctttttgtctccatgcctattctggacatttcatataaatggaaccatacaacatgtgacctattgtatgtggcttctttcacttagcaaaatattttgagagttcatgcatgttgtaacacgtatgaatacttcattcctttttattactaaataataatccatcatatgaatataccaca

SEQ ID NO: 342419 - DNA, 4933 bp, Homo sapiens
cgctcagctgcttctccggcggaacccaggctggaccgcgggccccggcctgggggccactgctgccaccgccgccgccacctcgtctcctccccgtccccgcccagccccaggtctccccgcctcactcgggcccgtggccggggtcactccccgccgcccctccccgcacggatgccgagtgagggaggctgcgaatatatatgcgattgtaagaaaggaatcatctgtgtgtttggccaatacaaaaagacacaatgtgtcccagccacttttcccctggtcttcaatgccagaatggtgtttgaaaaggtgttcccggacgcagtagatcctggagatgtggttacacagcttgaatatgatacagcagtgttcgagttgatacagctagttccaccagtgggtgaaacactgtctacgtatgacgaaaatacacgagatttcatgtttccgggtccaaaccaaatgtctggacaccatgattcaaaccgccaggttaccatgaggaggatttctggccttcgaggaaatgctccaaggctggaattttctacgacttcagtgattactgaatgtctgataagttcaaggaaatgccacactcaggataaatttatttaccatttggctccagttgaaaaatcacatggcagactgcaaaacagaacatcaagatcacaaaagaaaaaatccaagtcacctgagagaagtaaatactgtataaatgcaaaaaactacgaacagcctacaatttcttcaaaatcacactctccatctccctacacaaaaagacgcatgtgtgagctatctgaagacaccaggcggcggctggcccatttaaatctgggaccctatgagttcaaaaaagaaacagataaacctccatttgtgattagacatgttgatcccccaagtcccagggctgatactttattgggatcttctggaagagactgtgaaagagatggatggtcaagggtgcacaatgatcattctcatcttggctgctgccgacccaaggattataaggttatcaggacaccccatgggagagacttcgatgactctttagaaaaatgtgaagagtatttgagcccaaggtcgtgtagtaagccccggcattcagcgaggaccttgctagtccattcagcaccctcaacaatgccaaagcattctccaagccctgtgttaaatagagcttctctcagggaaagatttcattctgattggtgttcaccttcaaactgcgatgagatccatgaccgggtaaaaaatgtcttgaaatcacatcaggctcatcaaagacatttatatgatgagagagacctagagaaagatgatgaactggaactgaaaagaagtcttttatgtagagactctgcctatgacagtgaccccgagtatagctcatgtcagcagccacgtggcactttccatttggatgacggtgaatactggtccaacagggcagcctcttataagggaaaatcccaccgacccatctttgagaacagcatggacaagatgtacaggaacttatacaaaaaggcctgtagttctgcttcacatacacaggaaagcttctgagaccatccatgataaacctcattagtgtccgtgtcaatttctcaatgaaaatgtttgatgtgatcaatatctgtattcctttttttaaaaaaaatgggattataactaagtacaatagttatacttgaataagttcattacttcaaatggtaaattatcataggcaagccttttaaaataattattacagaagagtctgctgtgttacaaacattagagctctgtcacacaatcacaacttccaatatgtgacaaggatattctgttacatgtacacctcatattccatctgcaaatccaagaatagttcctttctagaaatgttttttttgccttactcaccttgcaattttcttctcatctacttaactggttatcttgcctgtgtaagatttaattaatattgactaccttttcttggtgatgaacaaaatgatatcctatacagaaatgaatttcctaagggtttaaaccctgttttcactaacattttctactttttcctttttcagaacaggctattctatttcttagctcataggctttctttttaaagactatatgatcattcactcctttttctctggaagaactgtgtaagttgcttaaaatgcatagcagttagctagaaatatcagtgccatggatgatcaaaaatttgaataactaatttttaaagataaaattctttgcatgattttttttctagggccataccttttggtgcaaccagaatcagaaaatggcctctgttagtaagcttatagaaacctaaaaataataatggaattatattgtaatttgactgcttggaatttgtgtaagtaccatatggcccaaggcactattatagtatcctcactttaaaaaaaaaaacacttggaaccacaatgtgagtaaaatattatagcagaacgctttgtggtagacactgaaaatgttgttgattgatggatagaattaacttctcctcccccaccccagcacacacctgtgaagccaatgatactataaagacataaagaaatcagctactttatatttaatagagagtgaggggagggaaaggagagtgtaggaataagtgaactgggcttatagtcttgaagagttgcctaaaagataatattttctcattgactctgtttttgattaattttacagttatgattgaaaaagaacaaaatgaacttcctttaaaatgaaattaaaatgtgaaacttgctgacttatttttgtagtagaacttgttaacatcatgttaagggtgctttagtatcacagtctgtgatatatcagaaagggcattagagctatctctatgagccaggagtcctaggctttagtatcccatgtctgccgttttctagctgagtctatttaattctcagatcctttgtttcctcagctatcaaatgataagaatgtagtagaccccaaactatgttctgtggaccaagatcactgttttaggagataatcgtaggaatgtaggtataagtatgtaattggccatctaagtttaggaaaatctgtttgctacacacatacacacacacacacacacacacacacacacacacacctcttagagagtcatatgtaggattatagaggtaaaaagagatgatattaatgctggaatagcgcctgtaaactggggctgtctacagcaaattaggatatatggtcactgtgctcattgtgaacagtagcttgttcgaggctttaagaaaattctggtataaatctgtcttactctgcatctagtagacagcctggcatgtaattgatgttccttaaatatttatcgaattaacccagaattttctaaactaaatttagcatgtaccactatttgttattcttgccaccaccccccattcccctagctcctcacactacctgccaatgtcatcctaaggtacatgtggatacctaggttgtagaaatgctggactacacaattgctgagttactctctggctgtagattatatgatgaggtattttacaatcagcttttgaaggtcaacattgaataatgctcttttaaaaaaattatatcctcagtgtttttccatggaaaaataagtgaaaattcttttaagagttgctgtttggtgaaaagaacaaacatgactttcaaagaaaatgttttactatcaccaaaatctcccaagtgaataagtaccacagaaattacttattgcacctgtatctgccattggctgtgaaaaaggctgcaaaaagtagggctgaaagggaaactttagaaactaatactctgaaagatgttttcctatggattaaatttagtgtctttctgaaagttgggggcaaattcccagatactaatagcatctttgctaagtgtctgattatcttctatcccctaggaggaaagagtggtccatgttgctgtaactactactatgagtgcttatgctgtattgtttttaaagagtaaaacctttaagtactaatagttgtcttttctcattcacaggagcagaaaggtgcagttgtttattctcttagccttttttttttcctgtatttcccacaaatctagaaataattattggagttaatatgaaagataaataggcttttctttttactttttaatttttttctttaaatcataaaaaaccttgggatttagaaaaatgtcaaaatcgacaaataaagatgaatcattggaatgagactcttccttggttctactagctagttatataaccttatttaagtcatttatgcttcttggagctcagttttctcaccaacaaggtgataaaagggttaatttagaatgatcctttgacatttcataattgtacaattaatatgtacgatcaggaagtcctaggcaggcagagttgttttctgatttccaaagattaagcccctgatgaaaaatctggaacaaatagagaattttcattattgtgttcatttgctaataatagctttattgagatataattcactctgaaaaagtatacaattaagtggtttttactatattcacagagttgtgcaacaataaccactcactaattacagaatattttataactcccaaaagaaatcctgtaaccattagtgatcacttcccactacctcctccccacaactcctggaaaccactatatgctttttgtctccatgcctattctggacatttcatataaatggaaccatacaacatgtgacctattgtatgtggcttctttcacttagcaaaatattttgagagttcatgcatgttgtaacacgtatgaatacttcattcctttttattactaaataataatccatcatatgaatataccaca

SEQ ID NO: 342420 - DNA, 4936 bp, Homo sapiens
cgctcagctgcttctccggcggaacccaggctggaccgcgggccccggcctgggggccactgctgccaccgccgccgccacctcgtctcctccccgtccccgcccagccccaggtctccccgcctcactcgggcccgtggccggggtcactccccgccgcccctccccgcacggatgccgaaggtgaaggcgctgcagtgcgccctggcgctggagatcagctcagtaacttgcccaggagtcgtgcttaaagacaaagaggacatctatcttagcatctgtgtgtttggccaatacaaaaagacacaatgtgtcccagccacttttcccctggtcttcaatgccagaatggtgtttgaaaaggtgttcccggacgcagtagatcctggagatgtggttacacagcttgaatatgatacagcagtgttcgagttgatacagctagttccaccagtgggtgaaacactgtctacgtatgacgaaaatacacgagatttcatgtttccgggtccaaaccaaatgtctggacaccatgattcaaaccgccaggttaccatgaggaggatttctggccttcgaggaaatgctccaaggctggaattttctacgacttcagtgattactgaatgtctgataagttcaaggaaatgccacactcaggataaatttatttaccatttggctccagttgaaaaatcacatggcagactgcaaaacagaacatcaagatcacaaaagaaaaaatccaagtcacctgagagaagtaaatactgtataaatgcaaaaaactacgaacagcctacaatttcttcaaaatcacactctccatctccctacacaaaaagacgcatgtgtgagctatctgaagacaccaggcggcggctggcccatttaaatctgggaccctatgagttcaaaaaagaaacagataaacctccatttgtgattagacatgttgatcccccaagtcccagggctgatactttattgggatcttctggaagagactgtgaaagagatggatggtcaagggtgcacaatgatcattctcatcttggctgctgccgacccaaggattataaggttatcaggacaccccatgggagagacttcgatgactctttagaaaaatgtgaagagtatttgagcccaaggtcgtgtagtaagccccggcattcagcgaggaccttgctagtccattcagcaccctcaacaatgccaaagcattctccaagccctgtgttaaatagagcttctctcagggaaagatttcattctgattggtgttcaccttcaaactgcgatgagatccatgaccgggatgagagagacctagagaaagatgatgaactggaactgaaaagaagtcttttatgtagagactctgcctatgacagtgaccccgagtatagctcatgtcagcagccacgtggcactttccatttggatgacggtgaatactggtccaacagggcagcctcttataagggaaaatcccaccgacccatctttgagaacagcatggacaagatgtacaggaacttatacaaaaaggcctgtagttctgcttcacatacacaggaaagcttctgagaccatccatgataaacctcattagtgtccgtgtcaatttctcaatgaaaatgtttgatgtgatcaatatctgtattcctttttttaaaaaaaatgggattataactaagtacaatagttatacttgaataagttcattacttcaaatggtaaattatcataggcaagccttttaaaataattattacagaagagtctgctgtgttacaaacattagagctctgtcacacaatcacaacttccaatatgtgacaaggatattctgttacatgtacacctcatattccatctgcaaatccaagaatagttcctttctagaaatgttttttttgccttactcaccttgcaattttcttctcatctacttaactggttatcttgcctgtgtaagatttaattaatattgactaccttttcttggtgatgaacaaaatgatatcctatacagaaatgaatttcctaagggtttaaaccctgttttcactaacattttctactttttcctttttcagaacaggctattctatttcttagctcataggctttctttttaaagactatatgatcattcactcctttttctctggaagaactgtgtaagttgcttaaaatgcatagcagttagctagaaatatcagtgccatggatgatcaaaaatttgaataactaatttttaaagataaaattctttgcatgattttttttctagggccataccttttggtgcaaccagaatcagaaaatggcctctgttagtaagcttatagaaacctaaaaataataatggaattatattgtaatttgactgcttggaatttgtgtaagtaccatatggcccaaggcactattatagtatcctcactttaaaaaaaaaaacacttggaaccacaatgtgagtaaaatattatagcagaacgctttgtggtagacactgaaaatgttgttgattgatggatagaattaacttctcctcccccaccccagcacacacctgtgaagccaatgatactataaagacataaagaaatcagctactttatatttaatagagagtgaggggagggaaaggagagtgtaggaataagtgaactgggcttatagtcttgaagagttgcctaaaagataatattttctcattgactctgtttttgattaattttacagttatgattgaaaaagaacaaaatgaacttcctttaaaatgaaattaaaatgtgaaacttgctgacttatttttgtagtagaacttgttaacatcatgttaagggtgctttagtatcacagtctgtgatatatcagaaagggcattagagctatctctatgagccaggagtcctaggctttagtatcccatgtctgccgttttctagctgagtctatttaattctcagatcctttgtttcctcagctatcaaatgataagaatgtagtagaccccaaactatgttctgtggaccaagatcactgttttaggagataatcgtaggaatgtaggtataagtatgtaattggccatctaagtttaggaaaatctgtttgctacacacatacacacacacacacacacacacacacacacacacacctcttagagagtcatatgtaggattatagaggtaaaaagagatgatattaatgctggaatagcgcctgtaaactggggctgtctacagcaaattaggatatatggtcactgtgctcattgtgaacagtagcttgttcgaggctttaagaaaattctggtataaatctgtcttactctgcatctagtagacagcctggcatgtaattgatgttccttaaatatttatcgaattaacccagaattttctaaactaaatttagcatgtaccactatttgttattcttgccaccaccccccattcccctagctcctcacactacctgccaatgtcatcctaaggtacatgtggatacctaggttgtagaaatgctggactacacaattgctgagttactctctggctgtagattatatgatgaggtattttacaatcagcttttgaaggtcaacattgaataatgctcttttaaaaaaattatatcctcagtgtttttccatggaaaaataagtgaaaattcttttaagagttgctgtttggtgaaaagaacaaacatgactttcaaagaaaatgttttactatcaccaaaatctcccaagtgaataagtaccacagaaattacttattgcacctgtatctgccattggctgtgaaaaaggctgcaaaaagtagggctgaaagggaaactttagaaactaatactctgaaagatgttttcctatggattaaatttagtgtctttctgaaagttgggggcaaattcccagatactaatagcatctttgctaagtgtctgattatcttctatcccctaggaggaaagagtggtccatgttgctgtaactactactatgagtgcttatgctgtattgtttttaaagagtaaaacctttaagtactaatagttgtcttttctcattcacaggagcagaaaggtgcagttgtttattctcttagccttttttttttcctgtatttcccacaaatctagaaataattattggagttaatatgaaagataaataggcttttctttttactttttaatttttttctttaaatcataaaaaaccttgggatttagaaaaatgtcaaaatcgacaaataaagatgaatcattggaatgagactcttccttggttctactagctagttatataaccttatttaagtcatttatgcttcttggagctcagttttctcaccaacaaggtgataaaagggttaatttagaatgatcctttgacatttcataattgtacaattaatatgtacgatcaggaagtcctaggcaggcagagttgttttctgatttccaaagattaagcccctgatgaaaaatctggaacaaatagagaattttcattattgtgttcatttgctaataatagctttattgagatataattcactctgaaaaagtatacaattaagtggtttttactatattcacagagttgtgcaacaataaccactcactaattacagaatattttataactcccaaaagaaatcctgtaaccattagtgatcacttcccactacctcctccccacaactcctggaaaccactatatgctttttgtctccatgcctattctggacatttcatataaatggaaccatacaacatgtgacctattgtatgtggcttctttcacttagcaaaatattttgagagttcatgcatgttgtaacacgtatgaatacttcattcctttttattactaaataataatccatcatatgaatataccaca

SEQ ID NO: 342421 - DNA, 4257 bp, Homo sapiens
cgctcagctgcttctccggcggaacccaggctggaccgcgggccccggcctgggggccactgctgccaccgccgccgccacctcgtctcctccccgtccccgcccagccccaggtctccccgcctcactcgggcccgtggccggggtcactccccgccgcccctccccgcacggatgccgaaggtgaaggcgctgcagtgcgccctggcgctggagatcagctcagtaacttgcccaggagtcgtgcttaaagacaaagaggacatctatcttagcatctgtgtgtttggccaatacaaaaagacacaatgtgtcccagccacttttcccctggtcttcaatgccagaatggtgtttgaaaaggtgttcccggacgcagtagatcctggagatgtggttacacagcttgaatatgatacagcagtgttcgagttgatacagctagttccaccagtgggtgaaacactgtctacgtatgacgaaaatacacgagatttcatgtttccgggtccaaaccaaatgtctggacaccatgattcaaaccgccaggttaccatgaggaggatttctggccttcgaggaaatgctccaaggctggaattttctacgacttcagtgattactgaatgtctgataagttcaaggaaatgccacactcaggataaatttatttaccatttggctccagttgaaaaatcacatggcagactgcaaaacagaacatcaagatcacaaaagaaaaaatccaagtcacctgagagaagtaaatactgtataaatgcaaaaaactacgaacagcctcttataagggaaaatcccaccgacccatctttgagaacagcatggacaagatgtacaggaacttatacaaaaaggcctgtagttctgcttcacatacacaggaaagcttctgagaccatccatgataaacctcattagtgtccgtgtcaatttctcaatgaaaatgtttgatgtgatcaatatctgtattcctttttttaaaaaaaatgggattataactaagtacaatagttatacttgaataagttcattacttcaaatggtaaattatcataggcaagccttttaaaataattattacagaagagtctgctgtgttacaaacattagagctctgtcacacaatcacaacttccaatatgtgacaaggatattctgttacatgtacacctcatattccatctgcaaatccaagaatagttcctttctagaaatgttttttttgccttactcaccttgcaattttcttctcatctacttaactggttatcttgcctgtgtaagatttaattaatattgactaccttttcttggtgatgaacaaaatgatatcctatacagaaatgaatttcctaagggtttaaaccctgttttcactaacattttctactttttcctttttcagaacaggctattctatttcttagctcataggctttctttttaaagactatatgatcattcactcctttttctctggaagaactgtgtaagttgcttaaaatgcatagcagttagctagaaatatcagtgccatggatgatcaaaaatttgaataactaatttttaaagataaaattctttgcatgattttttttctagggccataccttttggtgcaaccagaatcagaaaatggcctctgttagtaagcttatagaaacctaaaaataataatggaattatattgtaatttgactgcttggaatttgtgtaagtaccatatggcccaaggcactattatagtatcctcactttaaaaaaaaaaacacttggaaccacaatgtgagtaaaatattatagcagaacgctttgtggtagacactgaaaatgttgttgattgatggatagaattaacttctcctcccccaccccagcacacacctgtgaagccaatgatactataaagacataaagaaatcagctactttatatttaatagagagtgaggggagggaaaggagagtgtaggaataagtgaactgggcttatagtcttgaagagttgcctaaaagataatattttctcattgactctgtttttgattaattttacagttatgattgaaaaagaacaaaatgaacttcctttaaaatgaaattaaaatgtgaaacttgctgacttatttttgtagtagaacttgttaacatcatgttaagggtgctttagtatcacagtctgtgatatatcagaaagggcattagagctatctctatgagccaggagtcctaggctttagtatcccatgtctgccgttttctagctgagtctatttaattctcagatcctttgtttcctcagctatcaaatgataagaatgtagtagaccccaaactatgttctgtggaccaagatcactgttttaggagataatcgtaggaatgtaggtataagtatgtaattggccatctaagtttaggaaaatctgtttgctacacacatacacacacacacacacacacacacacacacacacacctcttagagagtcatatgtaggattatagaggtaaaaagagatgatattaatgctggaatagcgcctgtaaactggggctgtctacagcaaattaggatatatggtcactgtgctcattgtgaacagtagcttgttcgaggctttaagaaaattctggtataaatctgtcttactctgcatctagtagacagcctggcatgtaattgatgttccttaaatatttatcgaattaacccagaattttctaaactaaatttagcatgtaccactatttgttattcttgccaccaccccccattcccctagctcctcacactacctgccaatgtcatcctaaggtacatgtggatacctaggttgtagaaatgctggactacacaattgctgagttactctctggctgtagattatatgatgaggtattttacaatcagcttttgaaggtcaacattgaataatgctcttttaaaaaaattatatcctcagtgtttttccatggaaaaataagtgaaaattcttttaagagttgctgtttggtgaaaagaacaaacatgactttcaaagaaaatgttttactatcaccaaaatctcccaagtgaataagtaccacagaaattacttattgcacctgtatctgccattggctgtgaaaaaggctgcaaaaagtagggctgaaagggaaactttagaaactaatactctgaaagatgttttcctatggattaaatttagtgtctttctgaaagttgggggcaaattcccagatactaatagcatctttgctaagtgtctgattatcttctatcccctaggaggaaagagtggtccatgttgctgtaactactactatgagtgcttatgctgtattgtttttaaagagtaaaacctttaagtactaatagttgtcttttctcattcacaggagcagaaaggtgcagttgtttattctcttagccttttttttttcctgtatttcccacaaatctagaaataattattggagttaatatgaaagataaataggcttttctttttactttttaatttttttctttaaatcataaaaaaccttgggatttagaaaaatgtcaaaatcgacaaataaagatgaatcattggaatgagactcttccttggttctactagctagttatataaccttatttaagtcatttatgcttcttggagctcagttttctcaccaacaaggtgataaaagggttaatttagaatgatcctttgacatttcataattgtacaattaatatgtacgatcaggaagtcctaggcaggcagagttgttttctgatttccaaagattaagcccctgatgaaaaatctggaacaaatagagaattttcattattgtgttcatttgctaataatagctttattgagatataattcactctgaaaaagtatacaattaagtggtttttactatattcacagagttgtgcaacaataaccactcactaattacagaatattttataactcccaaaagaaatcctgtaaccattagtgatcacttcccactacctcctccccacaactcctggaaaccactatatgctttttgtctccatgcctattctggacatttcatataaatggaaccatacaacatgtgacctattgtatgtggcttctttcacttagcaaaatattttgagagttcatgcatgttgtaacacgtatgaatacttcattcctttttattactaaataataatccatcatatgaatataccaca

SEQ ID NO: 342422 - DNA, 1750 bp, Homo sapiens
cgctcagctgcttctccggcggaacccaggctggaccgcgggccccggcctgggggccactgctgccaccgccgccgccacctcgtctcctccccgtccccgcccagccccaggtctccccgcctcactcgggcccgtggccggggtcactccccgccgcccctccccgcacggatgccgaaggtgaaggcgctgcagtgcgccctggcgctggagatcagctcagtaacttgcccaggagtcgtgcttaaagacaaagaggacatctatcttagcatctgtgtgtttggccaatacaaaaagacacaatgtgtcccagccacttttcccctggtcttcaatgccagaatggtgtttgaaaaggtgttcccggacgcagtagatcctggagatgtggttacacagcttgaatatgatacagcagtgttcgagttgatacagctagttccaccagtgggtgaaacactgtctacgtatgacgaaaatacacgagatttcatgtttccgggtccaaaccaaatgtctggacaccatgattcaaaccgccaggttaccatgaggaggatttctggccttcgaggaaatgctccaaggctggaattttctacgacttcagtgattactgaatgtctgataagttcaaggaaatgccacactcaggataaatttatttaccatttggctccagttgaaaaatcacatggcagactgcaaaacagaacatcaagatcacaaaagaaaaaatccaagtcacctgagagaagtaaatactgtataaatgcaaaaaactacgaacagcctacaatttcttcaaaatcacactctccatctccctacacaaaaagacgcatgtgtgagctatctgaagacaccaggcggcggctggcccatttaaatctgggaccctatgagttcaaaaaagaaacagataaacctccatttgtgattagacatgttgatcccccaagtcccagggctgatactttattgggatcttctggaagagactgtgaaagagatggatggtcaagggtgcacaatgatcattctcatcttggctgctgccgacccaaggattataaggttatcaggacaccccatgggagagacttcgatgactctttagaaaaatgtgaagagtatttgagcccaaggtcgtgtagtaagccccggcattcagcgaggaccttgctagtccattcagcaccctcaacaatgccaaagcattctccaagccctgtgttaaatagagcttctctcagggaaagatttcattctgattggtgttcaccttcaaactgcgatgagatccatgaccgggtaaaaaatgtcttgaaatcacatcaggctcatcaaagacatttatatgatgagagagacctagagaaagatgatgaactggaactgaaaagaagtcttttatgtagagactctgcctatgacagtgaccccgagtataggaatgcaccatatgtcctcatctgaaagtctctgcaggatggtctgactcacgcgagtggttttgagataagttgtgttatacctcaagttaggtaaagtcgagagatgaactaacttaaaaagtagtgatgtttacatagaatctaaattggaaaagacaataatatcagcattagaaagtttgcctttaagtaaaaaaaattattagccataataggttttacattcttcgtaatagaatatcctaaagcaataaaacctccactatgtgaactctaagttctgaaca

SEQ ID NO: 342423 - DNA, 1125 bp, Homo sapiens
  misc_feature (364)..(364): n is a, c, g, or t
  misc_feature (369)..(369): n is a, c, g, or t
  misc_feature (373)..(373): n is a, c, g, or t
  misc_feature (384)..(384): n is a, c, g, or t
  misc_feature (393)..(393): n is a, c, g, or t
cgctcagctgcttctccggcggaacccaggctggaccgcgggccccggcctgggggccactgctgccaccgccgccgccacctcgtctcctccccgtccccgcccagccccaggtctccccgcctcactcgggcccgtggccggggtcactccccgccgcccctccccgcacggatgccgaaggtgaaggcgctgcagtgcgccctggcgctggagatcagctcagtaacttgcccaggagtcgtgcttaaagacaaagaggacatctatcttagcatctgtgtgtttggccaatacaaaaagacacaatgtgtcccagccacttttcccctggtcttcaatgccagaatggtgtttgaaaagnaaganacancagtgttcganttgatacancaagttccaccaatgggtgaaacactgtctacgtatgacgaaaatacacgagatttcatgtttccgggtccaaaccaaatgtctggacaccatgattcaaaccgccaggttaccatgaggaggatttctggccttcgaggaaatgctccaaggctggaattttctacgacttcagtgattactgaatgtctgataagttcaaggaaatgccacactcaggataaatttatttaccatttggctccagttgaaaaatcacatggcagactgcaaaacagaacatcaagatcacaaaagaaaaaatccaagtcacctgagagaagtaaatactgtataaatgcaaaaaactacgaacagcctacaatttcttcaaaatcacactctccatctccctacacaaaaagacgcatgtgtgagctatctgaagacaccaggcggcggctggcccatttaaatctgggaccctatgagttcaaaaaagaaacagataaacctccatttgtgattagacatgtatgtgttctcttaagcatttctatttgaaactgatcagcttttttcccaaaaaaactgttattctgaaatatctttcaacttctagcttatattaataatacttttctcttctgactgctaccctagcagtctaagatgggaaattaatttagaatgaaagaacttgctttttttcagtcttcagacctgacagagatcaagctgtgttatgaatgc

SEQ ID NO: 342424 - DNA, 4447 bp, Homo sapiens
agcccagagggctcaaagggcaggactgggcttatcgtggaaggagtggattgttcatttactgcattatcagtattcaagtaaatttgctgaagatgataactgtgacttaagccaagaaaggataaatttatttaccatttggctccagttgaaaaatcacatggcagactgcaaaacagaacatcaagatcacaaaagaaaaaatccaagtcacctgagagaagtaaatactgtataaatgcaaaaaactacgaacagcctacaatttcttcaaaatcacactctccatctccctacacaaaaagacgcatgtgtgagctatctgaagacaccaggcggcggctggcccatttaaatctgggaccctatgagttcaaaaaagaaacagataaacctccatttgtgattagacatgttgatcccccaagtcccagggctgatactttattgggatcttctggaagagactgtgaaagagatggatggtcaagggtgcacaatgatcattctcatcttggctgctgccgacccaaggattataaggttatcaggacaccccatgggagagacttcgatgactctttagaaaaatgtgaagagtatttgagcccaaggtcgtgtagtaagccccggcattcagcgaggaccttgctagtccattcagcaccctcaacaatgccaaagcattctccaagccctgtgttaaatagagcttctctcagggaaagatttcattctgattggtgttcaccttcaaactgcgatgagatccatgaccgggtaaaaaatgtcttgaaatcacatcaggctcatcaaagacatttatatgatgagagagacctagagaaagatgatgaactggaactgaaaagaagtcttttatgtagagactctgcctatgacagtgaccccgagtatagctcatgtcagcagccacgtggcactttccatttggatgacggtgaatactggtccaacagggcagcctcttataagggaaaatcccaccgacccatctttgagaacagcatggacaagatgtacaggaacttatacaaaaaggcctgtagttctgcttcacatacacaggaaagcttctgagaccatccatgataaacctcattagtgtccgtgtcaatttctcaatgaaaatgtttgatgtgatcaatatctgtattcctttttttaaaaaaaatgggattataactaagtacaatagttatacttgaataagttcattacttcaaatggtaaattatcataggcaagccttttaaaataattattacagaagagtctgctgtgttacaaacattagagctctgtcacacaatcacaacttccaatatgtgacaaggatattctgttacatgtacacctcatattccatctgcaaatccaagaatagttcctttctagaaatgttttttttgccttactcaccttgcaattttcttctcatctacttaactggttatcttgcctgtgtaagatttaattaatattgactaccttttcttggtgatgaacaaaatgatatcctatacagaaatgaatttcctaagggtttaaaccctgttttcactaacattttctactttttcctttttcagaacaggctattctatttcttagctcataggctttctttttaaagactatatgatcattcactcctttttctctggaagaactgtgtaagttgcttaaaatgcatagcagttagctagaaatatcagtgccatggatgatcaaaaatttgaataactaatttttaaagataaaattctttgcatgattttttttctagggccataccttttggtgcaaccagaatcagaaaatggcctctgttagtaagcttatagaaacctaaaaataataatggaattatattgtaatttgactgcttggaatttgtgtaagtaccatatggcccaaggcactattatagtatcctcactttaaaaaaaaaaacacttggaaccacaatgtgagtaaaatattatagcagaacgctttgtggtagacactgaaaatgttgttgattgatggatagaattaacttctcctcccccaccccagcacacacctgtgaagccaatgatactataaagacataaagaaatcagctactttatatttaatagagagtgaggggagggaaaggagagtgtaggaataagtgaactgggcttatagtcttgaagagttgcctaaaagataatattttctcattgactctgtttttgattaattttacagttatgattgaaaaagaacaaaatgaacttcctttaaaatgaaattaaaatgtgaaacttgctgacttatttttgtagtagaacttgttaacatcatgttaagggtgctttagtatcacagtctgtgatatatcagaaagggcattagagctatctctatgagccaggagtcctaggctttagtatcccatgtctgccgttttctagctgagtctatttaattctcagatcctttgtttcctcagctatcaaatgataagaatgtagtagaccccaaactatgttctgtggaccaagatcactgttttaggagataatcgtaggaatgtaggtataagtatgtaattggccatctaagtttaggaaaatctgtttgctacacacatacacacacacacacacacacacacacacacacacacctcttagagagtcatatgtaggattatagaggtaaaaagagatgatattaatgctggaatagcgcctgtaaactggggctgtctacagcaaattaggatatatggtcactgtgctcattgtgaacagtagcttgttcgaggctttaagaaaattctggtataaatctgtcttactctgcatctagtagacagcctggcatgtaattgatgttccttaaatatttatcgaattaacccagaattttctaaactaaatttagcatgtaccactatttgttattcttgccaccaccccccattcccctagctcctcacactacctgccaatgtcatcctaaggtacatgtggatacctaggttgtagaaatgctggactacacaattgctgagttactctctggctgtagattatatgatgaggtattttacaatcagcttttgaaggtcaacattgaataatgctcttttaaaaaaattatatcctcagtgtttttccatggaaaaataagtgaaaattcttttaagagttgctgtttggtgaaaagaacaaacatgactttcaaagaaaatgttttactatcaccaaaatctcccaagtgaataagtaccacagaaattacttattgcacctgtatctgccattggctgtgaaaaaggctgcaaaaagtagggctgaaagggaaactttagaaactaatactctgaaagatgttttcctatggattaaatttagtgtctttctgaaagttgggggcaaattcccagatactaatagcatctttgctaagtgtctgattatcttctatcccctaggaggaaagagtggtccatgttgctgtaactactactatgagtgcttatgctgtattgtttttaaagagtaaaacctttaagtactaatagttgtcttttctcattcacaggagcagaaaggtgcagttgtttattctcttagccttttttttttcctgtatttcccacaaatctagaaataattattggagttaatatgaaagataaataggcttttctttttactttttaatttttttctttaaatcataaaaaaccttgggatttagaaaaatgtcaaaatcgacaaataaagatgaatcattggaatgagactcttccttggttctactagctagttatataaccttatttaagtcatttatgcttcttggagctcagttttctcaccaacaaggtgataaaagggttaatttagaatgatcctttgacatttcataattgtacaattaatatgtacgatcaggaagtcctaggcaggcagagttgttttctgatttccaaagattaagcccctgatgaaaaatctggaacaaatagagaattttcattattgtgttcatttgctaataatagctttattgagatataattcactctgaaaaagtatacaattaagtggtttttactatattcacagagttgtgcaacaataaccactcactaattacagaatattttataactcccaaaagaaatcctgtaaccattagtgatcacttcccactacctcctccccacaactcctggaaaccactatatgctttttgtctccatgcctattctggacatttcatataaatggaaccatacaacatgtgacctattgtatgtggcttctttcacttagcaaaatattttgagagttcatgcatgttgtaacacgtatgaatacttcattcctttttattactaaataataatccatcatatgaatataccaca

SEQ ID NO: 342425 - DNA, 4357 bp, Homo sapiens
atcattgaacaaggtggagaaggtccagaagcataccatgaactacagaagaaggaaagatggagtaatctgatgcaactggataaatttatttaccatttggctccagttgaaaaatcacatggcagactgcaaaacagaacatcaagatcacaaaagaaaaaatccaagtcacctgagagaagtaaatactgtataaatgcaaaaaactacgaacagcctacaatttcttcaaaatcacactctccatctccctacacaaaaagacgcatgtgtgagctatctgaagacaccaggcggcggctggcccatttaaatctgggaccctatgagttcaaaaaagaaacagataaacctccatttgtgattagacatgttgatcccccaagtcccagggctgatactttattgggatcttctggaagagactgtgaaagagatggatggtcaagggtgcacaatgatcattctcatcttggctgctgccgacccaaggattataaggttatcaggacaccccatgggagagacttcgatgactctttagaaaaatgtgaagagtatttgagcccaaggtcgtgtagtaagccccggcattcagcgaggaccttgctagtccattcagcaccctcaacaatgccaaagcattctccaagccctgtgttaaatagagcttctctcagggaaagatttcattctgattggtgttcaccttcaaactgcgatgagatccatgaccgggatgagagagacctagagaaagatgatgaactggaactgaaaagaagtcttttatgtagagactctgcctatgacagtgaccccgagtatagctcatgtcagcagccacgtggcactttccatttggatgacggtgaatactggtccaacagggcagcctcttataagggaaaatcccaccgacccatctttgagaacagcatggacaagatgtacaggaacttatacaaaaaggcctgtagttctgcttcacatacacaggaaagcttctgagaccatccatgataaacctcattagtgtccgtgtcaatttctcaatgaaaatgtttgatgtgatcaatatctgtattcctttttttaaaaaaaatgggattataactaagtacaatagttatacttgaataagttcattacttcaaatggtaaattatcataggcaagccttttaaaataattattacagaagagtctgctgtgttacaaacattagagctctgtcacacaatcacaacttccaatatgtgacaaggatattctgttacatgtacacctcatattccatctgcaaatccaagaatagttcctttctagaaatgttttttttgccttactcaccttgcaattttcttctcatctacttaactggttatcttgcctgtgtaagatttaattaatattgactaccttttcttggtgatgaacaaaatgatatcctatacagaaatgaatttcctaagggtttaaaccctgttttcactaacattttctactttttcctttttcagaacaggctattctatttcttagctcataggctttctttttaaagactatatgatcattcactcctttttctctggaagaactgtgtaagttgcttaaaatgcatagcagttagctagaaatatcagtgccatggatgatcaaaaatttgaataactaatttttaaagataaaattctttgcatgattttttttctagggccataccttttggtgcaaccagaatcagaaaatggcctctgttagtaagcttatagaaacctaaaaataataatggaattatattgtaatttgactgcttggaatttgtgtaagtaccatatggcccaaggcactattatagtatcctcactttaaaaaaaaaaacacttggaaccacaatgtgagtaaaatattatagcagaacgctttgtggtagacactgaaaatgttgttgattgatggatagaattaacttctcctcccccaccccagcacacacctgtgaagccaatgatactataaagacataaagaaatcagctactttatatttaatagagagtgaggggagggaaaggagagtgtaggaataagtgaactgggcttatagtcttgaagagttgcctaaaagataatattttctcattgactctgtttttgattaattttacagttatgattgaaaaagaacaaaatgaacttcctttaaaatgaaattaaaatgtgaaacttgctgacttatttttgtagtagaacttgttaacatcatgttaagggtgctttagtatcacagtctgtgatatatcagaaagggcattagagctatctctatgagccaggagtcctaggctttagtatcccatgtctgccgttttctagctgagtctatttaattctcagatcctttgtttcctcagctatcaaatgataagaatgtagtagaccccaaactatgttctgtggaccaagatcactgttttaggagataatcgtaggaatgtaggtataagtatgtaattggccatctaagtttaggaaaatctgtttgctacacacatacacacacacacacacacacacacacacacacacacctcttagagagtcatatgtaggattatagaggtaaaaagagatgatattaatgctggaatagcgcctgtaaactggggctgtctacagcaaattaggatatatggtcactgtgctcattgtgaacagtagcttgttcgaggctttaagaaaattctggtataaatctgtcttactctgcatctagtagacagcctggcatgtaattgatgttccttaaatatttatcgaattaacccagaattttctaaactaaatttagcatgtaccactatttgttattcttgccaccaccccccattcccctagctcctcacactacctgccaatgtcatcctaaggtacatgtggatacctaggttgtagaaatgctggactacacaattgctgagttactctctggctgtagattatatgatgaggtattttacaatcagcttttgaaggtcaacattgaataatgctcttttaaaaaaattatatcctcagtgtttttccatggaaaaataagtgaaaattcttttaagagttgctgtttggtgaaaagaacaaacatgactttcaaagaaaatgttttactatcaccaaaatctcccaagtgaataagtaccacagaaattacttattgcacctgtatctgccattggctgtgaaaaaggctgcaaaaagtagggctgaaagggaaactttagaaactaatactctgaaagatgttttcctatggattaaatttagtgtctttctgaaagttgggggcaaattcccagatactaatagcatctttgctaagtgtctgattatcttctatcccctaggaggaaagagtggtccatgttgctgtaactactactatgagtgcttatgctgtattgtttttaaagagtaaaacctttaagtactaatagttgtcttttctcattcacaggagcagaaaggtgcagttgtttattctcttagccttttttttttcctgtatttcccacaaatctagaaataattattggagttaatatgaaagataaataggcttttctttttactttttaatttttttctttaaatcataaaaaaccttgggatttagaaaaatgtcaaaatcgacaaataaagatgaatcattggaatgagactcttccttggttctactagctagttatataaccttatttaagtcatttatgcttcttggagctcagttttctcaccaacaaggtgataaaagggttaatttagaatgatcctttgacatttcataattgtacaattaatatgtacgatcaggaagtcctaggcaggcagagttgttttctgatttccaaagattaagcccctgatgaaaaatctggaacaaatagagaattttcattattgtgttcatttgctaataatagctttattgagatataattcactctgaaaaagtatacaattaagtggtttttactatattcacagagttgtgcaacaataaccactcactaattacagaatattttataactcccaaaagaaatcctgtaaccattagtgatcacttcccactacctcctccccacaactcctggaaaccactatatgctttttgtctccatgcctattctggacatttcatataaatggaaccatacaacatgtgacctattgtatgtggcttctttcacttagcaaaatattttgagagttcatgcatgttgtaacacgtatgaatacttcattcctttttattactaaataataatccatcatatgaatataccaca

SEQ ID NO: 342426 - DNA, 1802 bp, Homo sapiens
cgctcagctgcttctccggcggaacccaggctggaccgcgggccccggcctgggggccactgctgccaccgccgccgccacctcgtctcctccccgtccccgcccagccccaggtctccccgcctcactcgggcccgtggccggggtcactccccgccgcccctccccgcacggatgccgaaggtgaaggcgctgcagtgcgccctggcgctggagatcagctcagtaacttgcccaggagtcgtgcttaaagacaaagaggacatctatcttagcatctgtgtgtttggccaatacaaaaagacacaatgtgtcccagccacttttcccctggtcttcaatgccagaatggtgtttgaaaaggtgttcccggacgcagtagatcctggagatgtggttacacagcttgaatatgatacagcagtgttcgagttgatacagctagttccaccagtgggtgaaacactgtctacgtatgacgaaaatacacgagatttcatgtttccgggtccaaaccaaatgtctggacaccatgattcaaaccgccaggttaccatgaggaggatttctggccttcgaggaaatgctccaaggctggaattttctacgacttcagtgattactgaatgtctgataagttcaaggaaatgccacactcaggataaatttatttaccatttggctccagttgaaaaatcacatggcagactgcaaaacagaacatcaagatcacaaaagaaaaaatccaagtcacctgagagaagtaaatactgtataaatgcaaaaaactacgaacagcctacaatttcttcaaaatcacactctccatctccctacacaaaaagacgcatgtgtgagctatctgaagacaccaggcggcggctggcccatttaaatctgggaccctatgagttcaaaaaagaaacagataaacctccatttgtgattagacatgttgatcccccaagtcccagggctgatactttattgggatcttctggaagagactgtgaaagagatggatggtcaagggtgcacaatgatcattctcatcttggctgctgccgacccaaggattataaggttatcaggacaccccatgggagagacttcgatgactctttagaaaaatgtgaagagtatttgagcccaaggtcgtgtagtaagccccggcattcagcgaggaccttgctagtccattcagcaccctcaacaatgccaaagcattctccaagccctgtgttaaatagagcttctctcagggaaagatttcattctgattggtgttcaccttcaaactgcgatgagatccatgaccgggtaaaaaatgtcttgaaatcacatcaggctcatcaaagacatttatatgttagtttctaaaatttttttttgaagactatttataataggtcaagaaaaccaccaaagatgcctaaagcttacaaaatttagtcaccgggaagaaaaaaagaaagcaagcaagctccatttgatggaagtcagtggttttgcccaaggcaacatatctaaatgcctgcttgacctaagtcattatgcaaaatgtttgaaatagaccatcttaactataaacatgttagtgataattatcttataaagtttcagtacatagtgacttgatgataattatttcacagccttcaaaatatgagaactcttgttttgtggcccaatataaagcaatttcatctactgcaaatagatttaatcctaaatggtagcatgagtgggtaggagaggtatgtattttgaagaaacttctcagttaatttgtatgttaattg

SEQ ID NO: 342427 - DNA, 353 bp, Homo sapiens
agtacagcagcaggatgtcggctcactgcagcctccacctctctggctcaagccatcctcctgtctcaacctcccaagtagctgggactacaggcgcaggccaccaaacccagcatttttttttctttttttaaaatagagacagggttttgccaaattgtccaggctggtcttgaactcctgggctctagcaatccatctgcctcagcctctcaaagtgctgggattacagacatgagccagcgcacctggcctctatgaagtatttttgccaaaaatatttgacccaaatttagtcaaacctctctagatctaacttctagtttacaggaaataaaaggaatagagaaaca

SEQ ID NO: 342428 - DNA, 1005 bp, Homo sapiens
ataaacccaggtggtcctgctccagatttgtgctctaaattgcagaattatgctgcttctcataaatttcacacacacacacacacacacacacacacacacacacacacacaaaatgtgaaggtgatatttgaataactgaagttaggggaaaactgccctaaaaggttccccattttttctgtctccctgtatctactgccctttggttgccatactttttctttttctttatttttttatttttatttttatttttttgagacagaagcaagactctgtcaagaaagaaagaaagagagagagagagagaaagaaaaagagagggagtgagaaagaaatcacaaggggagaagcaactgcaaagcagtctgaaacctccatgctgacttgtcagcacactctttctcctgtgggaaagtcagaatctagttagaaggttggtttttgtggaatcaaagcaaggtgagcaaaatgagtgattttaatcaccaggaaaacctaagatatttgtaccctctgagggatacaagagtctagagtggcagcactgctagtataattgccccttcctgtgcttgtggtagaaatgtctgatcaatcactgcatcttttccttcctactgctccctgggccagccctaagattcttagcaagagagtattctggccctgtgcggtggctcatgcctgtaatcccagcactttgggagacaaaggcagaaggattgcttgagcccaggagctggtcttgactcctggtttcaagcaatcctcttgccttgggctcccaaactgctgagattacaggtgtgagccaccgcaccagtagaagagctccttaaatatgcagttacttgctggtcatgaccatggaatgtgaaggaaaggaaggtgtcacttaattcttctatgggcaggtgaattttaagttcttaaggttgactcaaatgtggtcagagactcaagtgaaaacttgccctacccaaagaaagagtcctgaac

SEQ ID NO: 342429 - DNA, 1443 bp, Homo sapiens
ggcaaagatactgcattcactcgatcccttgggcctactcatgaccaccactacatcagaactgacatttcagagcactactggctcaatggagcaaaatttattggaactttcttcataccagacacctacaatccagatgatgataaaatatatttcttctttcgtgaatcatctcaagaaggcagtacctccgataaaaccatcctttctcgagttggaagagtttgtaagaatgatgtaggaggacaacgcagcctgataaacaagtggacgacttttcttaaggccagactgatttgctcaattcctggaagtgatggggcagatacttactttgatgagcttcgtaagttccttctttccttctttcttggaaaggccttactgcctaattaagtaacttggcatttatttccctttggctccaaatgcctgattaattttacctgagcaaaccttacaggagtggttcttactaaaattcacacgcaaagtacacggaagtgctctaggtctgggcacacgtcataatgcagtaactcttctctttgtaagagtcctcaaagtaagtgaaggaaacaaaactacagcaagacacagaaaggtgtgagctctggaactacacagttcatccattctccatgcagtctttcattttgaaaggagccaccttctataggtaggaaaatcttggattccttattccacgggtgccctctgctggcaagtacaggagatttggtgaacactgtccctccgacttgttaatgaaagaataatcagaagcagtagacagcttcttctatttcacttctcctcttcactccctcaaaaactccttccaagtcctacaatgattttttttcttttttgtttatgtataatgttagcatcattagcttttagcttcttgaacttgttcttatttttgccatgtaatgtaaaaatgataatctatatcatggaattatttcatcagtattgtgtattttccaacttaaagtatacattgagtaatcgtggatgacctctcctattgtatgtaagcacattcacatcttaatcttttaaagaatattatttgcacataacttactgtcaatacggcactaatttgggggtagctattttcttattgttaccaaataggtaaatgaggtcaggtgtggtggctcacacctgaaatcccagcactttgggaggccgaggtgtttggaccacttgaggtcaggagtttaagaccagcctggccaacatggcgaaaccctatctctactaaaaataaaaaaaaaaattagccgggctggtggtgggcacctgtaatcctagatactagggaggctgaggcaggagaattgcttgaacccaggagggagaggttgcagtgggcagagattgtgccactgcattccagcctgggtgacacagcaagactccatc

SEQ ID NO: 342430 - DNA, 808 bp, Homo sapiens
ggcaaagatactgcattcactcgatcccttgggcctactcatgaccaccactacatcagaactgacatttcagagcactactggctcaatggagcaaaatttattggaactttcttcataccagacacctacaatccagatgatgataaaatatatttcttctttcgtgaatcatctcaagaaggcagtacctccgataaaaccatcctttctcgagttggaagagtttgtaagaatgatgtaggaggacaacgcagcctgataaacaagtggacgacttttcttaaggccagactgatttgctcaattcctggaagtgatggggcagatacttactttgatgagcttcaagatatttatttactccccacaagagatgaaagaaatcctgtagtatatggagtctttactacaaccagctccatcttcaaaggctctgctgtttgtgtgtatagcatggctgacatcagagcagtttttaatggtccatatgctcataaggaaagtgcagaccatcgttgggtgcagtatgatgggagaattccttatccacggcctggtacatgtccaagcaaaacctatgacccactgattaagtccacccgagattttccagatgatgtcatcagtttcataaagcggcactctgtgatgtataagtccgtatacccagttgcaggaggaccaacgttcaagagaatcaatgtggattacagactgacacagatagtggtggatcatgtcattgcagaagatggccagtacgatgtaatgtttcttggaacaggtaagctaaaactagattagg

SEQ ID NO: 342431 - DNA, 725 bp, Homo sapiens
ggcaaagatactgcattcactcgatcccttgggcctactcatgaccaccactacatcagaactgacatttcagagcactactggctcaatggagcaaaatttattggaactttcttcataccagacacctacaatccagatgatgataaaatatatttcttctttcgtgaatcatctcaagaaggcagtacctccgataaaaccatcctttctcgagttggaagagtttgtaagaatgatgtaggaggacaacgcagcctgataaacaagtggacgacttttcttaaggccagactgatttgctcaattcctggaagtgatggggcagatacttactttgatgagcttcaagatatttatttactccccacaagagatgaaagaaatcctgtagtatatggagtctttactacaaccagctccatcttcaaaggctctgctgtttgtgtgtatagcatggctgacatcagagcagtttttaatggtccatatgctcataaggaaagtgcagaccatcgttgggtgcagtatgatgggagaattccttatccacggcctggtacaacacctttttcatacaaggcccaggaggcttagtccagtctgtgctcctgggctacaaggacccagcctgagatggtcccatctgcagggcccccgcaccagttggagcagatgctcccaccaccaatttgccaaaggtccaataaaatgctcaaccacgg

SEQ ID NO: 342432 - DNA, 1301 bp, Homo sapiens
ggcaaagatactgcattcactcgatcccttgggcctactcatgaccaccactacatcagaactgacatttcagagcactactggctcaatggagcaaaatttattggaactttcttcataccagacacctacaatccagatgatgataaaatatatttcttctttcgtgaatcatctcaagaaggcagtacctccgataaaaccatcctttctcgagttggaagagtttgtaagaatgatgtaggaggacaacgcagcctgataaacaagtggacgacttttcttaaggccagactgatttgctcaattcctggaagtgatggggcagatacttactttgatgagcttcgtaagttccttctttccttctttcttggaaaggccttactgcctaattaagtaacttggcatttatttccctttggctccaaatgcctgattaattttacctgagcaaaccttacaggagtggttcttactaaaattcacacgcaaagtacacggaagtgctctaggtctgggcacacgtcataatgcagtaactcttctctttgtaagagtcctcaaagtaagtgaaggaaacaaaactacagcaagacacagaaaggtgtgagctctggaactacacagttcatccattctccatgcagtctttcattttgaaaggagccaccttctatagaagatatttatttactccccacaagagatgaaagaaatcctgtagtatatggagtctttactacaaccagctccatcttcaaaggctctgctgtttgtgtgtatagcatggctgacatcagagcagtttttaatggtccatatgctcataaggaaagtgcagaccatcgttgggtgcagtatgatgggagaattccttatccacggcctggtacatgtccaagcaaaacctatgacccactgattaagtccacccgagattttccagatgatgtcatcagtttcataaagcggcactctgtgatgtataagtccgtatacccagttgcaggaggaccaacgttcaagagaatcaatgtggattacagactgacacagatagtggtggatcatgtcattgcagaagatggccagtacgatgtaatgtttcttggaacagacattggaactgtcctcaaagttgtcagcatttcaaaggaaaagtggaatatggaagaggtagtgctggaggagttgcagatattcaagcactcatcaatcatcttgaacatggaattgtctctgaagcagcaacaattgtacattggttcccgagatggattggttcagctctccttgca

SEQ ID NO: 342433 - DNA, 873 bp, Homo sapiens
agcggcgggtcacatggcccgcgggacaacatggctgcgcccgcactagggctggtgtgtggacgttgccctgagctgggtctcgtcctcttgctgctgctgctctcgctgctgtgtggagcggcagggagccaggaggccgggaccggtgcgggcgcggggtcccttgcgggttcttgcggctgcggcacgccccagcggcctggcgcccatggcaattcggcagccgctcaccgatactcgcgggaggctaacgctccgggccccgtacccggagagcggcaactcgcgcactcaaagatggtccccatccctgctggagtatttacaatgggcacagatgatcctcagataaagcaggatggggaagcacctgcgaggagagttactattgatgccttttacatggatgcctatgaagtcagtaatactgaatttgagaagtttgtgaactcaactggctatttgacagaggctgagaagtttggcgactcctttgtctttgaaggcatgttgagtgagcaagtgaagaccaatattcaacaggcagttgcagctgctccctggtggttacctgtgaaaggcgctaactggagacacccagaagggcctgactctactattctgcacaggccggatcatccagttctccatgtgtcctggaatgatgcggttgcctactgcacttgggcagggaagcggctgcccacggaagctgagtgggaatacagctgtcgaggaggcctgcataatagacttttcccctggggcaacaaactgcagccaaaggccagcattatgccaacatttggcagggcgagtttccggtgaccaacactggtgaggatggcttccaaggaactgcgcctgtga

SEQ ID NO: 342434 - DNA, 798 bp, Homo sapiens
agcggcgggtcacatggcccgcgggacaacatggctgcgcccgcactagggctggtgtgtggacgttgccctgagctgggtctcgtcctcttgctgctgctgctctcgctgctgtgtggagcggcagggagccaggaggccgggaccggtgcgggcgcggggtcccttgcgggttcttgcggctgcggcacgccccagcggcctggcgcccatggcaattcggcagccgctcaccgatactcgcgggaggctaacgctccgggccccgtacccggagagcggcaactcgcgcactcaaagatggtccccatccctgctggagtatttacaatgggcacagatgatcctcagataaagcaggatggggaagcacctgcgaggagagttactattgatgccttttacatggatgcctatgaagtcagtaatactgaatttgagaagtttgtgaactcaactggctatttgacagaggttgcagctgctccctggtggttacctgtgaaaggcgctaactggagacacccagaagggcctgactctactattctgcacaggccggatcatccagttctccatgtgtcctggaatgatgcggttgcctactgcacttgggcagggaagcggctgcccacggaagctgagtgggaatacagctgtcgaggaggcctgcataatagacttttcccctggggcaacaaactgcagccaaaggccagcattatgccaacatttggcagggcgagtttccggtgaccaacactggtgaggatggcttccaaggaactgcgcctgtga

SEQ ID NO: 342435 - DNA, 621 bp, Homo sapiens
cactcaaatctagatttgctgagaaagtgtttgtaactatcatactttgcaataacctttcctctaaagacatcttcaaagaacagtttatttattttctaaatcacttctgacgttgtctttttctctgcttttgtgctgcgacagacacatagtctctctatgtcctttgtccaagggatggattacagtagccttccttcaagtgacattagcagaaatgtcaacgatatatgttcagatgttcagggcttatttttctttaggacagttttccccctcccttcagtgggttatgttaacctttaaagtgaaaatttctcaaacctttatacttgcaactttaataaaaactctttttttttcctctagttctggagagcatataatcagtcagggatttaattctcattaatcttagtttaccacacagacagcctttgaattactatccaatgttgttatacctctgcacacagagacaactgagtggaggaagggatgaggagaaaatagaaagctgaaacacagaggtgctctgaaagccctacctactgcaaaacggtccttcggaatttagaataataaatccctcgttagattgatctgtcagcaccctac

SEQ ID NO: 342436 - DNA, 821 bp, Homo sapiens
ctgtctgtttgcatcctggggaaacctctcacatagctggtccttcctccaattcgaggaacttaacaagctgcttgtctaagcatgtgcctgttctaggcaggggataaacattcttgacctgtggctttccaagtagagtaggaaggaagatgcgtcattaaattataagtcattaaatgcctgatacatgttttgcatgagagctgtgtttgaagtatttctgtagcaaagcggatggaatgacaaatctgaagggggtgaagagttggggaacacttcatggaggagcaagtgatatttgcaatgggtgctgaagtatacataggagttcaccaggcagtgggaacagcagctacagaataggaacgtggaaaaagtcatgactgatcctgggaatcccaagtcattttatgtagtttgagagtagggtgctctatggggagtcttgggagataccacaagatcatgagaggtttgtgtgcttggcaaatgacttggacattcttttgtaagcgggaaggtgggaggcttttaacaagagagaccagacaggagcagaaatgtattttagaaaggatggactggacggcagaattgatagtgacaagttgatcttctggctggctatttcatccatggagtagaataagatgccatgagggcctgaacccaacagggaggagtagatgaattcaagagaggataggggaggttagactggagatgtgattacagggcatgagggctatgggagatttcttgttttctggcttggaaggctgagttgacggtgttgccgttgaccttgaatgggagta

SEQ ID NO: 342437 - DNA, 468 bp, Homo sapiens
tggctcctgaggatatacagcccaactaaaggcacgattggagtagcttaaaagtctgtggagaaatggtagaataagccagttcatacttacttctttagcctctgaaataactactcttttttttttaggtaatattaaactagaaatttaatcattaatcagtacaacagaatagtctctaagctgcttttactgaaggagcaacctaagttgctgatcccttaagttacaatcagataacgtgaaataatagttaatgctatgacagtggaggtagtcaatagaatatgtgaaatatatcggtgctattttctttttatctttttttttccccctacaacatccagagtatgagagctattttcattttagataaaatagtcagggaaggctttatggaaggttatgacctgagctgggtgttaatgggaagtcaagatttgagtaggttgggggcagcatttc

SEQ ID NO: 342438 - DNA, 430 bp, Homo sapiens
ctgggtgacagagtgagacctagtcttcaagaaatatacaaaatagacaatagggctggtaggatagtgggaacataagagtttttcttttcttatttctctaactttggtaatatgttattttcgtaatttaaaaataaaatttcaaatgcaaatttactcccatccattaatatctctgagaaaaatccacaagtccttattgtcaagtatatgactaataccctgttcagcagccctacaaaaaggtaattaaaaccatctagaggcctggtgaggtttgatttacttttctgggaaacttggaaaagatcttcctagtatggacctgatttatcatctgactttgaaggttctccttgtgtttgatttctattaaccatctcttccacatactcagcctccttcccaacttccccatggctgagag

SEQ ID NO: 342439 - DNA, 986 bp, Homo sapiens
aagcgtcagtgtggccactgataagttgcactgacgtgtatctgcagcagttggaggcttctcttttgataactgccgcaggaatgccgtcttggaagccgattttgcaaagaggggatacaagcttccaaaggtccggaaaactggcacgaccatcgctggggtggtctataaggatggcatagttcttggagcagatacaagagcaactgaagggatggttgttgctgacaagaactgttcaaaaatacacttcatatctcctaatatttattgttgtggtgctgggacagctgcagacacagacatgacaacccagctcatttcttccaacctggagctccactccctctccactggccgtcttcccagagttgtgacagccaatcggatgctgaagcagatgcttttcaggtatcaaggttacattggtgcagccctagttttagggggagtagatgttactggacctcacctctacagcatctatcctcatggatcaactgataagttgccttatgtcaccatgggttctggctccttggcagcaatggctgtatttgaagataagtttaggccagacatggaggaggaggaagccaagaatctggtgagcgaagccatcgcagctggcatcttcaacgacctgggctccggaagcaacattgacctctgcgtcatcagcaagaacaagctggattttctccgcccatacacagtgcccaacaagaaggggaccaggcttggccggtacaggtgtgagaaagggactactgcagtcctcactgagaaaatcactcctctggagattgaggtgctggaagaaacagtccaaacaatggacacttcctgaatggcatcagtgggtggctggccgcggttctggaaggtggtgagcattgaggcccagtaagacactcatgtggctagtgtttgccgaatgaaactcaactcaataaaaaacaaaaaccaaattgggcagctga

SEQ ID NO: 342440 - DNA, 848 bp, Homo sapiens
tgccagattcactccaggaagaaggtgttgggtgtgtcctagtggggacccactgtgtccctgaaagggacagttaacttttcttgagacttgagagtggtctgaaatgacaagcccagagtctggctgcacattttttttacactgtttatgcttccagatgtttgtgcagtgtctaaggtaacagttaagtcattcttgttgctgcacggaagagcaatcatgcccttctcttgtgtaatgatgggatttgcttcctgctgtccctgaacagtattgtagggaggttgaagattgatgtcaagggaccaagtgcttcccagcacttgtggggatggtggggtggggggagagtcacgtgtccaccaagggccaggtgccgtgttcactaatgacactctttgcctcccaggcacccccattttgcagcacttgagaactgaggaagttgaatcccccaagatcacagagctgggatcgggagagccaagattccagtccagcctgctcactgcgttgcctgaatatttattttcactgtcttctgccctctggcaccttgaggagaatcctaactctgtgcttttgtttttctcttactaggcttggccggtacaggtgtgagaaagggactactgcagtcctcactgagaaaatcactcctctggagattgaggtgctggaagaaacagtccaaacaatggacacttcctgaatggcatcagtgggtggctggccgcggttctggaaggtggtgagcattgaggcccagtaagacactcatgtggctagtgtttgccgaatgaaactcaactcaataaaaaacaaaaaccaaattgggcagctga

SEQ ID NO: 342441 - DNA, 836 bp, Homo sapiens
tctttttcaaagatttttctggttttatcttgaacatttacaaattgattgctgattcctcccgagcttgtacagcactgttgttagttggaatgttctttggcacagatggtctgtttgccgaagagaccagcttccttttgtagtggcccagctgtgcccttccttgggcttgaggcaccagcgctatccagctttttgctctgggctttgggctgtctaggaatcttcttgactgtaaatgcggtggtaacgtggaatgttttcttgcgcaccaagctttctgtgtcacgatatctcaaaatgacaggtttttctgttcttactaagaacagaaaaactgtgtatgtctttgcatgttacagagacgtgacctgaaaatggaggcagttttaaaaatccctgtagatgattctgcatctggcagaagatggggacaagaccacacatgtgggggattcatctcagagcgtaatgatctagtgtctcagatacatgtatgagagattcttttattgtgttttctttggtggtgggggaaggtggtatcttctgaatgatactccacttaagtctactttaatgatagattgtctccaccccgccaccccctacatcttcaggacaaatgcacagctcttccatggtcactgtcgcaggaatgttgaatatgcctggatccatcatggtaccacgttactcctccacggcactacatctggccgctaaaccagcattcggcacataagcttttttgatggttgttaattttttgatggggagtatcaacttcttttcaacaattaataggtagtttatgagtggtttaccctatt

SEQ ID NO: 342442 - DNA, 232 bp, Homo sapiens
aaattattgagtgaagctgagcagaaggaaatatatgtgcctaggaaaaagaatagagcaaaaaaaaaaaaatttactgtgcaactgccaaggaaaggaatggccccggaggaaaaaacagctagtgatttttaaggaaaaatgcctttaaggttctggctccttggcagcaatggctgtatttgaagataagtttaggccagacatggaggtatgtaagtccctgcagttt

SEQ ID NO: 342443 - DNA, 1101 bp, Homo sapiens
  misc_feature (1018)..(1018): n is a, c, g, or t
  misc_feature (1036)..(1036): n is a, c, g, or t
  misc_feature (1039)..(1039): n is a, c, g, or t
  misc_feature (1051)..(1051): n is a, c, g, or t
cggacccggaactggctttcttgggaagatggcggctgtgtcggtgtatgctccaccagttggaggcttctcttttgataactgccgcaggaatgccgtcttggaagccgattttgcaaagaggggatacaagcttccaaaggtccggaaaactggcacgaccatcgctggggtggtctataaggatggcatagttcttggagcagatacaagagcaactgaagggatggttgttgctgacaagaactgttcaaaaatacacttcatatctcctaatatttattgttgtggtgctgggacagctgcagacacagacatgacaacccagctcatttcttccaacctggagctccactccctctccactggccgtcttcccagagttgtgacagccaatcggatgctgaagcagatgcttttcaggtatcaaggttacattggtgcagccctagttttagggggagtagatgttactggacctcacctctacagcatctatcctcatggatcaactgataagttgccttatgtcaccatgggttctggctccttggcagcaatggctgtatttgaagataagtttaggccagacatggaggaggaggaagccaagaatctggtgagcgaagccatcgcagctggcatcttcaacgacctgggctccggaagcaacattgacctctgcgtcatcagcaagaacaagctggattttctccgcccatacacagtgcccaacaagaaggggaccaggcttggccggtacaggtgtgagaaagggactactgcagtcctcactgagaaaatcactcctctggagattgaggtgctggaagaaacagtccaaacaatggacacttcctgaatggcatcagtgggtggctggccgcggttctggaaggtggtgagcattgaggcccagtaagacactcatgtggctagtgtttgccgaatgaaactcaactcaataaaaaacaaaaaccaaattgggcagctgaaaaaaaaaaaaaaaaaactccgnggggggccccgtacccanttnggcctattaggngtcctgtttcaatttactttggcctctgtttcaacctggtggctttgggg

SEQ ID NO: 342444 - DNA, 991 bp, Homo sapiens
cggacccggaactggctttcttgggaagatggcggctgtgtcggtgtatgctccaccagttggaggcttctcttttgataactgccgcaggaatgccgtcttggaagccgattttgcaaagaggggatacaagcttccaaaggtccggaaaactggcacgaccatcgctggggtggtctataaggatggcatagttcttggagcagatacaagagcaactgaagggatggttgttgctgacaagaactgttcaaaaatacacttcatatctcctaatatttattgttgtggtgctgggacagctgcagacacagacatgacaacccagctcatttcttccaacctggagctccactccctctccactggccgtcttcccagagttgtgacagccaatcggatgctgaagcagatgcttttcaggtatcaaggttacattggtgcagccctagttttagggggagtagatgttactggacctcacctctacagcatctatcctcatggatcaactgataagttgccttatgtcaccatgggttctggctccttggcagcaatggctgtatttgaagataagtttaggccagacatggaggaggaggaagccaagaatctggtgagcgaagccatcgcagctggcatcttcaacgacctgggctccggaagcaacattgacctctgcgtcatcagcaagaacaagctggattttctccgcccatacacagtgcccaacaagaaggggaccaggcttggccggtacaggtgtgagaaagggactactgcagtcctcactgagaaaatcactcctctggagattgaggtgctggaagaaacagtccaaacaatggacacttcctgaatggcatcagtgggtggctggccgcggttctggaaggtggtgagcattgaggcccagtaagcccatcctgtgcatagcgttccaagcctcgaggtccatcgcggggcagagtcgttggagactgtagag

SEQ ID NO: 342445 - DNA, 1620 bp, Homo sapiens
tgacagcggagatacaggacgtcgggtggccgctggtgctgctcgctgctcctgctggcagacggacaggatcacagtcccccaggggtccccacagtcaagggtgcagaagggctgtcagagtggccgagcctcacttctgggtagataggctgccaagtccagtggagttttgaggccatagtttctaggccatggaaaatgatttttcctgagtaggggaaggagactcatctgtgtctcctcgtcagccaccagcctgggagcagagatttggagccagaagctacagtgggacatcagtacctctttgcttctccccaagaaggcctcagaaatattttggagcagtggtgacactgctagccttcccaccaccattttatttggtagttaaaataaaggaggtgtgcccattgtaagattccttttgtgtgaagttctagatttttttttttttttttttgaggtaggtttctagctctgtcatccaggctggagtgcagtggcgtgatcatggctcactgtgacctctgtctcctggtctcaagggatcctcccacctcagcctctcaagtagtcgggaccacagatggggttgcactatgtcgcctaggttggagtgcggtgaacacaatcacagctcactgcagcctcgagttcctgggctcaagtgatcctcccacctcaacctcttgagcagctgggactgcaggaatgccgtcttggaagccgattttgcaaagaggggatacaagcttccaaaggtccggaaaactggcacgaccatcgctggggtggtctataaggatggcatagttcttggagcagatacaagagcaactgaagggatggttgttgctgacaagaactgttcaaaaatacacttcatatctcctaatatttattgttgtggtgctgggacagctgcagacacagacatgacaacccagctcatttcttccaacctggagctccactccctctccactggccgtcttcccagagttgtgacagccaatcggatgctgaagcagatgcttttcaggtatcaaggttacattggtgcagccctagttttagggggagtagatgttactggacctcacctctacagcatctatcctcatggatcaactgataagttgccttatgtcaccatgggttctggctccttggcagcaatggctgtatttgaagataagtttaggccagacatggaggaggaggaagccaagaatctggtgagcgaagccatcgcagctggcatcttcaacgacctgggctccggaagcaacattgacctctgcgtcatcagcaagaacaagctggattttctccgcccatacacagtgcccaacaagaaggggaccaggcttggccggtacaggtgtgagaaagggactactgcagtcctcactgagaaaatcactcctctggagattgaggtgctggaagaaacagtccaaacaatggacacttcctgaatggcatcagtgggtggctggccgcggttctggaaggtggtgagcattgaggcccagtaagacactcatgtggctagtgtttgccgaatgaaactcaactcaataaaaaacaaaaaccaaattgggcagctga

SEQ ID NO: 342446 - DNA, 941 bp, Homo sapiens
cggacccggaactggctttcttgggaagatggcggctgtgtcggtgtatgctccaccagttggaggcttctcttttgataactgccgcaggaatgccgtcttggaagccgattttgcaaagaggggatacaagcttccaaaggtccggaaaactggcacgaccatcgctggggtggtctataaggatggcatagttcttggagcagatacaagagcaactgaagggatggttgttgctgacaagaactctgcagacacagacatgacaacccagctcatttcttccaacctggagctccactccctctccactggccgtcttcccagagttgtgacagccaatcggatgctgaagcagatgcttttcaggtatcaaggttacattggtgcagccctagttttagggggagtagatgttactggacctcacctctacagcatctatcctcatggatcaactgataagttgccttatgtcaccatgggttctggctccttggcagcaatggctgtatttgaagataagtttaggccagacatggaggaggaggaagccaagaatctggtgagcgaagccatcgcagctggcatcttcaacgacctgggctccggaagcaacattgacctctgcgtcatcagcaagaacaagctggattttctccgcccatacacagtgcccaacaagaaggggaccaggcttggccggtacaggtgtgagaaagggactactgcagtcctcactgagaaaatcactcctctggagattgaggtgctggaagaaacagtccaaacaatggacacttcctgaatggcatcagtgggtggctggccgcggttctggaaggtggtgagcattgaggcccagtaagacactcatgtggctagtgtttgccgaatgaaactcaactcaataaaaaacaaaaaccaaattgggcagctga

SEQ ID NO: 342447 - DNA, 859 bp, Homo sapiens
cggacccggaactggctttcttgggaagatggcggctgtgtcggtgtatgctccaccagttggaggcttctcttttgataactgccgcaggaatgccgtcttggaagccgattttgcaaagaggggatacaagcttccaaaggtccggaaaactggcacgaccatcgctggggtggtctataaggatggcatagttcttggagcagatacaagagcaactgaagggatggttgttgctgacaagaactgttcaaaaatacacttcatatctcctaatatttattgttgtggtgctgggacagctgcagacacagacatgacaacccagctcatttcttccaacctggagctccactccctctccactggccgtcttcccagagttgtgacagccaatcggatgctgaagcagatgcttttcaggtatcaaggttacattggtgcagccctagttttagggggagtagatgttactggacctcacctctacagcatctatcctcatggatcaactgataagttgccttatgtcaccatgggttctggctccttggcagcaatggctgtatttgaagataagtttaggccagacatggaggaggaggaagccaagaatctggtgagcgaagccatcgcagctggcatcttcaacgacctgggctccggaagcaacattgacctctgcgtcatcagcaagaacaagctggattttctccgcccatacacagtgcccaacaagaaggggaccagcggttctggaaggtggtgagcattgaggcccagtaagacactcatgtggctagtgtttgccgaatgaaactcaactcaataaaaaacaaaaaccaaattgggcagctga

SEQ ID NO: 342448 - DNA, 1086 bp, Homo sapiens
  misc_feature (442)..(443): n is a, c, g, or t
tgggcaggtggacagatgtgcgagtcggcacgtagggttgtgtgcggtgtttgctaccaccagttggatggcttctcttgtagatatcatgccggtctggtaatgccgtctcgtgtaatgccgattttgcaatcgagtgtggatacgaagccttccatcaggcccggaaaactggtgcacgaccatcgctgggagtggctcgtataatggactgggcctagttctcgcgagcacgattgcaagacgcgatctgcccggtgcattgtgtctgttagtctggactaacgcaactagttgcaattacactgcagcgttcatattcctcctagaatatttacttgttagtggtgctaggcgatcagctgcaagacacacgcacgtgacagacctctacgctcatttcgttcctacagccttggatgctccacctgccctctcctannctggccgtcgttccctacgaggcgtgcttgccatgtcaggatgcttgataggcatcacttctgtgtcacgtgtatcaaggttacattggtgcagccctagttttagggggagtagatgttactggacctcacctctacagcatctatcctcatggatcaactgataagttgccttatgtcaccatgggttctggctccttggcagcaatggctgtatttgaagataagtttaggccagacatggaggaggaggaagccaagaatctggtgagcgaagccatcgcagctggcatcttcaacgacctgggctccggaagcaacattgacctctgcgtcatcagcaagaacaagctggattttctccgcccatacacagtgcccaacaagaaggggaccaggcttggccggtacaggtgtgagaaagggactactgcagtcctcactgagaaaatcactcctctggagattgaggtgctggaagaaacagtccaaacaatggacacttcctgaatggcatcagtgggtggctggccgcggttctggaaggtggtgagcattgaggcccagtaagacactcatgtggctagtgtttgccgaatgaaactcaactcaataaaaaacaaaaaccaaattgggcagctga

SEQ ID NO: 342449 - DNA, 2810 bp, Homo sapiens
tggcctcgtccgcttggatgcgcggggatctgcagcttctggttcctcaggggccggacaaggtggtccccaggcattgcaaaggttgccagtggtcctcccctgggcccgagagccccgtgcggacacctggtggaagtgcccaggcactgccggtgggcttcttgctgctgcacgggccgcccctttgtgttttttttcccaatttaaaaaagcctttattcatacttaaataacagcatacatgataatttgatgagtaaatcaaactatataattttaaaatttgcatattttaaagttttatcagttacttacagactgtttgcaaaatagagggaggatcactcataatcttacatagcactgtcagcagtctgctgtcctgtgcccagtcgaatggattgacactagatatgcatgtctcatgtcattcgtatatttccgtttccccaagtcttcacctgtccccatctacccagatcatttgggaaatgtaaatgtgcagtcctaagcgctgcccgcagggtcgcgatgtctgccaggtactgctggctggctctagacaccagcagcagtgataagaaacaaagcagaggagacagttaaatggtagagaagagaagggggagcagaggtggtaggccgggaacaggggaataagtatggttctccccgcacgtgcccatgtgcgcacacaccgaaggccatttaaagggaagcggttaggtatgaggttgtgtttgctgaattagtggttggtttttgctgtctatctagatagcagctgctgccagctcctcgtctaagaggctttctttgctgccaccttcactggtttgtggaaagcttctggccccatagactgttgagaattccaggagaaaattcctaattagcggatcccgtttgaatgcattcttacaggactgcatatgtacaaaagaagaattggcttcattggccccacatagatgtcacgtgagagtgaaaaaacctggggtataaatatcaaaggaacccctatctgctggtttgctgaggagcccacttccagcagaaccttctctgtccttctgagtctgtagagggcgcttatgtcactggaatcctagtctggcatggggcaggcagaggagcaggagcccccagtgggttcagatcttctgaaaacttgaggttagcggatctgccctttgagggtctcaggctggatttgggcctggagtccgtgtttctccaagggtgttgcttgggtgagcgctggagtgcacttgcatgtgtatgtactctcacgccctcgtggactgggtgtcctcgttgtatatagagcttgaacttggtgttccccaggtccagtaccactgccgttgctgcctgccttctgtttcactgctgttttctgagtgcctcgtgtgcagcctgtccttcagccctccctgaagctctgctgaccagctgtgttcccagctccttttcacgtgctctttagccagccttaccctgcattgtacttacttgggtcaggtgcccctgctagactcttaagcccctagggggcagggatctgggggcgtcatccacctctgcagccctagcttctggtatagcatgtgataggacatagcatgtgatggggcttctcggataagaaagggatgagtccatctgttcaccagtaactattagggatggggatttgtgtttaaaggtggggcaaaggagagagtgattcaaagtaatggattacttcagtgaacctataggttccttagtaggagagagagattattctgggcaagaggtcccgcccttggtctgccagcatttccccagaactaccggcttgtgttttggtgttagtttcttcctcctacagtgctgactttctcaagtaactttcagctattgttggacattcttgatcaggggatagttagtaaactgcagtcagtgggccacatctggcccactgcctgttgctaatagagttttattggaacacagttatacccattttttaatgtatttgtgtgtggctgttttgtgctagcgtgacagagttgagtaggtgtggtagagacttttggccacaaagcctaaaatatttactacctggcccttttaaagataagttactaaccctctagtaactgtcagcccatcgttttgtggtgattgtctgatgtggtcaagaggcggtgcatgcataaaaagttttaaaggcctgggtcgggaactttgggtaaatcatcaaggtactttgagatcttttcctcatctgtgagatgggcattaaaaacaacacctgtctcgcgggaggtcttgcgcactgctagtggacgtacattgcggatgtcagagcaggccctagtttggccggggacattattgccgccgttctgtttctcaggaggaggaagccaagaatctggtgagcgaagccatcgcagctggcatcttcaacgacctgggctccggaagcaacattgacctctgcgtcatcagcaagaacaagctggattttctccgcccatacacagtgcccaacaagaaggggaccaggcttggccggtacaggtgtgagaaagggactactgcagtcctcactgagaaaatcactcctctggagattgaggtgctggaagaaacagtccaaacaatggacacttcctgaatggcatcagtgggtggctggccgcggttctggaaggtggtgagcattgaggcccagtaagacactcatgtggctagtgtttgccgaatgaaactcaactcaataaaaaacaaaaaccaaattgggcagctga

SEQ ID NO: 342450 - DNA, 4764 bp, Homo sapiens
tggcctcgtccgcttggatgcgcggggatctgcagcttctggttcctcaggggccggacaaggtggtccccaggcattgcaaaggttgccagtggtcctcccctgggcccgagagccccgtgcggacacctggtggaagtgcccaggcactgccggtgggcttcttgctgctgcacgggccgcccctttgtgttttttttcccaatttaaaaaagcctttattcatacttaaataacagcatacatgataatttgatgagtaaatcaaactatataattttaaaatttgcatattttaaagttttatcagttacttacagactgtttgcaaaatagagggaggatcactcataatcttacatagcactgtcagcagtctgctgtcctgtgcccagtcgaatggattgacactagatatgcatgtctcatgtcattcgtatatttccgtttccccaagtcttcacctgtccccatctacccagatcatttgggaaatgtaaatgtgcagtcctaagcgctgcccgcagggtcgcgatgtctgccaggtactgctggctggctctagacaccagcagcagtgataagaaacaaagcagaggagacagttaaatggtagagaagagaagggggagcagaggtggtaggccgggaacaggggaataagtatggttctccccgcacgtgcccatgtgcgcacacaccgaaggccatttaaagggaagcggttaggtatgaggttgtgtttgctgaattagtggttggtttttgctgtctatctagatagcagctgctgccagctcctcgtctaagaggctttctttgctgccaccttcactggtttgtggaaagcttctggccccatagactgttgagaattccaggagaaaattcctaattagcggatcccgtttgaatgcattcttacaggactgcatatgtacaaaagaagaattggcttcattggccccacatagatgtcacgtgagagtgaaaaaacctggggtataaatatcaaaggaacccctatctgctggtttgctgaggagcccacttccagcagaaccttctctgtccttctgagtctgtagagggcgcttatgtcactggaatcctagtctggcatggggcaggcagaggagcaggagcccccagtgggttcagatcttctgaaaacttgaggttagcggatctgccctttgagggtctcaggctggatttgggcctggagtccgtgtttctccaagggtgttgcttgggtgagcgctggagtgcacttgcatgtgtatgtactctcacgccctcgtggactgggaaggcgccgtagcacaggttagattccctgctttcagggagcctggttcatttttgtcctcgttgtatatagagcttgaacttggtgttccccaggtccagtaccactgccgttgctgcctgccttctgtttcactgctgttttctgagtgcctcgtgtgcagcctgtccttcagccctccctgaagctctgctgaccagctgtgttcccagctccttttcacgtgctctttagccagccttaccctgcattgtacttacttgggtcaggtgcccctgctagactcttaagcccctagggggcagggatctgggggcgtcatccacctctgcagccctagcttctggtatagcatgtgataggacatagcatgtgatggggcttctcggataagaaagggatgagtccatctgttcaccagtaactattagggatggggatttgtgtttaaaggtggggcaaaggagagagtgattcaaagtaatggattacttcagtgaacctataggttccttagtaggagagagagattattctgggcaagaggtcccgcccttggtctgccagcatttccccagaactaccggcttgtgttttggtgttagtttcttcctcctacagtgctgactttctcaagtaactttcagctattgttggacattcttgatcaggggatagttagtaaactgcagtcagtgggccacatctggcccactgcctgttgctaatagagttttattggaacacagttatacccattttttaatgtatttgtgtgtggctgttttgtgctagcgtgacagagttgagtaggtgtggtagagacttttggccacaaagcctaaaatatttactacctggcccttttaaagataagttactaaccctctagtaactgtcagcccatcgttttgtggtgattgtctgatgtggtcaagaggcggtgcatgcataaaaagttttaaaggcctgggtcgggaactttgggtaaatcatcaaggtactttgagatcttttcctcatctgtgagatgggcattaaaaacaacacctgtctcgcgggaggtcttgcgcactgctagtggacgtacattgcggatgtcagagcaggccctagtttggccggggacattattgccgccgttctgtttctcaggaggaggaagccaagaatctggtgagcgaagccatcgcagctggcatcttcaacgacctgggctccggaagcaacattgacctctgcgtcatcagcaagaacaagctggattttctccgcccatacacagtgcccaacaagaaggggaccagggtgagtgaaggagacgaagttcttcctgggtcccctggcgtcgtggccacccttggtatctccatggcatctggatggagttttcctggttctttccacattaagtacatccagtgttcccaaatcaacctcccacacagaccttcggcttgttacttgctttatgacagtgggctgctgtcaggtgtaggaaagtgatttaatttgatgggagaggtggagggtggcccaggaaagagccctaggctgggaggtggggccggagaggtttggatcatctgctgtcctttctcaagtgtcttaaagaatcccctgatttctgggagaaggtgcatttttcagggcagccccagcactttccctcagagtgccccgagattcctaactgggtgtaagtcagcaatgctaacagcctcccagaggtggccttgggagctagtgtgtgtgtgctgtgctacagggagttgtgccattgagcctgagcctacatgccgagtgggcccctcggctcagtggtgcagcgcagactcagagcagtgggagaaggttctagttgatttgctgagcagaactgggaggtttccaaacctggtggctagcatgtgtcagaggagcagctcgtttgcagtgtctcgtgattgtccggctgcttgaccgtcctgtggctcctgacctcttctgggagcccgggcaggtcaggatgggctccctgagtgctgcttccagctgcagcatctgggtgcagcacagggcatttataaactacggctcccactcagctccacggtagccccgaggaagtgagcaccaccttctgcaggcttgcttccatctcccactgcacacacaactccacatcaggagtaattcacaaggaaggaatggaacgttcagaaccagcaggtattcactgtgggctgcactcaaccttgcggaagctcagtgggctcctgatggggtggggcagcacggggccagagaacgctggcactggggttggggagtgttggtggctggcttggtggcttccagcaaatcagtctgtcttggaaatggagctaaaccagatgacctctaatgagcccacgaagtccctcgggcctttagcaggaaggcaagccacctttcaggcccagagctgtgttggggaaccgggctttgccgagctccaggtaggcaggagccaagtactccatgtagcctgcttcgctggttattttgcaagatgcgtgatttgagcaagtccatggtgaagcggtgatggggtagggaatggttacaccattcaggctggccagggtcctgggcgaggactctgaaagccacgtctgggccagtgagaagtggttgcctagggaacctgtgctgagcgcaggagtcctcatccacagggagtgcagcagtggcacatcctacttcctgggacatgggctgctccacttgtaaacagaggctctaaacacccaagaacaaaagaaaaccgccttgcggctgcttgggaagaatcagcaaggcgacccagaagctgctgggcgtgtggtgggtgtgcagtaacctgcagggagcctgctccccatcggtgtcctggggccaagggcagcaagtgtccaagctccctggactctgttgtcttctttgccagtgactgaagatgggggcactgcctgagttaggggagcccttcccagggtggatgctagggtgcgggcagggcgataggcctgaggaagcatcccgtgccatgcgccagtgggccttgcctggcaagtccctgctgcctgtctgcccgcagccctccagcacacggtcttgcagtccactggcacgtaaggcggaagctctgaatgcatgccgcaaaaatcgggcactgtcaccacagtggtgaggaggctcttgtgtgtccaagcctcccggagacactgaggggtggttcagaggagtcaggcacacagaggccacgtgggactttggctctaagactgcacgctgccaccaaggttccagcgtgtgagggatgaggggcatcctcaaactgatggggtggggacacattgttcaaaggtacttttgcttggattctttaagagggtgggggtcgggggaggcttggcagcataaaggcaggccgctctgggctgaccgtg

SEQ ID NO: 342451 - DNA, 3219 bp, Homo sapiens
tggcctcgtccgcttggatgcgcggggatctgcagcttctggttcctcaggggccggacaaggtggtccccaggcattgcaaaggttgccagtggtcctcccctgggcccgagagccccgtgcggacacctggtggaagtgcccaggcactgccggtgggcttcttgctgctgcacgggccgcccctttgtgttttttttcccaatttaaaaaagcctttattcatacttaaataacagcatacatgataatttgatgagtaaatcaaactatataattttaaaatttgcatattttaaagttttatcagttacttacagactgtttgcaaaatagagggaggatcactcataatcttacatagcactgtcagcagtctgctgtcctgtgcccagtcgaatggattgacactagatatgcatgtctcatgtcattcgtatatttccgtttccccaagtcttcacctgtccccatctacccagatcatttgggaaatgtaaatgtgcagtcctaagcgctgcccgcagggtcgcgatgtctgccaggtactgctggctggctctagacaccagcagcagtgataagaaacaaagcagaggagacagttaaatggtagagaagagaagggggagcagaggtggtaggccgggaacaggggaataagtatggttctccccgcacgtgcccatgtgcgcacacaccgaaggccatttaaagggaagcggttaggtatgaggttgtgtttgctgaattagtggttggtttttgctgtctatctagatagcagctgctgccagctcctcgtctaagaggctttctttgctgccaccttcactggtttgtggaaagcttctggccccatagactgttgagaattccaggagaaaattcctaattagcggatcccgtttgaatgcattcttacaggactgcatatgtacaaaagaagaattggcttcattggccccacatagatgtcacgtgagagtgaaaaaacctggggtataaatatcaaaggaacccctatctgctggtttgctgaggagcccacttccagcagaaccttctctgtccttctgagtctgtagagggcgcttatgtcactggaatcctagtctggcatggggcaggcagaggagcaggagcccccagtgggttcagatcttctgaaaacttgaggttagcggatctgccctttgagggtctcaggctggatttgggcctggagtccgtgtttctccaagggtgttgcttgggtgagcgctggagtgcacttgcatgtgtatgtactctcacgccctcgtggactgggaaggcgccgtagcacaggttagattccctgctttcagggagcctggttcatttttgtcctcgttgtatatagagcttgaacttggtgttccccaggtccagtaccactgccgttgctgcctgccttctgtttcactgctgttttctgagtgcctcgtgtgcagcctgtccttcagccctccctgaagctctgctgaccagcttgtgtgtgtgctgtgctacagggagttgtgccattgagcctgagcctacatgccgagtgggcccctcggctcagtggtgcagcgcagactcagagcagtgggagaaggttctagttgatttgctgagcagaactgggaggtttccaaacctggtggctagcatgtgtcagaggagcagctcgtttgcagtgtctcgtgattgtccggctgcttgaccgtcctgtggctcctgacctcttctgggagcccgggcaggtcaggatgggctccctgagtgctgcttccagctgcagcatctgggtgcagcacagggcatttataaactacggctcccactcagctccacggtagccccgaggaagtgagcaccaccttctgcaggcttgcttccatctcccactgcacacacaactccacatcaggagtaattcacaaggaaggaatggaacgttcagaaccagcaggtattcactgtgggctgcactcaaccttgcggaagctcagtgggctcctgatggggtggggcagcacggggccagagaacgctggcactggggttggggagtgttggtggctggcttggtggcttccagcaaatcagtctgtcttggaaatggagctaaaccagatgacctctaatgagcccacgaagtccctcgggcctttagcaggaaggcaagccacctttcaggcccagagctgtgttggggaaccgggctttgccgagctccaggtaggcaggagccaagtactccatgtagcctgcttcgctggttattttgcaagatgcgtgatttgagcaagtccatggtgaagcggtgatggggtagggaatggttacaccattcaggctggccagggtcctgggcgaggactctgaaagccacgtctgggccagtgagaagtggttgcctagggaacctgtgctgagcgcaggagtcctcatccacagggagtgcagcagtggcacatcctacttcctgggacatgggctgctccacttgtaaacagaggctctaaacacccaagaacaaaagaaaaccgccttgcggctgcttgggaagaatcagcaaggcgacccagaagctgctgggcgtgtggtgggtgtgcagtaacctgcagggagcctgctccccatcggtgtcctggggccaagggcagcaagtgtccaagctccctggactctgttgtcttctttgccagtgactgaagatgggggcactgcctgagttaggggagcccttcccagggtggatgctagggtgcgggcagggcgataggcctgaggaagcatcccgtgccatgcgccagtgggccttgcctggcaagtccctgctgcctgtctgcccgcagccctccagcacacggtcttgcagtccactggcacgtaaggcggaagctctgaatgcatgccgcaaaaatcgggcactgtcaccacagtggtgaggaggctcttgtgtgtccaagcctcccggagacactgaggggtggttcagaggagtcaggcacacagaggccacgtgggactttggctctaagactgcacgctgccaccaaggttccagcgtgtgagggatgaggggcatcctcaaactgatggggtggggacacattgttcaaaggtacttttgcttggattctttaagagggtgggggtcgggggaggcttggcagcataaaggcaggccgctctgggctgaccgtg

SEQ ID NO: 342452 - DNA, 793 bp, Homo sapiens
cggacccggaactggctttcttgggaagatggcggctgtgtcggtgtatgctccaccagttggaggcttctcttttgataactgccgcaggaatgccgtcttggaagccgattttgcaaagaggggatacaagcttccaaaggtccggaaaactggcacgaccatcgctggggtggtctataaggatggcatagttcttggagcagatacaagagcaactgaagggatggttgttgctgacaagaactgttcaaaaatacacttcatatctcctaatatttattgttgtggtgctgggacagctgcagacacagacatgacaacccagctcatttctgttctggctccttggcagcaatggctgtatttgaagataagtttaggccagacatggaggaggaggaagccaagaatctggtgagcgaagccatcgcagctggcatcttcaacgacctgggctccggaagcaacattgacctctgcgtcatcagcaagaacaagctggattttctccgcccatacacagtgcccaacaagaaggggaccaggcttggccggtacaggtgtgagaaagggactactgcagtcctcactgagaaaatcactcctctggagattgaggtgctggaagaaacagtccaaacaatggacacttcctgaatggcatcagtgggtggctggccgcggttctggaaggtggtgagcattgaggcccagtaagacactcatgtggctagtgtttgccgaatgaaactcaactcaataaaaaacaaaaaccaaattgggcagctga

SEQ ID NO: 342453 - DNA, 912 bp, Homo sapiens
tggcctcgtccgcttggatgcgcggggatctgcagcttctggttcctcaggggccggacaaggtggtccccaggcattgcaaaggttgccagtggtcctcccctgggcccgagagccccgtgcggacacctggtggaagtgcccaggcactgccggtgggcttcttgctgctgcacgggccgcccctttgtgttttttttcccaatttaaaaaagcctttattcatacttaaataacagcatacatgataatttgatgagtaaatcaaactatataattttaaaatttgcatattttaaagttttatcagttacttacagactgtttgcaaaatagagggaggatcactcataatcttacatagcactgtcagcagtctgctgtcctgtgcccagtcgaatggattgacactagatatgcatgtctcatgtcattcgtatatttccgtttccccaagtcttcacctgtccccatctacccagatcatttgggaaatgtaaatgtgcagtcctaagcgctgcccgcagggtcgcgatgtctgccaggtactgctggctggctctagacaccagcagcagtgataagaaacaaagcagaggagacagttaaatggtagagaagagaagggggagcagaggtggtaggccgggaacaggggaataagtatggttctccccgcacgtgcccatgtgcgcacacaccgaaggccatttaaaggggattaataaccagaatatataaggagatcaaataactcaataggaaaaaaatctaataatccaattttttaaatgggcaaaagatctaaatagacatttctcaaaagaaggcacatgaatggcaaacagatatataaaaaggtgctcaacatcaatgatcatcagagaaatgctaatcaaaactacaatgaga

SEQ ID NO: 342454 - DNA, 181 bp, Homo sapiens
tgtcggtgtatgctccaccagttggaggcttctcttttgataactgccgcaggtgccgccttgcttggggcttggttcagggagggagaagagtgcggtgctcgggtgggagctgggccaaggtgtgatacgagaattctgagggaagaattcatggcggggcctgtggcccgcggctagt

SEQ ID NO: 342455 - DNA, 331 bp, Homo sapiens
aggacaaatgcacagctcttccatggtcactgtcgcaggaatgttgaatatgcctggatccatcatggtaccacgttactcctccacggcactacatctggccgctaaaccagcattcggcacataagcttttttgatggttgttaattttttgatggggagtatcaacttcttttcaacaattaataggtagtttatgagtggtttaccctatttcttagtatgtaggtttttgccatttctgacttcgcagtattgtttagggaccagagggtgtctctgggaattgctttttgacagtgccttatgtccagtcatctttggaaaagat

SEQ ID NO: 342456 - DNA, 995 bp, Homo sapiens
cggacccggaactggctttcttgggaagatggcggctgtgtcggtgtatgctccaccagttggaggcttctcttttgataactgccgcaggaatgccgtcttggaagccgattttgcaaagaggggatacaagcttccaaaggtccggaaaactggcacgaccatcgctggggtggtctataaggatggcatagttcttggagcagatacaagagcaactgaagggatggttgttgctgacaagaactgttcaaaaatacacttcatatctcctaatatttattgttgtggtgctgggacagctgcagacacagacatgacaacccagctcatttcttccaacctggagctccactccctctccactggccgtcttcccagagttgtgacagccaatcggatgctgaagcagatgcttttcaggtatcaaggttacattggtgcagccctagttttagggggagtagatgttactggacctcacctctacagcatctatcctcatggatcaactgataagttgccttatgtcaccatgggttctggctccttggcagcaatggctgtatttgaagataagtttaggccagacatggaggaggaggaagccaagaatctggtgagcgaagccatcgcagctggcatcttcaacgacctgggctccggaagcaacattgacctctgcgtcatcagcaagaacaagctggattttctccgcccatacacagtgcccaacaagaaggggaccaggcttggccggtacaggtgtgagaaagggactactgcagtcctcactgagaaaatcactcctctggagattgaggtgctggaagaaacagtccaaacaatggacacttcctgaatggcatcagtgggtggctggccgcggttctggaaggtggtgagcattgaggcccagtaagacactcatgtggctagtgtttgccgaatgaaactcaactcaataaaaaacaaaaaccaaattgggcagctga

SEQ ID NO: 342457 - DNA, 484 bp, Homo sapiens
acactaaaagtgcacctttttcttgcaggttctggctccttggcagcaatggctgtatttgaagataagtttaggccagacatggaggaggaggaagccaagaatctggtgagcgaagccatcgcagctggcatcttcaacgacctgggctccggaagcaacattgacctctgcgtcatcagcaagaacaagctggattttctccgcccatacacagtgcccaacaagaaggggaccaggcttggccggtacaggtgtgagaaagggactactgcagtcctcactgagaaaatcactcctctggagattgaggtgctggaagaaacagtccaaacaatggacacttcctgaatggcatcagtgggtggctggccgcggttctggaaggtggtgagcattgaggcccagtaagacactcatgtggctagtgtttgccgaatgaaactcaactcaataaaaaacaaaaaccaaattgggcagctga

SEQ ID NO: 342458 - DNA, 1439 bp, Homo sapiens
cggacccggaactggctttcttgggaagatggcggctgtgtcggtgtatgctccaccagttggaggcttctcttttgataactgccgcaggaatgccgtcttggaagccgattttgcaaagaggggatacaagcttccaaaggtccggaaaactggcacgaccatcgctggggtggtctataaggatggcatagttcttggagcagatacaagagcaactgaagggatggttgttgctgacaagaactgttcaaaaatacacttcatatctcctaatatttattgttgtggtgctgggacagctgcagacacagacatgacaacccagctcatttcttccaacctggagctccactccctctccactggccgtcttcccagagttgtgacagccaatcggatgctgaagcagatgcttttcaggtatcaaggttacattggtgcagccctagttttagggggagtagatgttactggacctcacctctacagcatctatcctcatggatcaactgataagttgccttatgtcaccatgggttctggctccttggcagcaatggctgtatttgaagataagtttaggccagacatggaggaggaggaagccaagaatctggtgagcgaagccatcgcagctggcatcttcaacgacctgggctccggaagcaacattgacctctgcgtcatcagcaagaacaagctggattttctccgcccatacacagtgcccaacaagaaggggaccaggcttggccggtacaggtgtgagaaagggactactgcagtcctcactgagaaaatcactcctctggagattgaggtgctggaagaaacagtccaaacaatggacacttcctgaatggcatcagtgggtggctggccgcggttctggaaggtggtgagcattgaggcccagtaagacactcatgtggctagtgtttgccgaatgaaactcaactcaataaaaaacaaaaaccaaattgggcagctgaagaccaaaaaaacgagacaaaccaacacaagacaaacaaaaaacacaacaaacgaacaagaaaaacaagaaacacaaagaaagaggggggagcagacagacaaaaagaatcacccacaaggggccacaaaatgaccggcacaacctgcaagactgtagaggagaagaaggcggttgcacccactaagggaccgaacaattgatagaaagagccaaagacggccgcgaaatcaaccacgcgcatggaagcaacaaacactacgcaatgagaatcactagagtgacaagacaacacatacagggggggaaggacaaatcgtgagaacaaacaacaccaagggtgtaaactccaggacgaataacaaggctccaagggactagacagcaaccccgacacttccgccaacacatcctacggcaaagcacaaaataacagggaacgagc

SEQ ID NO: 342459 - DNA, 1039 bp, Homo sapiens
cggacccggaactggctttcttgggaagatggcggctgtgtcggtgtatgctccaccagttggaggcttctcttttgataactgccgcaggaatgccgtcttggaagccgattttgcaaagaggggatacaagcttccaaaggtccggaaaactggcacgaccatcgctggggtggtctataaggatggcatagttcttggagcagatacaagagcaactgaagggatggttgttgctgacaagaactgttcaaaaatacacttcatatctcctaatatttattgttgtggtgctgggacagctgcagacacagacatgacaacccagctcatttcttccaacctggagctccactccctctccactggccgtcttcccagagttgtgacagccaatcggatgctgaagcagatgcttttcaggtatcaaggttacattggtgcagccctagttttagggggagtagatgttactggacctcacctctacagcatctatcctcatggatcaactgataagttgccttatgtcaccatgggttctggctccttggcagcaatggctgtatttgaagataagtttaggccagacatggaggaggaggaagccaagaatctggtgagcgaagccatcgcagctggcatcttcaacgacctgggctccggaagcaacattgacctctgcgtcatcagcaagaacaagctggattttctccgcccatacacagtgcccaacaagaaggggaccaggcttggccggtacaggtgtgagaaagggactactgcagtcctcactgagaaaatcactcctctggagattgaggtgctggaagaaacagtccaaacaatggacacttcctgaatggcatcagtgggtggctggccgcggttctggaaggtggtgagcattgaggcccagtaagacactcatgtggctagtgtttgccgaatgaaactcaactcaataaaaaacaaaaaccaaattgggcagctgaaaaaaaaaagaaaaaaaaaaaaaaaaaaaacaacaaaaaaaaac

SEQ ID NO: 342460 - DNA, 1474 bp, Homo sapiens
  misc_feature (1471)..(1471): n is a, c, g, or t
cggacccggaactggctttcttgggaagatggcggctgtgtcggtgtatgctccaccagttggaggcttctcttttgataactgccgcaggaatgccgtcttggaagccgattttgcaaagaggggatacaagcttccaaaggtccggaaaactggcacgaccatcgctggggtggtctataaggatggcatagttcttggagcagatacaagagcaactgaagggatggttgttgctgacaagaactgttcaaaaatacacttcatatctcctaatatttattgttgtggtgctgggacagctgcagacacagacatgacaacccagctcatttcttccaacctggagctccactccctctccactggccgtcttcccagagttgtgacagccaatcggatgctgaagcagatgcttttcaggtatcaaggttacattggtgcagccctagttttagggggagtagatgttactggacctcacctctacagcatctatcctcatggatcaactgataagttgccttatgtcaccatgggttctggctccttggcagcaatggctgtatttgaagataagtttaggccagacatggaggaggaggaagccaagaatctggtgagcgaagccatcgcagctggcatcttcaacgacctgggctccggaagcaacattgacctctgcgtcatcagcaagaacaagctggattttctccgcccatacacagtgcccaacaagaaggggaccaggcttggccggtacaggtgtgagaaagggactactgcagtcctcactgagaaaatcactcctctggagattgaggtgctggaagaaacagtccaaacaatggacacttcctgaatggcatcagtgggtggctggccgcggttctggaaggtggtgagcattgaggcccagtaagacactcatgtggctagtgtttgccgaatgaaactcaactcaataaaaaacaaaaaccaaattgggcagctgaaaaaacaaacaaaaaaacaattttgtgggggcgcggcttgggcccttgggaaagagctttcttcaagaacccatctcgggtgtgggggcggcgcggggccccccaagataagtgtatagaggtgcacaacgtgggccccacacagggcgggtgtcccctagagggagagaccaccgcggggacacaagagacacaaaggggggcgcgggggaatttctcccacccaactctaaaacaaaacggcgcccggggggggcgcgacaaaccccggagagcgtgtgtttctatgagagacaaaattcctcaacagaagagtggggagaggtcatcacgaagaggaggacacatatcaagcgggggagcactatattatacaaacagcgagggagagtgctcccaaagggagaagacgcgcctctccgaaagatttatcaaaaaatataaaccacgcccccggggcagtgtggtgggggggncga

SEQ ID NO: 342461 - DNA, 973 bp, Homo sapiens
tagggggtgtgtcggtgttggtctgagcgagcttaaacggcggctgtgtcggactaccgtgcgtggaagaatgccgtcttggaagccgattttgcaaagaggggatacaagcttccaaaggtccggaaaactggcacgaccatcgctggggtggtctataaggatggcatagttcttggagcagatacaagagcaactgaagggatggttgttgctgacaagaactgttcaaaaatacacttcatatctcctaatatttattgttgtggtgctgggacagctgcagacacagacatgacaacccagctcatttcttccaacctggagctccactccctctccactggccgtcttcccagagttgtgacagccaatcggatgctgaagcagatgcttttcaggtatcaaggttacattggtgcagccctagttttagggggagtagatgttactggacctcacctctacagcatctatcctcatggatcaactgataagttgccttatgtcaccatgggttctggctccttggcagcaatggctgtatttgaagataagtttaggccagacatggaggaggaggaagccaagaatctggtgagcgaagccatcgcagctggcatcttcaacgacctgggctccggaagcaacattgacctctgcgtcatcagcaagaacaagctggattttctccgcccatacacagtgcccaacaagaaggggaccaggcttggccggtacaggtgtgagaaagggactactgcagtcctcactgagaaaatcactcctctggagattgaggtgctggaagaaacagtccaaacaatggacacttcctgaatggcatcagtgggtggctggccgcggttctggaaggtggtgagcattgaggcccagtaagacactcatgtggctagtgtttgccgaatgaaactcaactcaataaaaaacaaaaaccaaattgggcagctga

SEQ ID NO: 342462 - DNA, 2895 bp, Homo sapiens
cggacccggaactggctttcttgggaagatggcggctgtgtcggtgtatgctccaccagttggaggcttctcttttgataactgccgcaggaatgccgtcttggaagccgattttgcaaagaggggatacaagcttccaaaggtccggaaaactggcacgaccatcgctggggtggtctataaggatggcatagttcttggagcagatacaagagcaactgaagggatggttgttgctgacaagaactgttcaaaaatacacttcatatctcctaatatttattgttgtggtgctgggacagctgcagacacagacatgacaacccagctcatttcttccaacctggagctccactccctctccactggccgtcttcccagagttgtgacagccaatcggatgctgaagcagatgcttttcaggtatcaaggttacattggtgcagccctagttttagggggagtagatgttactggacctcacctctacagcatctatcctcatggatcaactgataagttgccttatgtcaccatgggttctggctccttggcagcaatggctgtatttgaagataagtttaggccagacatggaggaggaggaagccaagaatctggtgagcgaagccatcgcagctggcatcttcaacgacctgggctccggaagcaacattgacctctgcgtcatcagcaagaacaagctggattttctccgcccatacacagtgcccaacaagaaggggaccagggtgagtgaaggagacgaagttcttcctgggtcccctggcgtcgtggccacccttggtatctccatggcatctggatggagttttcctggttctttccacattaagtacatccagtgttcccaaatcaacctcccacacagaccttcggcttgttacttgctttatgacagtgggctgctgtcaggtgtaggaaagtgatttaatttgatgggagaggtggagggtggcccaggaaagagccctaggctgggaggtggggccggagaggtttggatcatctgctgtcctttctcaagtgtcttaaagaatcccctgatttctgggagaaggtgcatttttcagggcagccccagcactttccctcagagtgccccgagattcctaactgggtgtaagtcagcaatgctaacagcctcccagaggtggccttgggagctagtgtgtgtgtgctgtgctacagggagttgtgccattgagcctgagcctacatgccgagtgggcccctcggctcagtggtgcagcgcagactcagagcagtgggagaaggttctagttgatttgctgagcagaactgggaggtttccaaacctggtggctagcatgtgtcagaggagcagctcgtttgcagtgtctcgtgattgtccggctgcttgaccgtcctgtggctcctgacctcttctgggagcccgggcaggtcaggatgggctccctgagtgctgcttccagctgcagcatctgggtgcagcacagggcatttataaactacggctcccactcagctccacggtagccccgaggaagtgagcaccaccttctgcaggcttgcttccatctcccactgcacacacaactccacatcaggagtaattcacaaggaaggaatggaacgttcagaaccagcaggtattcactgtgggctgcactcaaccttgcggaagctcagtgggctcctgatggggtggggcagcacggggccagagaacgctggcactggggttggggagtgttggtggctggcttggtggcttccagcaaatcagtctgtcttggaaatggagctaaaccagatgacctctaatgagcccacgaagtccctcgggcctttagcaggaaggcaagccacctttcaggcccagagctgtgttggggaaccgggctttgccgagctccaggtaggcaggagccaagtactccatgtagcctgcttcgctggttattttgcaagatgcgtgatttgagcaagtccatggtgaagcggtgatggggtagggaatggttacaccattcaggctggccagggtcctgggcgaggactctgaaagccacgtctgggccagtgagaagtggttgcctagggaacctgtgctgagcgcaggagtcctcatccacagggagtgcagcagtggcacatcctacttcctgggacatgggctgctccacttgtaaacagaggctctaaacacccaagaacaaaagaaaaccgccttgcggctgcttgggaagaatcagcaaggcgacccagaagctgctgggcgtgtggtgggtgtgcagtaacctgcagggagcctgctccccatcggtgtcctggggccaagggcagcaagtgtccaagctccctggactctgttgtcttctttgccagtgactgaagatgggggcactgcctgagttaggggagcccttcccagggtggatgctagggtgcgggcagggcgataggcctgaggaagcatcccgtgccatgcgccagtgggccttgcctggcaagtccctgctgcctgtctgcccgcagccctccagcacacggtcttgcagtccactggcacgtaaggcggaagctctgaatgcatgccgcaaaaatcgggcactgtcaccacagtggtgaggaggctcttgtgtgtccaagcctcccggagacactgaggggtggttcagaggagtcaggcacacagaggccacgtgggactttggctctaagactgcacgctgccaccaaggttccagcgtgtgagggatgaggggcatcctcaaactgatggggtggggacacattgttcaaaggtacttttgcttggattctttaagagggtgggggtcgggggaggcttggcagcataaaggcaggccgctctgggctgaccgtg

SEQ ID NO: 342463 - DNA, 895 bp, Homo sapiens
tgatggaaggacgagcgccgaggagtagtgagcgagaacgtgcgtattaactgcggtagtagctgtacatataccaaggtcatctaagtcgagcggtcgcggacagttatgacccgggaattacggtactaggttacgaggcccaagggttaatgcttgtatggttcgtgcgtgcaagggacaggcgttggacgaccccggacgctagcgaacgcagcgtcatttctgccaaaccgtagcctcgaatcaccatcattcatctggcccgtcttcacaagcgtgacggcgagttctacgtgctgtccgccagaatgtcatggcgagtatcaaggttacattggtgcagccctagttttagggggagtagatgttactggacctcacctctacagcatctatcctcatggatcaactgataagttgccttatgtcaccatgggttctggctccttggcagcaatggctgtatttgaagataagtttaggccagacatggaggaggaggaagccaagaatctggtgagcgaagccatcgcagctggcatcttcaacgacctgggctccggaagcaacattgacctctgcgtcatcagcaagaacaagctggattttctccgcccatacacagtgcccaacaagaaggggaccaggcttggccggtacaggtgtgagaaagggactactgcagtcctcactgagaaaatcactcctctggagattgaggtgctggaagaaacagtccaaacaatggacacttcctgaatggcatcagtgggtggctggccgcggttctggaaggtggtgagcattgaggcccagtaagacactcatgtggctagtgtttgccgaatgaaactcaactcaataaaaaacaaaaaccaaattgggcagctga

SEQ ID NO: 342464 - DNA, 2864 bp, Homo sapiens
tggcctcgtccgcttggatgcgcggggatctgcagcttctggttcctcaggggccggacaaggtggtccccaggcattgcaaaggttgccagtggtcctcccctgggcccgagagccccgtgcggacacctggtggaagtgcccaggcactgccggtgggcttcttgctgctgcacgggccgcccctttgtgttttttttcccaatttaaaaaagcctttattcatacttaaataacagcatacatgataatttgatgagtaaatcaaactatataattttaaaatttgcatattttaaagttttatcagttacttacagactgtttgcaaaatagagggaggatcactcataatcttacatagcactgtcagcagtctgctgtcctgtgcccagtcgaatggattgacactagatatgcatgtctcatgtcattcgtatatttccgtttccccaagtcttcacctgtccccatctacccagatcatttgggaaatgtaaatgtgcagtcctaagcgctgcccgcagggtcgcgatgtctgccaggtactgctggctggctctagacaccagcagcagtgataagaaacaaagcagaggagacagttaaatggtagagaagagaagggggagcagaggtggtaggccgggaacaggggaataagtatggttctccccgcacgtgcccatgtgcgcacacaccgaaggccatttaaagggaagcggttaggtatgaggttgtgtttgctgaattagtggttggtttttgctgtctatctagatagcagctgctgccagctcctcgtctaagaggctttctttgctgccaccttcactggtttgtggaaagcttctggccccatagactgttgagaattccaggagaaaattcctaattagcggatcccgtttgaatgcattcttacaggactgcatatgtacaaaagaagaattggcttcattggccccacatagatgtcacgtgagagtgaaaaaacctggggtataaatatcaaaggaacccctatctgctggtttgctgaggagcccacttccagcagaaccttctctgtccttctgagtctgtagagggcgcttatgtcactggaatcctagtctggcatggggcaggcagaggagcaggagcccccagtgggttcagatcttctgaaaacttgaggttagcggatctgccctttgagggtctcaggctggatttgggcctggagtccgtgtttctccaagggtgttgcttgggtgagcgctggagtgcacttgcatgtgtatgtactctcacgccctcgtggactgggaaggcgccgtagcacaggttagattccctgctttcagggagcctggttcatttttgtcctcgttgtatatagagcttgaacttggtgttccccaggtccagtaccactgccgttgctgcctgccttctgtttcactgctgttttctgagtgcctcgtgtgcagcctgtccttcagccctccctgaagctctgctgaccagctgtgttcccagctccttttcacgtgctctttagccagccttaccctgcattgtacttacttgggtcaggtgcccctgctagactcttaagcccctagggggcagggatctgggggcgtcatccacctctgcagccctagcttctggtatagcatgtgataggacatagcatgtgatggggcttctcggataagaaagggatgagtccatctgttcaccagtaactattagggatggggatttgtgtttaaaggtggggcaaaggagagagtgattcaaagtaatggattacttcagtgaacctataggttccttagtaggagagagagattattctgggcaagaggtcccgcccttggtctgccagcatttccccagaactaccggcttgtgttttggtgttagtttcttcctcctacagtgctgactttctcaagtaactttcagctattgttggacattcttgatcaggggatagttagtaaactgcagtcagtgggccacatctggcccactgcctgttgctaatagagttttattggaacacagttatacccattttttaatgtatttgtgtgtggctgttttgtgctagcgtgacagagttgagtaggtgtggtagagacttttggccacaaagcctaaaatatttactacctggcccttttaaagataagttactaaccctctagtaactgtcagcccatcgttttgtggtgattgtctgatgtggtcaagaggcggtgcatgcataaaaagttttaaaggcctgggtcgggaactttgggtaaatcatcaaggtactttgagatcttttcctcatctgtgagatgggcattaaaaacaacacctgtctcgcgggaggtcttgcgcactgctagtggacgtacattgcggatgtcagagcaggccctagtttggccggggacattattgccgccgttctgtttctcaggaggaggaagccaagaatctggtgagcgaagccatcgcagctggcatcttcaacgacctgggctccggaagcaacattgacctctgcgtcatcagcaagaacaagctggattttctccgcccatacacagtgcccaacaagaaggggaccaggcttggccggtacaggtgtgagaaagggactactgcagtcctcactgagaaaatcactcctctggagattgaggtgctggaagaaacagtccaaacaatggacacttcctgaatggcatcagtgggtggctggccgcggttctggaaggtggtgagcattgaggcccagtaagacactcatgtggctagtgtttgccgaatgaaactcaactcaataaaaaacaaaaaccaaattgggcagctga

SEQ ID NO: 342465 - DNA, 1011 bp, Homo sapiens
cggacccggaactggctttcttgggaagatggcggctgtgtcggtgtatgctccaccagttggaggcttctcttttgataactgccgcaggaatgccgtcttggaagccgattttgcaaagaggggatacaagcttccaaaggtccggaaaactggcacgaccatcgctggggtggtctataaggatggcatagttcttggagcagatacaagagcaactgaagggatggttgttgctgacaagaactgttcaaaaatacacttcatatctcctaatatttattgttgtggtgctgggacagctgcagacacagacatgacaacccagctcatttcttccaacctggagctccactccctctccactggccgtcttcccagagttgtgacagccaatcggatgctgaagcagatgcttttcaggtatcaaggttacattggtgcagccctagttttagggggagtagatgttactggacctcacctctacagcatctatcctcatggatcaactgataagttgccttatgtcaccatgggttctggctccttggcagcaatggctgtatttgaagataagtttaggccagacatggagaagtagctacccaactctctggtcaatgaagacatcacatttggtatattcttcctcctcgtccacgaaagacacattcacgtagtggttcacaccaagtgctaattgtgttttttgtgtccattcgccattggcagcacatgagtgtgtcaggcatgagcggagcaggtgttattaagggcatcctccagtcctctttccattcaatcgctgcctctggagatataggtgtgtggaagtgcacgtccaagcaatggcgtcttcttgaatggcatcagttggggcatgggcttggttttgcaatgtggtgatcattcaggaacagtgaacctgttatcagtctaatgttcaccgaatgtttctctattacaataaaaaactctttccatatttggctcctttttgaacacaaa

SEQ ID NO: 342466 - DNA, 881 bp, Homo sapiens
cggacccggaactggctttcttgggaagatggcggctgtgtcggtgtatgctccaccagttggaggcttctcttttgataactgccgcaggaatgccgtcttggaagccgattttgcaaagaggggatacaagcttccaaaggtccggaaaactggcacgaccatcgctggggtggtctataaggatggcatagttcttggagcagatacaagagcaactgaagggatggttgttgctgacaagaactgttcaaaaatacacttcatatctcctaatatttattgttgtggtgctgggacagctgcagacacagacatgacaacccagctcatttcttccaacctggagctccactccctctccactggccgtcttcccagagttgtgacagccaatcggatgctgaagcagatgcttttcaggtatcaaggttacattggtgcagccctagttttagggggagtagatgttactggacctcacctctacagcatctatcctcatggatcaactgatatcgcagctggcatcttcaacgacctgggctccggaagcaacattgacctctgcgtcatcagcaagaacaagctggattttctccgcccatacacagtgcccaacaagaaggggaccaggcttggccggtacaggtgtgagaaagggactactgcagtcctcactgagaaaatcactcctctggagattgaggtgctggaagaaacagtccaaacaatggacacttcctgaatggcatcagtgggtggctggccgcggttctggaaggtggtgagcattgaggcccagtaagacactcatgtggctagtgtttgccgaatgaaactcaactcaataaaaaacaaaaaccaaattgggcagctga

SEQ ID NO: 342467 - DNA, 1096 bp, Homo sapiens
tggcctcgtccgcttggatgcgcggggatctgcagcttctggttcctcaggggccggacaaggtggtccccaggcattgcaaaggttgccagtggtcctcccctgggcccgagagccccgtgcggacacctggtggaagtgcccaggcactgccggtgggcttcttgctgctgcacgggccgcccctttgtgttttttttcccaatttaaaaaagcctttattcatacttaaataacagcatacatgataatttgatgagtaaatcaaactatataattttaaaatttgcatattttaaagttttatcagttacttacagactgtttgcaaaatagagggaggatcactcataatcttacatagcactgtcagcagtctgctgtcctgtgcccagtcgaatggattgacactagatatgcatgtctcatgtcattcgtatatttccgtttccccaagtcttcacctgtccccatctacccagatcatttgggaaatgtaaatgtgcagtcctaagcgctgcccgcagggtcgcgatgtctgccaggtactgctggctggctctagacaccagcagcagtgataagaaacaaagcagaggagacagttaaatggtagagaagagaagggggagcagaggtggtaggccgggaacaggggaataagtatggttctccccgcacgtgcccatgtgcgcacacaccgaaggccatttaaagggaagcggttaggtatgaggttgtgtttgctgaattagtggttggtttttgctgtctatctagatagcagctgctgccagctcctcgtctaagaggctttctttgctgccaccttcactggtttgtggaaagcttctggccccatagactgttgagaattccaggagaaaattcctaattagcggatcccgtttgaatgcattcttacaggactgcatatgtacaaaagaagaattggcttcattggccccacatagatgtcacgtgagagtgaaaaaacctggggtataaatatcaaaaattccaatcctaatttctttcttcttactagcagtacgtaaactggtagagatgactctcatacataattcttcgctga

SEQ ID NO: 342468 - DNA, 345 bp, Homo sapiens
ctgcgttcaaattagccctgattctgtgacagaaataaaagtacgtctactttactgagaaggcaaaggcggagagaccacttaggagattgttgctgtgtgtccagataagaaggggtggtggcttgcgcagtgtattggcagagagggggcgcaatggacccattcactaggtatgtacaagatggactcaacagaactgaatgactgaggggatgagaggccaggggagaacagaagttaatgatacttcccacctgcactgtgcgtggacagactggctgttgcagtctgtcatcttgtcattcctgtggctgatgaggtggaggaaggacttctcccaca

SEQ ID NO: 342469 - DNA, 298 bp, Homo sapiens
cagtccagatgcatgccccaaccacctcctctatggggctttcacactccactttatggggccaccatccacttgcccttatcaccctagggccaggtaccagacgactagagtcagcccttatgcctcagagccaatgaaattattcaaactagccaattctaaatcttacccaggctcacctgttttgtcccatggaaaccacaataaaagctcttgtccacattttcccctgctcctctgcctcctcactggccctgatgcttccccatgtagccccctatgggttgatgtaccc

SEQ ID NO: 342470 - DNA, 2490 bp, Homo sapiens
  misc_feature (443)..(443): n is a, c, g, or t
  misc_feature (721)..(721): n is a, c, g, or t
ctttttttttgagacagggtctcactgtgttgcccaggctggagtgcaatggcgttaatatcgctcattacctcaaacttctgggctcaagcaatccttcctcctcagctcctcaagtaactgggactataggtgtacaccaccaagcttggctaatttttcatttttcatagagatagggtctcccaatgttacccaagctggtctgaaactcttaagctcaagcgatcttcttgccttggcctccgaaagtgctgggattataggcgtgagccactgtgccccgccaatttatatatcttcttacatgatacatcttattatcaattgacagctgttcttttacttgaattttactctttgggaggctaggtcacaaggcttggtgtggtagtgtctaagttctctctgctgtttggtgcttaactacacagggttcaacnagagaatcataggtagtcctagttcttctggatttgatagattgttgcttgtagcacagtttatttcttatttccgaacatctttccctgactgacagtatgtctgtttgggctcttgagctcataacagggacagctgggcagggctttgatgcagggttgtgtgagatgtggccagcactgtaaaggggcactttgttttaagtgtctccttttccatcccctttcagtgttgttacttgaaggactcttacctgtgcaacgtctttgaaagatcntatgggacctttggcacttgatttagtctggtctcagggccagaatcatcttgcatttaccagctgctttagtgttgctggtactgtgagagtggttagggctttgattgaatttccagaaggtaagaatattcttgtacagcttttacataagtaatgtcatcatgtacaagatgtgttcttctaaagaagcagaggttttctcttgcccctcagtcatgtctgtctgtctgcttcttgtgtttcagaacttaaagcagcagtattacacaggatacacagagaatgaagtattggaagtcatgcagcacatggccaagaatgtggtgaaagtaaatgaaaacttaactaaattcatcgtaagtactactgttttcttaagctgtggaaagctttaggttctgggttttgtgtgtatgttgggcgggggggggcggtgtgtgccgtcatgtaaatatattaataacgtgggagttttagcacaaatcctttatcctttatatttttctggtacagtatggtatggagcatactgataaaccctgaaagcaagctttatttgaaacaaggtcgataggctagccatgtccaggcccagatcccagtcaaccagtcggttactcaatgtattgaattactctgtgcttatactagcatcctggggagggcactttgcaagcagggaaggctggtctgcatgtgattgggaagagagagggcccacttcaaatggcggtgtattatattgcgtattcaggtgatgttactcagagcctttgtccagggtcttttgaggcaatgatggaaaaacgcctaattagcaagcatggttaagagggaagaggcccattcagggggcatcctgagggcatggtgtctatctctgcatggcccacctatgaggaggagccaaaggagacttagtgctgtcctgtgcttgtgtgacaccaaacatcagagctcaccaagtgtgtggtggcaaagagcaaggtatttgaacctcagaagagtctcaagtgtcctcacaacatgatttgcttcatggaagtgtaatatgtgttcagtcctgagaggactgtctgggatttgttaagcactagttgccaccctcttttattgtcttttattgtcttttagcttaaaaaaaaaaagtcactggtgacagtgtttcttatgtgagaatggtgttatggataggtacgaaaacgtactttttagaatatgcttctgaaacatttagcagggaagtgctgtgatatctgcaaatcgctttcaaatggcatagcaaaaattgtgtgtgagtatacacagagagggagaggagggaaacgtggcacatgttcatgattgatcagtctacatgaaggatatatagaggatcattctttcagtttttctgtagatttggaattttttgaaataaataaaacatttgaggcaaaaatgtcactggtacctggtaccaatggctcatttttagtcaccttactcttaaatgtgcttcgctctcccagttttctgagaatttatttcaaaaggctagaaattgtgcattatttcagtttttactcgtttcctctttcttcccttcaaagtattttaggattaaattgtgtagactgggcacagtggctcacacctgtagtttcagcagttttggaggctgaggcgggaagactgcttgagcccagagctttgagaccagctgggcaacacagggagaccccatctgtacaaataattagccgaatgtggtggcacatgcttgt

SEQ ID NO: 342471 - DNA, 777 bp, Homo sapiens
  misc_feature (29)..(29): n is a, c, g, or t
ccttggggtaccccgcccccccgagttangggatatcgtcgaccacggcgtctcggagagcagtcctaacggcgcctcgtacgctagtgtcctcccttttcagtccgcgtccctccctgggccgggctggcactcttgccttccccgtccctcatggcgctgctccgacgcccgacggtgtccagtgatttggagaatattgacacaggagttaattctaaagttaagagtcatgtgactattaggcgaactgttttagaagaaattggaaatagagttacaaccagagcagcacaagtagctaagaaagctcagaacaccaaagttccagttcaacccaccaaaacaacaaatgtcaacaaacaactgaaacctactgcttctgtcaaaccagtacagatggaaaagttggctccaaagggtccttctcccacacctgaggatgtctccatgaaggaagagaatctctgccaagctttttctgatgccttgctctgcaaaatcgaggacattgataacgaagattgggagaaccctcagctctgcagtgactacgttaaggatatctatcagtatctcaggcagctggaggttttgcagtccataaacccacatttcttagatggaagagatataaatggacgcatgcgtgccatcctagtggattggctggtacaagtccactccaagtttaggcttctgcaggagactctgtacatgtgcgttggcattatggatcgatttttacaggtaggtgtggcttcagggacttcacgc

SEQ ID NO: 342472 - DNA, 1718 bp, Homo sapiens
ttttttcttacttgagaatttgggtttttgagtaaacgccattattctctctttttttaagcacacttttgcatctcaaccacctaacacactgcatccctgagcaacccggaggggccggttcctgcacccaggccaacacaacttaaaccccaacacaccagaagaggaataaaggccaaccaacttccgcccacccactacaaacgtcgagagaaattcgtagatgaggccttgtcaaaattcagaggcgtcctacgtctgctttcccaatgagacagttcctttttgtttgtctcagagactggggtttttttttttttaaaagactgtaggcagaaaaaacaccccaaccggctgttgtgacaatcaaacgtgtctaagaaaattcagccaatgagagtgcgagagtgcatcttgtgttggccaatgagaacagcgacccgtgcgcagggccgcccaatggggcgcaagcgacgcggtatttgaatcctggaacaaggctacagcgtcgaagatccccagcgctgcgggctcggagagcagtcctaacggcgcctcgtacgctagtgtcctcccttttcagtccgcgtccctccctgggccgggctggcactcttgccttccccgtccctcatggcgctgctccgacgcccgacggtgagtgtgcccggggaccgctctcagaggcgagtccgtcggccccacagctcccctgtcgcttctctcatctgctccgagcttctccgtcccaaccggggctgcttttctcttctccggagctcactgcttcgcccgcgtccctggccctgcggccggtcctctccggcccgcctttccccgtctggattccgccctcccctaacccctccctgccccggggtgggagaagtgtaggaaagcgcttccgagatggcgcctgtcaagtgagcccccagagcactaggcctagtactcagcgagcgatccccgagtgctcttcattgctagagagttatctacttccacgttcctgggatttccctccccctttcttacaactccttgccaactaagggacctgtgatggcggctgggaggaggactggaagggttctgtaggcagtaaagtgtacggcgtgtttcatcaggcaactgccaggctgtttttcagattgttcacatttctttttgtatgagtttcccatttatttcggcacgctaagtcttccatgctacgttcactaataaatgggtttgtccccttaaaaaattaatttctttactcaaatgtaacagaggtttttgaatataatttggaccaatgtggcagactgagagaaaagggtccaaattcatttatttcatccttgcagagatcaaagtgttatggtgttttgggtatttttcctgtgggcttgaattgtaccgggacctacttttttcctttgccgaaagctagagggccctgacacacctgagttccatcatcttggctataaggttagataaaagctgccaattttcctatccagatgaatttaaattgagtcacattaccaggcttctacccataagcattacattttcaaacactttttcagattggcagttgctgctggaagaaattgaagtgtgacttttgagaatcctaatagattgaatacatttagcatttaattaatatccttttgtggatctaagtccaactgacaagtaattttttataataatgtatt

SEQ ID NO: 342473 - DNA, 1551 bp, Homo sapiens
  misc_feature (29)..(29): n is a, c, g, or t
ccttggggtaccccgcccccccgagttangggatatcgtcgaccacggcgtcgctacagcgtcgaagatccccagcgctgcgggctcggagagcagtcctaacggcgcctcgtacgctagtgtcctcccttttcagtccgcgtccctccctgggccgggctggcactcttgccttccccgtccctcatggcgctgctccgacgcccgacggtgtccagtgatttggagaatattgacacaggagttaattctaaagttaagagtcatgtgactattaggcgaactgttttagaagaaattggaaatagagttacaaccagagcagcacaagtagctaagaaagctcagaacaccaaagttccagttcaacccaccaaaacaacaaatgtcaacaaacaactgaaacctactgcttctgtcaaaccagtacagatggaaaagttggctccaaagggtccttctcccacacctgaggatgtctccatgaaggaagagaatctctgccaagctttttctgatgccttgctctgcaaaatcgaggacattgataacgaagattgggagaaccctcagctctgcagtgactacgttaaggatatctatcagtatctcaggcagctggaggttttgcagtccataaacccacatttcttagatggaagagatataaatggacgcatgcgtgccatcctagtggattggctggtacaagtccactccaagtttaggcttctgcaggagactctgtacatgtgcgttggcattatggatcgatttttacaggttcagccagtttcccggaagaagcttcaattagttgggattactgctctgctcttggcttccaagtatgaggagatgttttctccaaatattgaagactttgtttacatcacagacaatgcttataccagttcccaaatccgagaaatggaaactctaattttgaaagaattgaaatttgagttgggtcgacccttgccactacacttcttaaggcgagcatcaaaagccggggaggttgatgttgaacagcacactttagccaagtatttgatggagctgactctcatcgactatgatatggtgcattatcatccttctaaggtagcagcagctgcttcctgcttgtctcagaaggttctaggacaaggaaaatggaacttaaagcagcagtattacacaggatacacagagaatgaagtattggaagtcatgcagcacatggccaagaatgtggtgaaagtaaatgaaaacttaactaaattcatcgccatcaagaataagtatgcaagcagcaaactcctgaagatcagcatgatccctcagctgaactcaaaagccgtcaaagaccttgcctccccactgataggaaggtcctaggctgccgtggcccctggggatgtgtgcttcattgtgccctttttcttattggtttagaactcttgattttgtacatagtcctctggtctatctcatgaaacctcttctcagaccagttttctaaacatatattgaggaaaaataaagcgattggtttttcttaaggta

SEQ ID NO: 342474 - DNA, 2179 bp, Homo sapiens
ttttttcttacttgagaatttgggtttttgagtaaacgccattattctctctttttttaagcacacttttgcatctcaaccacctaacacactgcatccctgagcaacccggaggggccggttcctgcacccaggccaacacaacttaaaccccaacacaccagaagaggaataaaggccaaccaacttccgcccacccactacaaacgtcgagagaaattcgtagatgaggccttgtcaaaattcagaggcgtcctacgtctgctttcccaatgagacagttcctttttgtttgtctcagagactggggtttttttttttttaaaagactgtaggcagaaaaaacaccccaaccggctgttgtgacaatcaaacgtgtctaagaaaattcagccaatgagagtgcgagagtgcatcttgtgttggccaatgagaacagcgacccgtgcgcagggccgcccaatggggcgcaagcgacgcggtatttgaatcctggaacaaggctacagcgtcgaagatccccagcgctgcgggctcggagagcagtcctaacggcgcctcgtacgctagtgtcctcccttttcagtccgcgtccctccctgggccgggctggcactcttgccttccccgtccctcatggcgctgctccgacgcccgacggtgtccagtgatttggagaatattgacacaggagttaattctaaagttaagagtcatgtgactattaggcgaactgttttagaagaaattggaaatagagttacaaccagagcagcacaagtagctaagaaagctcagaacaccaaagttccagttcaacccaccaaaacaacaaatgtcaacaaacaactgaaacctactgcttctgtcaaaccagtacagatggaaaagttggctccaaagggtccttctcccacacctgaggatgtctccatgaaggaagagaatctctgccaagctttttctgatgccttgctctgcaaaatcgaggacattgataacgaagattgggagaaccctcagctctgcagtgactacgttaaggatatctatcagtatctcaggcagctggaggttttgcagtccataaacccacatttcttagatggaagagatataaatggacgcatgcgtgccatcctagtggattggctggtacaagtccactccaagtttaggcttctgcaggagactctgtacatgtgcgttggcattatggatcgatttttacaggttcagccagtttcccggaagaagcttcaattagttgggattactgctctgctcttggcttccaagtatgaggagatgttttctccaaatattgaagactttgtttacatcacagacaatgcttataccagttcccaaatccgagaaatggaaactctaattttgaaagaattgaaatttgagttgggtcgacccttgccactacacttcttaaggcgagcatcaaaagccggggaggttgatgttgaacagcacactttagccaagtatttgatggagctgactctcatcgactatgatatggtgcattatcatccttctaaggtagcagcagctgcttcctgcttgtctcagaaggttctaggacaaggaaaatggaacttaaagcagcagtattacacaggatacacagagaatgaagtattggaagtcatgcagcacatggccaagaatgtggtgaaagtaaatgaaaacttaactaaattcatcgccatcaagaataagtatgcaagcagcaaactcctgaagatcagcatgatccctcagctgaactcaaaagccgtcaaagaccttgcctccccactgataggaaggtcctaggctgccgtggcccctggggatgtgtgcttcattgtgccctttttcttattggtttagaactcttgattttgtacatagtcctctggtctatctcatgaaacctcttctcagaccagttttctaaacatatattgaggaaaaataaagcgattggtttttcttaaggtaaaaaaaaaaaaaaaaaaaaaggggggcgcaagaaattcctgggggcgagatacgttaccattttgtcaagggcctaggggcaataagaggaggggttaaacgaaggaacggatggatttgaagacattgggggaatggacccagagtagcggaaaagttaggagattgcagatggaaa

SEQ ID NO: 342475 - DNA, 2649 bp, Homo sapiens
ttttttcttacttgagaatttgggtttttgagtaaacgccattattctctctttttttaagcacacttttgcatctcaaccacctaacacactgcatccctgagcaacccggaggggccggttcctgcacccaggccaacacaacttaaaccccaacacaccagaagaggaataaaggccaaccaacttccgcccacccactacaaacgtcgagagaaattcgtagatgaggccttgtcaaaattcagaggcgtcctacgtctgctttcccaatgagacagttcctttttgtttgtctcagagactggggtttttttttttttaaaagactgtaggcagaaaaaacaccccaaccggctgttgtgacaatcaaacgtgtctaagaaaattcagccaatgagagtgcgagagtgcatcttgtgttggccaatgagaacagcgacccgtgcgcagggccgcccaatggggcgcaagcgacgcggtatttgaatcctggaacaaggctacagcgtcgaagatccccagcgctgcgggctcggagagcagtcctaacggcgcctcgtacgctagtgtcctcccttttcagtccgcgtccctccctgggccgggctggcactcttgccttccccgtccctcatggcgctgctccgacgcccgacggtgtccagtgatttggagaatattgacacaggagttaattctaaagttaagagtcatgtgactattaggcgaactgttttagaagaaattggaaatagagttacaaccagagcagcacaagtagctaagaaagctcagaacaccaaagttccagttcaacccaccaaaacaacaaatgtcaacaaacaactgaaacctactgcttctgtcaaaccagtacagatggaaaagttggctccaaagggtccttctcccacacctgaggatgtctccatgaaggaagagaatctctgccaagctttttctgatgccttgctctgcaaaatcgaggacattgataacgaagattgggagaaccctcagctctgcagtgactacgttaaggatatctatcagtatctcaggcagctggaggttttgcagtccataaacccacatttcttagatggaagagatataaatggacgcatgcgtgccatcctagtggattggctggtacaagtccactccaagtttaggcttctgcaggagactctgtacatgtgcgttggcattatggatcgatttttacaggttcagccagtttcccggaagaagcttcaattagttgggattactgctctgctcttggcttccaagtatgaggagatgttttctccaaatattgaagactttgtttacatcacagacaatgcttataccagttcccaaatccgagaaatggaaactctaattttgaaagaattgaaatttgagttgggtcgacccttgccactacacttcttaaggcgagcatcaaaagccggggaggttgatgttgaacagcacactttagccaagtatttgatggagctgactctcatcgactatgatatggtgcattatcatccttctaaggtagcagcagctgcttcctgcttgtctcagaaggttctaggacaaggaaaatggaacttaaagcagcagtattacacaggatacacagagaatgaagtattggaagtcatgcagcacatggccaagaatgtggtgaaagtaaatgaaaacttaactaaattcatcgccatcaagaataagtatgcaagcagcaaactcctgaagatcagcatgatccctcagctgaactcaaaagccgtcaaagaccttgcctccccactgataggaaggtcctaggctgccgtggcccctggggatgtgtgcttcattgtgccctttttcttattggtttagaactcttgattttgtacatagtcctctggtctatctcatgaaacctcttctcagaccagttttctaaacatatattgaggaaaaataaagcgattggtttttcttaaggtatcccatgtgtatttatttgtgtattctgtacttaagaaatcagtgaaagcttgctttgactaatttctttttgagctgttatgaatagcatgtaaattactgccattatggcttgggcaagacctttttaccattttctcaaatggaaaaaactagaacttggcctcagtgaacactaaacctattcctaagcttcttgaatacaaataagtttattgtgaaaattttaaatgggaggataaccatgacactttcctttctagaagctagtcagctgctctctaattcctgcataggaacgcctggcccagagcaacccttgtaatgggtccctctctcaaatgcattgttgagaccagagagagccatcccatgggtcacagctggagaaaatgggcccgtggcatcctgttcaaggtgaagcttggcatgcattttttcaggtacattatggggtaaatggctttgcatttttttgtttggttggtttttaatgggcattgaactttttttttttttaattgaagttctggggtacatgtgcagaacatgcaggtttgttacataagtatacatgtgccatggtggtttgctgcacccatcaccctgtcatctacattaggtatttctcctaatgctatctctccc

SEQ ID NO: 342476 - DNA, 1237 bp, Homo sapiens
ttttttcttacttgagaatttgggtttttgagtaaacgccattattctctctttttttaagcacacttttgcatctcaaccacctaacacactgcatccctgagcaacccggaggggccggttcctgcacccaggccaacacaacttaaaccccaacacaccagaagaggaataaaggccaaccaacttccgcccacccactacaaacgtcgagagaaattcgtagatgaggccttgtcaaaattcagaggcgtcctacgtctgctttcccaatgagacagttcctttttgtttgtctcagagactggggtttttttttttttaaaagactgtaggcagaaaaaacaccccaaccggctgttgtgacaatcaaacgtgtctaagaaaattcagccaatgagagtgcgagagtgcatcttgtgttggccaatgagaacagcgacccgtgcgcagggccgcccaatggggcgcaagcgacgcggtatttgaatcctggaacaaggctacagcgtcgaagatccccagcgctgcgggctcggagagcagtcctaacggcgcctcgtacgctagtgtcctcccttttcagtccgcgtccctccctgggccgggctggcactcttgccttccccgtccctcatggcgctgctccgacgcccgacggtgtccagtgatttggagaatattgacacaggagttaattctaaagttaagagtcatgtgactattaggcgaactgttttagaagaaattggaaatagagttacaaccagagcagcacaagtagctaagaaagctcagaacaccaaagttccagttcaacccaccaaaacaacaaatgtcaacaaacaactgaaacctactgcttctgtcaaaccagtacagatggaaaagttggctccaaagggtccttctcccacacctgaggatgtctccatgaaggaagagaatctctgccaagctttttctgatgccttgctctgctacgttaaggatatctatcagtatctcaggcagctggaggttttgcagtccataaacccacatttcttagatggaagagatataaatggacgcatgcgtgccatcctagtggattggctggtacaagtccactccaagtttaggcttctgcaggagactctgtacatgtgcgttggcattatggatcgatttttacagggtcaccatttccgcagaactccatagtggggaagccggcctgggcaataaagagaat

SEQ ID NO: 342477 - DNA, 2001 bp, Homo sapiens
ttttttcttacttgagaatttgggtttttgagtaaacgccattattctctctttttttaagcacacttttgcatctcaaccacctaacacactgcatccctgagcaacccggaggggccggttcctgcacccaggccaacacaacttaaaccccaacacaccagaagaggaataaaggccaaccaacttccgcccacccactacaaacgtcgagagaaattcgtagatgaggccttgtcaaaattcagaggcgtcctacgtctgctttcccaatgagacagttcctttttgtttgtctcagagactggggtttttttttttttaaaagactgtaggcagaaaaaacaccccaaccggctgttgtgacaatcaaacgtgtctaagaaaattcagccaatgagagtgcgagagtgcatcttgtgttggccaatgagaacagcgacccgtgcgcagggccgcccaatggggcgcaagcgacgcggtatttgaatcctggaacaaggctacagcgtcgaagatccccagcgctgcgggctcggagagcagtcctaacggcgcctcgtacgctagtgtcctcccttttcagtccgcgtccctccctgggccgggctggcactcttgccttccccgtccctcatggcgctgctccgacgcccgacggtgtccagtgatttggagaatattgacacaggagttaattctaaagttaagagtcatgtgactattaggcgaactgttttagaagaaattggaaatagagttacaaccagagcagcacaagtagctaagaaagctcagaacaccaaagttccagttcaacccaccaaaacaacaaatgtcaacaaacaactgaaacctactgcttctgtcaaaccagtacagatggaaaagttggctccaaagggtccttctcccacacctgaggatgtctccatgaaggaagagaatctctgccaagctttttctgatgccttgctctgcaaaatcgaggacattgataacgaagattgggagaaccctcagctctgcagtgactacgttaaggatatctatcagtatctcaggcagctggaggttttgcagtccataaacccacatttcttagatggaagagatataaatggacgcatgcgtgccatcctagtggattggctggtacaagtccactccaagtttaggcttctgcaggagactctgtacatgtgcgttggcattatggatcgatttttacaggttcagccagtttcccggaagaagcttcaattagttgggattactgctctgctcttggcttccaagtatgaggagatgttttctccaaatattgaagactttgtttacatcacagacaatgcttataccagttcccaaatccgagaaatggaaactctaattttgaaagaattgaaatttgagttgggtcgacccttgccactacacttcttaaggcgagcatcaaaagccggggaggttgatgttgaacagcacactttagccaagtatttgatggagctgactctcatcgactatgatatggtgcattatcatccttctaaggtagcagcagctgcttcctgcttgtctcagaaggttctaggacaaggaaaatggaacttaaagcagcagtattacacaggatacacagagaatgaagtattggaagtcatgcagcacatggccaagaatgtggtgaaagtaaatgaaaacttaactaaattcatcgccatcaagaataagtatgcaagcagcaaactcctgaagatcagcatgatccctcagctgaactcaaaagccgtcaaagaccttgcctccccactgataggaaggtcctaggctgccgtggcccctggggatgtgtgcttcattgtgccctttttcttattggtttagaactcttgattttgtacatagtcctctggtctatctcatgaaacctcttctcagaccagttttctaaacatatattgaggaaaaataaagcgattggtttttcttaaggta

SEQ ID NO: 342478 - DNA, 3138 bp, Homo sapiens
ttttttcttacttgagaatttgggtttttgagtaaacgccattattctctctttttttaagcacacttttgcatctcaaccacctaacacactgcatccctgagcaacccggaggggccggttcctgcacccaggccaacacaacttaaaccccaacacaccagaagaggaataaaggccaaccaacttccgcccacccactacaaacgtcgagagaaattcgtagatgaggccttgtcaaaattcagaggcgtcctacgtctgctttcccaatgagacagttcctttttgtttgtctcagagactggggtttttttttttttaaaagactgtaggcagaaaaaacaccccaaccggctgttgtgacaatcaaacgtgtctaagaaaattcagccaatgagagtgcgagagtgcatcttgtgttggccaatgagaacagcgacccgtgcgcagggccgcccaatggggcgcaagcgacgcggtatttgaatcctggaacaaggctacagcgtcgaagatccccagcgctgcgggctcggagagcagtcctaacggcgcctcgtacgctagtgtcctcccttttcagtccgcgtccctccctgggccgggctggcactcttgccttccccgtccctcatggcgctgctccgacgcccgacggtgtccagtgatttggagaatattgacacaggagttaattctaaagttaagagtcatgtgactattaggcgaactgttttagaagaaattggaaatagagttacaaccagagcagcacaagtagctaagaaagctcagaacaccaaagttccagttcaacccaccaaaacaacaaatgtcaacaaacaactgaaacctactgcttctgtcaaaccagtacagatggaaaagttggctccaaagggtccttctcccacacctgaggatgtctccatgaaggaagagaatctctgccaagctttttctgatgccttgctctgcaaaatcgaggacattgataacgaagattgggagaaccctcagctctgcagtgactacgttaaggatatctatcagtatctcaggcagctggaggttttgcagtccataaacccacatttcttagatggaagagatataaatggacgcatgcgtgccatcctagtggattggctggtacaagtccactccaagtttaggcttctgcaggagactctgtacatgtgcgttggcattatggatcgatttttacaggttcagccagtttcccggaagaagcttcaattagttgggattactgctctgctcttggcttccaagtatgaggagatgttttctccaaatattgaagactttgtttacatcacagacaatgcttataccagttcccaaatccgagaaatggaaactctaattttgaaagaattgaaatttgagttgggtcgacccttgccactacacttcttaaggcgagcatcaaaagccggggaggttgatgttgaacagcacactttagccaagtatttgatggagctgactctcatcgactatgatatggtgcattatcatccttctaaggtagcagcagctgcttcctgcttgtctcagaaggttctaggacaaggaaaatggaacttaaagcagcagtattacacaggatacacagagaatgaagtattggaagtcatgcagcacatggccaagaatgtggtgaaagtaaatgaaaacttaactaaattcatcgtaagtactactgttttcttaagctgtggaaagctttaggttctgggttttgtgtgtatgttgggcgggggggggcggtgtgtgccgtcatgtaaatatattaataacgtgggagttttagcacaaatcctttatcctttatatttttctggtacagtatggtatggagcatactgataaaccctgaaagcaagctttatttgaaacaaggtcgataggctagccatgtccaggcccagatcccagtcaaccagtcggttactcaatgtattgaattactctgtgcttatactagcatcctggggagggcactttgcaagcagggaaggctggtctgcatgtgattgggaagagagagggcccacttcaaatggcggtgtattatattgcgtattcaggtgatgttactcagagcctttgtccagggtcttttgaggcaatgatggaaaaacgcctaattagcaagcatggttaagagggaagaggcccattcagggggcatcctgagggcatggtgtctatctctgcatggcccacctatgaggaggagccaaaggagacttagtgctgtcctgtgcttgtgtgacaccaaacatcagagctcaccaagtgtgtggtggcaaagagcaaggtatttgaacctcagaagagtctcaagtgtcctcacaacatgatttgcttcatggaagtgtaatatgtgttcagtcctgagaggactgtctgggatttgttaagcactagttgccaccctcttttattgtcttttattgtcttttaattgttcctattgctgccaggcctggtgaacctgttatgtcctgatggcacttaggtgtcgtaaacacagctccccctcccatccctctggtagcctacaagaggaagcctgctacttggaccttgaaatcatttgttcctatcacctgtgctaccagctgtgttttattcattaatggggatggaaggaaatggtcaggcacatgttatgagcccagagctttcactggcttcagcgattgggcatcatcaatgtgatcatgattgtagccgtggacctttgataattgtgagttagactaggaataaggtatcattgggggttcctgacatgtgcttaatcacaaatgacttctgcaggccatcaagaataagtatgcaagcagcaaactcctgaagatcagcatgatccctcagctgaactcaaaagccgtcaaagaccttgcctccccactgataggaaggtcctaggctgccgtggcccctggggatgtgtgcttcattgtgccctttttcttattggtttagaactcttgattttgtacatagtcctctggtctatctcatgaaacctcttctcagaccagttttctaaacatatattgaggaaaaataaagcgattggtttttcttaaggta

SEQ ID NO: 342479 - DNA, 1049 bp, Homo sapiens
gtcgaccacgcgtccgctaagaacagctaaaagagcacacccgtctatgtagctcgtctggtatcgggggtcttagcttggctctccttgcaaagttatttctagttaattcattatgcggagttttgcagtccataaacccacatttcttagatggaagagatataaatggacgcatgcgtgccatcctagtggattggctggtacaagtccactccaagtttaggcttctgcaggagactctgtacatgtgcgttggcattatggatcgatttttacaggttcagccagtttcccggaagaagcttcaattagttgggattactgctctgctcttggcttccaagtatgaggagatgttttctccaaatattgaagactttgtttacatcacagacaatgcttataccagttcccaaatccgagaaatggaaactctaattttgaaagaattgaaatttgagttgggtcgacccttgccactacacttcttaaggcgagcatcaaaagccggggaggttgatgttgaacagcacactttagccaagtatttgatggagctgactctcatcgactatgatatggtgcattatcatccttctaaggtagcagcagctgcttcctgcttgtctcagaaggttctaggacaaggaaaatggaacttaaagcagcagtattacacaggatacacagagaatgaagtattggaagtcatgcagcacatggccaagaatgtggtgaaagtaaatgaaaacttaactaaattcatcgccatcaagaataagtatgcaagcagcaaactcctgaagatcagcatgatccctcagctgaactcaaaagccgtcaaagaccttgcctccccactgataggaaggtcctaggctgccgtggcccctggggatgtgtgcttcattgtgccctttttcttattggtttagaactcttgattttgtacatagtcctctggtctatctcatgaaacctcttctcagaccagttttctaaacatatattgaggaaaaataaagcgattggtttttcttaaggta

SEQ ID NO: 342480 - DNA, 325 bp, Homo sapiens
attcaaacttctgggctcaagcaatcctcccacctcagcctcctgagtagctgggactataggcatgtgccaccaggcccagtgttgaggcattagtattattatcattactattattattagagatagggtctcctctgtcacccaggctggagtgcagtgttaaaatcatagcttgctgcagccttgaactcctggactcaagtgatccttccacttcagcctcccaagcagctgggaccacaggcacatgccaccatgcccaactaattttttagattttttttttttttgagacagagtctcgctctgtcacccagcctgg

SEQ ID NO: 342481 - DNA, 391 bp, Homo sapiens
tttatcaccatgctcttttctactcctaccccatgtatggtttagagaccaactgtgttgtaattgctataataaaggagattataggagcctgtcccagaaacaaagatacaatagttcctcctttacccacagtctggttttccatggtttcagttatctgtggccaactatagtctgaaagtacatgagtacagtacaataagttattttgagagagagagcccacgttcacataacgtttattaaagtatattgttataattctattttattataaattattgttatcgatcccttactgtgcctaatttataaattgaactttatcataggtatatatgcttgggaaaaaacatagtaaatatggggttctgaactgtctgtgatt

SEQ ID NO: 342482 - DNA, 354 bp, Homo sapiens
tctcccactattattgtgtttctcccactattattgtgtttctatctatggcatttcttaggtctattagtaattgttttataaatttgggagctccagtgttaggtgcatatatgtttaggattgtaatatttttctgttgaacaaggccttttatcataatataatggccctctttgtctcttttaactgttgttgctttcatgtctgttttgtctgatataagaatagcttctcctactcacttttggtttccttttgcacgaaatgcctatttccaccccttgactttaagtttatgtgagtccttatgtgttaggtgagtctcctgaagcaggagatggttggtgactt

SEQ ID NO: 342483 - DNA, 732 bp, Homo sapiens
caccaattcagcccaccgtcatgcacggcagtgcaacttggttgaccatcgtctgcgtctgcactgccctcagtgcagtaagccacgctttctgtgcacaccgtcttaacgtagctgtgagtccatgggatgccacatggtggggaaatgggaaacaaaacagccaagaactgagacgggcaggcctggccgtgttgtgggagccagagctgttgggactgcaagccccattgtgaaaggctgcagagaaggtgacatggatgaaagagtgatttaggtgtcagtttcccttaagagcaaagggaaggagagagggagatggttgctcatggtggaagcaggagatggtgcattaggagattctcattgtcaaaggcagaggggacaatccacacacagtgcagagaacagaggggctggggtcgcatgccagagcactgagcatgccttgggagcgtgattgacacatcctcctgtaagaagagaggaacgggagaaaacaggatgacgaggtagagaggatctgaagaggagagggaggtgcaggtatgcgcaggtgatagcctgatgtgccatctacatccattgagcatttactgaatgctaactatatgcccagcaagacacacaggtgagaaggcatggcacctgttcccaggagggcctgatccttcaaggggcacagacagaggcatgagtgagagccgttcagggcaggaagggctaggaagc

SEQ ID NO: 342484 - DNA, 494 bp, Homo sapiens
tcccacccaagtagtccagggtgatgtcatctcaggttctctaaagacgctttctccaagtacggtcacactcacaggctccaggagttgggatgtgggcatatccttcttagggccaccaattcagcccaccgtcatgcacggcagtgcaacttggttgaccatcgtctgcgtctgcactgccctcagtgcagtaagccacgctttctgtgcacaccgtcttaacgtagctgtgagtccatgggatgccacatggtggggaaatgggaaacaaaacagccaagaactgagacgggcaggcctggccgtgttgtgggagccagagctgttgggactgcaagccccattgtgaaaggctgcagagaaggtgacatggatgaaagagtgatttaggtgtcagtttcccttaagagcaaagggaaggagagagggagatggttgctcatggtggaagcaggagatggtgcattaggagattctcattgtcaaaggca

SEQ ID NO: 342485 - DNA, 188 bp, Homo sapiens
actttctgttaaatatcagccattataactactctctctcctagaattaaatcctttaggacttaatattctactatagtttggaaaaggaagacatgactattgagatccaaagaggaagtagggaaacaatggtgaaagaaagcagaactactacaaatgcaggggcaagactagagaaattgggt

SEQ ID NO: 342486 - DNA, 794 bp, Homo sapiens
cctgagaggttgggcaaggtcagcctaggctggcagcaccgcggggcgccccctgcagtatggacgtggtattccctttccggcctctgcagggccagggcgctccatttcttcccaggactgcctgccctggtcgtggccgtcatttctgcagggaggttgctgttttcctccaggcatcggagttaaaaagcatttgttcaaaaatcacttcttccactttaggaataacatattctcccattccctgccggtgactttttcatttaattttcgttttgccatatggtctttcagaggcactctgatcttaattatagtattcagcctttgtttatttaaaaatcagaaggcagataggctattgagggtttatctgtactaattgtaccaccatacctgccaactgtccccttaaccactacaatccctgccgacagtgtgtatacacaaacacacgcgcgtgcacacatgggccacataacgtaatgtgttgatcagaaaggagcgtatttccagctttagaattgccgcactggcattttccatcatgaacccctgccatgtagtgttgacttgaaggggatttagccatgggattgggaagagcagggagttagggtcagaagacctgagctcaaatcctgattctgccacttacggtgttatcttggggaaacaattttattcctggagtctcagttttaccatctataaaatagggatagtgctatcaatgtcccagtaagggtgtgggatttattttttaatttttatttgtttatttatttttt

SEQ ID NO: 342487 - DNA, 119 bp, Homo sapiens
tttccattacccactgcccctctgtgtgcctggagtttccaaggcttctctccttcctttttgctccatctcatcttctctcactgtttcttccttgttcccccgggtgctcgcttcct

SEQ ID NO: 342488 - DNA, 538 bp, Homo sapiens
gctggtctcaaactcctgatctcaggtgatctgccctcctccgcctcccaaagtgctgggattacaggcgtgagccaccatgcccggcccctctcagatatttctatccattgtcatactcccactctttccctaactactactgacttcagcttgcagcagaaaattcagcctttgtaagcttgagaggactcaggttgctgaccaaaagcagaagaggcctcccttcaaaatgtatggaatgttgcaaaaagtagacagtgatcctcaataatcagatacttccctcagaatggtctgctaaaccttcagtcttgttgaaccaattggttcagtactttgtaacagaacttgggaatttctccaccctggatgggatatttcttatggcctcccatcccaattcatgtcagcccttcccgcatttagacttggttactttcaactctttactcctggcatcatttttaaatgattcaggactcttggtttcaagtgacataaacccaccttgaattatcataggtggagagtgttg

SEQ ID NO: 342489 - DNA, 952 bp, Homo sapiens
atgtctgcgacacctcctcccctggctgcctgcctggcatgagagaaagcaaacagcccagatttggctcaatcccatgaaatgcaaatgtctaacacaggctttctctatcatcttcacgtttacattatgcaccttaaagaagtgaaaactagctgggtgcagtggcatgagcctggagccccagctacttgggaggctgaggcaggaggattatttgagcccaggagtttgaatttagccagggcaacacagtaagaccgtatttctaaaaaccaaaacgcagtaaaaactcatttattgaaggtgtcgcatttatcctttcatgaaagtaaaaatccagtagataatgtaaagcaagtagtacttcccagactccaaagtgccccagatcacctgggaatcttactcaaatgcagattctgataccgtgtgtctagggcaggaccttctgatgatgacctgtgttctgaccttggcttcactgggatgcagggccagccataaacctcatgaatactcagcatctcctggtctccactgtctggttgaggacacaacaatggctctggttgaggaaatctaccccgacccttagtttgcatcttttccttgtaaacctcacctaagtccagttatcagtcacagaatcaatggaaatgatcacatcgtcaggctttttaatgctcctgtttgcctttttattgtttcagtgtttaataagcaaagagatggttaaagtttagcagtagaggagatgccagagggactgccagagggagatgccacagggagatgcgctgggactggtggattccagggccccttactatccgtcccctaccttcctctcacgcattaaccttcccccaccatcagctctgctaaactgtctgtagattcagacacgctacctctcagctccaggcctttgcacatgctcctccctgaa

SEQ ID NO: 342490 - DNA, 764 bp, Homo sapiens
cttatggccgggagaagtgagtgacttgttttcactggcggctcccttaggcagccgctgtatttttccactgcgtggatcacactggagattaattttggttcagccagtgcctgccaagcagaaagcgaaggccctagcccacggggaagtcagccatggcatctgtcacagactcgatgtcgctggtacatttccacggagagagatatttacaatagtaaatttctaggctttgatacactgggtacgatttgttttgataggcatgaacatacttgtaatcggaaacccagctgaggaaatgagcttgccagcccagggtaagttcttagaacttagaacacagggatctttcagaccctgggagtcaagtggcagacagtgagccacaggggcaaagtcaaggacactgattctgcgtaaagaccttgaacaacaggacaggaccagaaccatagcacagggtgctcatggataaggcgaatgggatatttccttttctgcttcccatagcactttgtccagaaacaaagagtggggtggggcgctaaggggccggtaatccaagagcttcgctgtttcttaacgcaacattatagactggattatggattggtagcaattacatctcttctgtttttgcctgcttggcaaggagtacaattcagaatattatcctagaacaagtcaggtttaattgcttatctcaacaaaactatgaaatcagagcagcaggtgacatgaaggaggcaactaccaaa

SEQ ID NO: 342491 - DNA, 167 bp, Homo sapiens
acacactatatctaaacatctagggtgccacagtgttattgccatgagctgtattttgttatttatagaggctataaaagtacacagcactttacaaaccacaaaacgcaggcaccagagcctggaggaactcagcctaaattacatacaaacagtggtggggaaaa

SEQ ID NO: 342492 - DNA, 524 bp, Homo sapiens
aaggggaagacagacacaggccgtggtgtgtggccagtgacgacctggggaatttggaggaaggaacagcttcttactggagccttgccttggcctcctgagtcagcatcatttactgtctggtaattcaggccttggttgtaatgtcagctccacagagagccccctagtccctaccctgtgtcattcttacaccaccctgggttatgtatttcaaaacggctaggaaaagaagttcagaatgcattgtttcttattggttttccttccttggttgacggtgagtccttaagatgaggtgggccctgcactgtcttgttcatgactgtatccaccttctggaacgtcgccagggagcagtgcatggtgcaggaatgagaaactggatgctggtgggaacatggccgctctcagctagcgggtcctcttcagggcagaccctgcctcgtggaagatgacagctggcttggacagagacagagataaccccttaacgtgcagctcctaacttaagcagcccctcg

SEQ ID NO: 342493 - DNA, 201 bp, Homo sapiens
gcggtggcttctagctgtgtcctcatgtggcagaagggacaaacaagttcccttgagcctccttttataagtccaataatctcattggtgaggacgtagcccttctgacttaattacttccccaaatgcctcacatcttttaacactgtcaacgttgaggattaagcttcaacatatcaatttgggggacacagacattga

SEQ ID NO: 342494 - DNA, 203 bp, Homo sapiens
acaggcgtgagccaccgtgcccggcctgtctctttcttttctctgtctctctctctccctcttccccctgctcctagtctctctctctgtctccctccctctcaatctctctctgcctatctccctctctgtctctgcctccctctctgcctctgtcttcctctctgcctctgtctctctctctgcctctgtctctgtctccc

SEQ ID NO: 342495 - DNA, 534 bp, Homo sapiens
  misc_feature (308)..(309): n is a, c, g, or t
taatgaatgaacaaggagatgagtgactcactggcccagccctactccaaatgacatgaaaattcgttacctcaaaggtacattgtaagaacttggtagtatacctgtgtcatggaaacacagtttattgtgtttccatttctaaatcttatccacaacaaattgttttttaaaagtaatgaatttccgtcttacttcccgtatgtttaaatccatctaatttgtactttattttcaaaagttagaacacattaggactagtcactggtagaaaaggaagtaaaagaaaaaaataacgaacaaaaccnntatttactatgatatcatgattaccacaacacactgtttccttaagggatttacactgcactcgctggagtgcaatgacacaatcttggctcactgcaacctcctcctcccaggttcaagtgattctcctgtctcagcctcccgagaagctgggattacaggcacccaccaccaagcctggctaattcttgtatttttagtagagacggggtttcaccatgttgg

SEQ ID NO: 342496 - DNA, 380 bp, Homo sapiens
aggaagtctgttaatagactgtaatgtaaagatttatgtcttcaagcaccccccaactccctgcacccccgtttcacaaataatttctcaatgtttgtttccaagcctgagataaataatgcatgcatttaaaaaaccgcagagtcatggggttccctctgagtagagagggatccatttttaagctcacagtcctggcagtgtttgctcatgcatacatgccttcagcattagctgccagcatcttccaccctgaggctggaccctggggaaggctccttatttcttaggaactccaagcctgccttacagagcaggggcagggcaggtcatcacagcaaaggccccagagccagatgagctgggggccagtggaatga

SEQ ID NO: 342497 - DNA, 520 bp, Homo sapiens
aggaagtctgttaatagactgtaatgtaaagatttatgtcttcaagcaccccccaactccctgcacccccgtttcacaaataatttctcaatgtttgtttccaagcctgagataaataatgcatgcatttaaaaaaccgcagagtcatggggttccctctgagtagagagggatccatttttaagctcacagtcctggcagtgtttgctcatgcatacatgccttcagcattagctgccagcatcttccaccctgaggctggaccctggggaagggcacgcagcccccaccaacgtggtggagaaccccctcccggagacagactctcagcccattcctccctctggtggcccctttagtgagccacagttccacaatggcgagtctgaggagagccacgagcagttcctgaaggcgctgcagaacgccgtcaccaccttcgtgaaccgcatgaagagtaaccacatgcggggccgcagcatcaccaatgactcggccgtgctctcactcttccagtcca

SEQ ID NO: 342498 - DNA, 538 bp, Homo sapiens
tggtaaggccagcagaaaagaatcataacattcctgccaaccagcctgctataggattggttggggagtatcggcaatcagtttctcagttaagtcatcctacaatcacagtcagagcaggtcttcttctattatttcaagtactttgaaatttaaaaagcactatcaaacaattcctccttgtatatggacttgacctttgcccattaccatcttactgtaccctcacaaaaatgagatatcaagaggacagctcttaggtatcccagtgggcagcatttgttccccaaaggtccaccttgaacacccacaacccccatctctgtcaggagctgtcacctgctgatgctgcaagtcataatgaggttgactcctacacatcagaaggcatgtgggtaggagccaatttccttggcatgcagggactctccctgttgtcctctgcttctccttgttttgcttgtcatgttgccctttgtggctgagcagtcttgctgcctcctgctacactactctgttgagacccatgacactcaga

SEQ ID NO: 342499 - DNA, 257 bp, Homo sapiens
agtcaatagttaaataactgagggaaaagaagtacaaatcaggcagctctacatgccatgtttcaaaagggaaggaaacaaaatagttaaactttgcatgttttggaaataaactgtatttatgaaacagagatctcaaaaagtaaaaggaaccccactttatctgatgaaagtgccaggaatctggagaaaagagttcaatttcaactttcagtttggagatgcagaaagaccctgaattttggcacagtaactga

SEQ ID NO: 342500 - DNA, 1033 bp, Homo sapiens
ccccagaaacctccaggtcccctctcttatgatgtctcgcctggactattacaattgttgcctaacttttctccctcctcaaattcatcctttatgtcagtggcaaattaatcttcctgaaacaattccctgattattgttactccagcctttaatatgttcacttgttgcctgttgcagacaggattaaataaaatctccttaccaggaatgttaagaccctctggcatgagtttttcctcctttatctcccctttgcagcctaggctctgactgctcccctaactacagcctctgttgcagctaagtcacctttcctcccttcacatttggaaattactgtctccatacttaacccttctgccagcatttcccagagattagttacagaaatgccaataggttgttcatgacgaaagcattccatagtccaataaattgagtacgcatgaaattctcatcttagagattcataatactcattagcatattaaaggtcccagatattttacactgaagaaacctgcctacctctttttcatatagatttcccatactcatttgaccacagcaccctttatctcagagcacccttcaacatctcctggaaatagtgttttcatagagcttagttgagaaatgttggcatacattattctctgtaagaaattccctcctttgctcatctgtgtgtgtgaaatgtatcctttaaggagaagctcattaagacatcttttggaaagcttcaccaaaaactccattagcgaatttctccgaactttcatatcacttttctagaccactcatgggatatttgtgtgcctgctctatttcttctgctagagcatagacaccttgaggacagtgtgtttcttattaaaggccccactgtacctagcacaggcctttaccgcacagtgagtagttgcttacttatggttaaattaactgtaaaaagtgcagaatcacgaagcattctcaactcctggcctcaagcattcctcctaccttagcctcccaaggagtagctggg

SEQ ID NO: 342501 - DNA, 533 bp, Homo sapiens
gcctgaacaataggacctcctggggggagaaaaatcagctgtggaaatttagagacactccctgttctccttcaacctgaaaggaagagaaaagagagggtgggtgtgctggtactgaagaggtggagctttgactaatatgctcatcaggactttgcctgcagcaaaaagatatctttggaagctgtgcctgtggaaaggtcagtattagctcaatcaaatttggcttatggagaaacttcgggattacttagttgcagtggaaatgtgtctttgtctctacagttttggttggaaagaaagcaatgtgtccctgggactgtcaaaacgctttttaaccagtaacaggaaaactatgtatgtgctggtaaatttgcattgaatatggaaacttggcacatagagtgtcaagcagatggagtttcagactgggaaaagaatgcctttcagattccatccagctctgagctatcctctctctcctgggggaattactcaggatgatctagaagagaaaggaaccgatagttggc

SEQ ID NO: 342502 - DNA, 274 bp, Homo sapiens
ttagctactttcaactgggaagctacaacatggatttatggaatctgtcttggtttctgttcttggatgctcttctcgtgatttctggcttggcaactccagaaaactttgatgtagatggcggaatggaccaggacatatttgatatcaatgaaggtttgggactggatctttttgagggtgacatcagacttgatagggcacaaattagaaattccatcattggagaaaagtatagatggcctcataccattccatatgttctagaagatag

SEQ ID NO: 342503 - DNA, 260 bp, Homo sapiens
cgtctgctaaatatcccttaagactgtccacttctatcccatccctctccactggtgcatgctgctaccgtctcgcccgggccactgcacccggccacagcttgggcactggcctccacccatttcacgttattccagtcctttctccatacagcacctaagtgagcttcaaaagcaccagttctagcttagattcttcagcagcctctgaatgctcttgagatgaaatctaaatcttcagcatgggttatactccctgc

SEQ ID NO: 342504 - DNA, 88 bp, Homo sapiens
gaaaaatagaagtaggtgggaaaagagattgaaagtaaaaaagactagaagaggaattttagaatgagaagtgtgtggggtggtaaaa

SEQ ID NO: 342505 - DNA, 273 bp, Homo sapiens
ctctttcagactcatactcctcctctgtggctttacaaatcctggatagaaaacatctcacaaaacatgttctcttctcttcacatatttaagaggccttcgagcattgacacacatttgcctccagattttctagttgaagaaatgtgcaaaaatcaataaaaagcccaaatacagtggtatttttccccagagttatggacaataacaaataatcaggtgggaaggcttgatgattttctttttagattgtgagctacaggcggccatatg

SEQ ID NO: 342506 - DNA, 435 bp, Homo sapiens
aaatggcagcagctacaatttttggagagctaacagattagagtcaccagggatacagtgttaaggtcaaccttgtctcggccctccttcatcttatagggaagctattagaaagaaacaattaaacagagtactgaatgttacaagagtagttctgaatattatagaaatacctcatagcacagacacctaactgactggaggagggacgctagtaaggcttgagcagggataggatagaggagggagaaagtgttccaggcagaggaaacagatccatgaagatctggaggcaccaaagcattgggcaaggcagagcacttttttcaaactgaaggtcaagacccattactggattttgaaattagtctagtcttttatgacctacattttaataacaatgaaatatgattaaatagaaaatcagtgcaaagc

SEQ ID NO: 342507 - DNA, 307 bp, Homo sapiens
gcttgatatagttctgattgttggtgattttacagtctgatggaagagacatgtatacaaaagggcaatttatgaggtctcgatgtttgtaaaatagaatagacgtgttaactgccacaaggggtttggaggaacgagaggaagatagaattggcgtgagagcactgttacctgaaatagcagagaaaagtttcagggaggaaatagaacttttgctgagctttgaaaattgggagaggtttgcataggtagatagagaaaaattgggaaagcattgtagttaggaaatagtagggactaataaata

SEQ ID NO: 342508 - DNA, 319 bp, Homo sapiens
aagaatgtggaaaagctggagagaaactagaacccccccccaatacacagtggctaagaatgtaaaatgcaatccctgtgaaagtctgtcagtttctcaaaaagttcaacacagagctaccatatgacccaacaatcccacttgtaggtgtacacccaagagaaagaagacatatccccactggaaaacctgtccacaaatgctcacagcagaattattcatgaaggccaaaaagtggtaacaatccaaatgtccgtcaacaggcgaacagataaagcaaacatggtatatccacctaagggactatcgttcagccata

SEQ ID NO: 342509 - DNA, 843 bp, Homo sapiens
gggggagatggcgcgacgcttccatcaagagactctgatgtgtcccaggggaagaatcacagttttttagaggtgtgccctgccactccctcagggttagaggagagttgcatagacatggggacctcttcccaccatagtttcacatgactgctttcctggaagtagactgttgacattctctgtccctgctactttcacaaagtgtggcagtattttagtgtgcccattagggacattgatggagagtgcaccaagacctcttagttagcagatagcatgctcacggatgtcactgtcctgtaaatgtctggaggtagacatcctgagggatcttggcagctttttctgggaagtaattcacgtttactctgccttacaagaccaggcttgtgccgcagaacgtgggggcaggtccagcgtctggtattcttccatgggcccacttgacagggccacgatgtgttttcagttgttgtggggttttttggttttctgtttttgagacaaggtctgactctgttgcccaggctggagtgcagtggtgcaattacggctcactgcagtcttgaactcctggactcaagtgatcctcccacctcaggctcctaagtagctggatctacaggtgtgtgccaccttgcctggctaatttttttatcttactttttatacagatgaggccttactatattgtccaggctggtctcaaactcctggcctcaagcgatcctcccacctcagcctcccaaagcactgggattacaggcacacagcaccacacccagctttgtcatttgaatggctgggccccacttgaagaaagcttatatgttaagaaaa

SEQ ID NO: 342510 - DNA, 419 bp, Homo sapiens
gctcatgggtaaagattaccatttaatttgtagcagtagtgagtcggtgccatttatgaccacttcttgtcaagctcacacttgagacaagtcaagggccaaaaaggcctgacctgtagatacaacaagccacttgtagatttaggtggttaattacttatagagacagagaaaagaagaagaaggcaaagatgccagcttcctgtagttcttgtctagcataccaagaagggtgacactgaaactcacagctgatgaccgtgagccacaggattccggctcctgaggagctagatccagatggcagctaagtgggtttatgttctggacccttatttgaggccaggtgaagggatgcccagaaagccccatgcttcaccagaacccaggaggcaatgaggacctgtctcccgtcggct

SEQ ID NO: 342511 - DNA, 167 bp, Homo sapiens
gctcaaatgtcaggtaattgttagccaaccaatcatatttaaaactgagacaccaagtaattgactggaatctctttgtaccggatttactaagtggtgggttttctcatggagtgagctgttgggagttccactatttcattggaatatggacaaattttagaatg

SEQ ID NO: 342512 - DNA, 699 bp, Homo sapiens
gtggacttttccatcaggggagcaaaatccaaaaacaagtcaaaattacccttgtaggtcttcctgtgggatgtccttatgtctgcataatctctggtgcagtgggcagcagaggaccatctttgtccctggtgaggtctcccctgtgtgtgtgttttgtcacaggaaaggagggagtgatttctaaacactaaatctcagctgggtgcagtggctcacatctggaatcccagctctttgggagggttgggtgggcagatctcaaggtcaggagatcgagaccatcctggccaacatggtaaaaccccatctctagtaaaaatagaaaaattagctgggcctggcagcgcatgcctgtaatcccagctacttaagaggctgaggcaggagaatcactagaaccagggaggcagaggttgcagtgagctgaggtcatgccactgaaccacattcttgtgacagagctagacaccatctcaaaaaaaaaaaaaagaaaaattaaatctcatatttttttacacacaggattgatttccaaagactcatgctatgtaaggaagccaccaagaagggcaaagaaaaggagccagggacggctcttcctcaggtaaagtgatattcctcggtggattcttctgtctccttgttttcttaaataccaggtattgtggtagccagtcttctgtgattctgaagcgt

SEQ ID NO: 342513 - DNA, 204 bp, Homo sapiens
tccagagtgatgagaaaatgtaatttgccataagataaaatgacttttaagtgtggtcattagctaaagttcttctcaatttagtgattctgtaatgtcagccattgcaaatccgtgtctacttgatttattggtttggttttcttttgctttttatttttttatttttcattttttgagacggagtctcaccctgtcaccgag

SEQ ID NO: 342514 - DNA, 205 bp, Homo sapiens
gggacaggcaagacacttacatttgacgtaggctctgccacttgctgacaagttctactcaatttctgctttatagcagtctactttctaacttattaaagcctatcttgacagtcggccttcttatctgaagcaatgagggtaggtggttgattcatcaaaacaagtcggttgaagcaggaaagcattacatgggagacatata

SEQ ID NO: 342515 - DNA, 609 bp, Homo sapiens
cctccacccatccaccgcccaggcagctgcatttgctcaccctccaagtcacctgtgaagtggcctaatactgagaaggcagaggctgctgcccggccctcacatcctcacagtcacaactgcctgctttgggagctagcgagtgttgagaagctgctgtaacccgcctgcaaaaggccccacttgtgacagacactgcgatcctccccctgactctggaaaacactgtctgaaaccacagtgaccctaagactgtcttaaaaaccaaatgagaagggagtcaaagccacgtactgcaaaaaagtcgactacacaccaaggtagcaagggagaacgtgagcgaccagaaacatggcagaagctccccctcagtaactgctttgaaagcgaatggactgatcgctccaaccaaaggcagattggccaagtgggtgaaaagacgatttccatgttgtcaccacacgatctgcaagacgttcaaagacacgaacaggctggaagtgaaaggatgaagaaacccaggcaaagagtaacctaaagagagctgaggcgactcttaaactcacagcagataagttttctattttttgagacggagtcttgctctgt

SEQ ID NO: 342516 - DNA, 659 bp, Homo sapiens
tcacgtcatatagcggtaataatataattgtggggtacgatcaggttcagcgatggagtaggttaaggtcatgtccgtaatctacgcgcacgtgtgttggagattgagactagtagggctaggcccaccgctgcttcgcaggcggcaaagactagtatggcaataggcacaatattggctaagagggagtgggtgttgagaagctgctgtaacccgcctgcaaaaggccccacttgtgacagacactgcgatcctccccctgactctggaaaacactgtctgaaaccacagtgaccctaagactgtcttaaaaaccaaatgagaagggagtcaaagccacgtactgcaaaaaagtcgactacacaccaaggtagcaagggagaacgtgagcgaccagaaacatggcagaagctccccctcagtaactgctttgaaagcgaatggactgatcgctccaaccaaaggcagattggccaagtgggtgaaaagacgatttccatgttgtcaccacacgatctgcaagacgttcaaagacacgaacaggctggaagtgaaaggatgaagaaacccaggcaaagagtaacctaaagagagctgaggcgactcttaaactcacagcagataagttttctattttttgagacggagtcttgctctgt

SEQ ID NO: 342517 - DNA, 348 bp, Homo sapiens
gagattcaatcaaagaaaagatgttcttgaaaagcaaatctcccaccatgattaagagtctgactaagaatatgggaatgaacgtgataggcagtgggctgagagatgtgcaaataaatgctgtgttctaggaaccatgtatagttaaataaggctgagcatagacatgagagagatggggagtggaaggagggcaggctgtaagggtgagaaccataccacaaatgagaccatgctagggaatcagacttgattttacacatgatgggctgcttttggagtgtgtttattttagatgaattattctgtagcaacagtgcagaagagatatttgaaaggggcaacagt

SEQ ID NO: 342518 - DNA, 421 bp, Homo sapiens
ctgctgtctctctgcctttgagttgcattcactcctgtctcctgtctttatgtcattgttttccacttttccctccatctacctttttttcttcctctttctcctccttttgcatctgattttcttcttgaactaggcacaaagtctattttttaaatgttcttttgtgtgttggctagctttaaatccccaggaataaaataagagagacagtttagatttttcattcacgttaaataaagtaaaacttaaacaaaccccaaacaaccaaagtcatgtgaccctggcttgattgcctttttttcgggtcattgactaatgaaggggagaattgtctctttctcggagtccatgcgaggtcagcctgggactctgtgtgtggttttgcagagagggcctctgggatggtcacttgtggatt

SEQ ID NO: 342519 - DNA, 208 bp, Homo sapiens
tcactgtatgttatctcttattgtgcctaatttataaattaaactttattgtgggtctgtgtgtatagaaaaacatatttatagggttcagtacggaggtttcaggcatccactaggggtcttggaacatattccccaaggataaggggggactattgtactgtccccacccagggagccttagctatgtggagtgagtaggggcatg

SEQ ID NO: 342520 - DNA, 233 bp, Homo sapiens
gagaaagacaaagctcttggtctttgggtgagtgattcattggttgattgcctggagttttccacttgggagcaaattccttctgtggtttccaggctttaagagacattagtttgcttttcaatttacatggccattctactgaatccactgcacagctctctgccattgtaatagccctgatacataacttcacatttggaatgtagagtgcaaccattcttaatagttta

SEQ ID NO: 342521 - DNA, 215 bp, Homo sapiens
atataagaaatatattcaatcaataaagaggaaataaaattaaattttagcttctgtgatatatctgaggggatagtttaactcaacatatattagatctcatcaaaccagaatcaaaaagaaccttaaaatattccaagctcataaattttgaaaaaccaatggacacaatcctgctaagcatttaaaatatgtgcccagttgtcatttaggat

SEQ ID NO: 342522 - DNA, 3013 bp, Homo sapiens
ggagtcaccgtgatacctgacatctagcaatcactagagtaggaaatgagtatagatcagcaacaagtccagcctttacagttgcagcagaggtttcctgtggctcgagtgtggcgagtcccggaaacctcggagcccgcagacttcccttcgcgggagcccgcccgaactccatcctttgccggcagccacgccccgcagtgggaaggagggactgaaaagcatttccttgaggctggcacaccttgccctacccaaccctgtcattatttcccctccgactgggccggtgccatcggaaaccggagtgaccagaggagggacacgcatccaatttcactgggctgcaagatatcaataagccttgcctctttaaactacttatgtacaaataaaagtgatggtgagaacctggctcaggaaatgcagtagcaggccatattgcatccaaaggaattactcacagctgtgctgtgtgcattctctgtgggcctagcagggaaggggacagccctgtggcaatgggcatgacacggatgctcctggaatgcagtctcagtgacaagttgtgtgtcatccaggagaagcagtatgaagtgattatcgtcccaactttgttggttactatcttcctcatccttcttggggtcatcctgtggctttttatcagagaacaaagaactcaacagcagcgttctggacctcaaggcattgcccctgttcctccacctagggacctaagctgggaagcaggacatggaggaaatgtggctttgccacttaaggagacatccgtggaaaactttctgggagctaccacacctgccctggctaagctgcaggtgccgcgggagcaactctctgaagttctggagcagatttgcagtggtagctgtgggcccatctttcgagccaatatgaacactggggacccttctaagcccaagagtgttattctcaaggctttaaaagaaccagctgggctccatgaggtacaagatttcttagggcgaatccaattccatcaatacctggggaaacacaaaaacctggtgcagctggaaggctgctgcactgaaaagctgccactctatatggtgttggaggatgtggcccagggggacctgctcggctttctctggacctgtcggcgggatgtgatgactatggatggtcttctctatgatctcacagaaaaacaagtatatcacatcggaaagcaggtccttttggcgctggaattcctgcaggagaagcatttgttccatggggatgtggcagccaggaatattctgatgcaaagtgatctcactgctaagctctgtggattaggcctggcttatgaagtttacacccgaggggccatctcctctactcaaaccatacctctcaagtggcttgccccagaacggcttctcctgagacctgctagcatcagagcagatgtctggtcttttgggatcctgctctatgagatggtgactctaggagcaccaccgtatcctgaagtccctcctaccagcatcctagagcatctccaaagaaggaaaatcatgaagagacccagtagctgcacacataccatgtacagtatcatgaagtcctgctggcgctggcgtgaggctgaccgcccctcacctagagagctgcgcttgcgcctagaagctgccattaaaactgcagatgacgaggctgtgttacaagtaccagagttggtggtacctgaactgtatgcagctgtggccggcatcagagtggagagcctcttctacaactatagcatgctttgaagagtctcgggcaagaaacattcatgcatgagtatatgttcttggaatcaattcctctaagaacagagaatggtctttcccagggacacaaagggagaaatgggacatggattcttgatcttcctttacacatttctcgggaaatctgaaatgatgctggatgggactctacacatcctgagctaagacatactgtcagtctcacttctgctgtcccagtcctagaaatcctgggtagaagtggtggacctgtgcaaaggaggttttagaactctgcagtatttgttggggcatggcacaaataagctcatccctcccgtccgaggctagtttcctctggaaccacatttttatctagatgaaaatttggaatgaaatgaaggaatagaaatccaataaaagagttgaagggaaagaaaatttaaggttcttcttgctcaggattacagatatggaccaacacctccttcaagaaaaggtggtaggacacaaagttcttcagtcctgagccctacatgtggggttggaggagaactataacggaaaaacctctgagtttcaccttaggtatagataaaagaaagatggtccccttttatctgattctgagacaggtaaattctgtttgttactacgtttaattagaaggtggaggagtcatttcatgattaagaacattcaacatgtattgttcattaagctagcttcctagttccgattagactaaggagactaagcctagagagtcaatgttagaacagtgaaaagaattctgtgtgtgtgtgtgtgtgtgtgcacaataaataggaaatgtagaaaccaagcaagaaggcttagtagctcagtctttaacaagggctagaaaagaatgtaatctgatatggaaggatagcagcttctaattttcaatcatctgttgatatactgtgaaacttattttattaaattaatatttattaaatggaaatatgcttttctggtttataactactaaaaatatcatagggaggataaaagtaaataagtgaaagttaatgccaatagaaaaattcaagagataatgtacaatgtcagaaaagggattctttatgtgtaaatggggataatacctatttcacaaggttgttctgaggattgatacgttttgagtatgtatttgtacactatctggcacatatgcgctcaataaacgtgtttctccttttcttttgcccttcctaacc

SEQ ID NO: 342523 - DNA, 2125 bp, Homo sapiens
  misc_feature (2076)..(2076): n is a, c, g, or t
  misc_feature (2083)..(2083): n is a, c, g, or t
ggagtcaccgtgatacctgacatctagcaatcactagagtaggaaatgagtatagatcagcaacaagtccagcctttacagttgcagcagaggtttcctgtggctcgagtgtggcgagtcccggaaacctcggagcccgcagacttcccttcgcgggagcccgcccgaactccatcctttgccggcagccacgccccgcagtgggaaggagggactgaaaagcatttccttgaggctggcacaccttgccctacccaaccctgtcattatttcccctccgactgggccggtgccatcggaaaccggagtgaccagaggagggacacgcatccaatttcactgggctgcaagatatcaataagccttgcctctttaaactacttatgtacaaataaaagtgatggtgagaacctggctcaggaaatgcagtagcaggccatattgcatccaaaggaattactcacagctgtgctgtgtgcattctctgtgggcctagcagggaaggggacagccctgtggcaatgggcatgacacggatgctcctggaatgcagtctcagtgacaagttgtgtgtcatccaggagaagcagtatgaagtgattatcgtcccaactttgttggttactatcttcctcatccttcttggggtcatcctgtggctttttatcagagaacaaagaactcaacagcagcgttctggacctcaaggcattgcccctgttcctccacctagggacctaagctgggaagcaggacatggaggaaatgtggctttgccacttaaggagacatccgtggaaaactttctgggagctaccacacctgccctggctaagctgcaggtgccgcgggagcaactctctgaagttctggagcagatttgcagtggtagctgtgggcccatctttcgagccaatatgaacactggggacccttctaagcccaagagtgttattctcaaggctttaaaagaaccagctgggctccatgaggtacaagatttcttagggcgaatccaattccatcaatacctggggaaacacaaaaacctggtgcagctggaaggctgctgcactgaaaagctgccactctatatggtgttggaggatgtggcccagggggacctgctcggctttctctggacctgtcggcgggatgtgatgactatggatggtcttctctatgatctcacagaaaaacaagtatatcacatcggaaagcaggtccttttggcgctggaattcctgcaggagaagcatttgttccatggggatgtggcagccaggaatattctgatgcaaagtgatctcactgctaagctctgtggattaggcctggcttatgaagtttacacccgaggggccatctcctctactcaaaccatacctctcaagtggcttgccccagaacggcttctcctgagacctgctagcatcagagcagatgtctggtcttttgggatcctgctctatgagatggtgactctaggagcaccaccgtatcctgaagtccctcctaccagcatcctagagcatctccaaagaaggaaaatcatgaagagacccagtagctgcacacataccatgtacagtatcatgaagtcctgctggcgctggcgtgaggctgaccgcccctcacctagagagctgcgcttgcgcctagaagctgccattaaaactgcagatgacgaggctgtgttacaagtaccagagttggtggtacctgaactgtatgcagctgtggccggcatcagagtggagagcctcttctacaactatagcatgctttgaagagtctcgggcaagaaacattcatgcatgagtatatgttcttggaatcaattcctctaagaacagagaatggtctttcccagggacacaaagggagaaatgggacatggattcttgatcttcctttacacatttctcgggaaatctgaaatgatgctggatgggactctacacatcctgagctaagacatactgtcagtctcacttctgctgtcccagtcctagaaatcctgggtagaagtggtggacctgtgcaaaggaggttttgcttatgtgaccatgtgtngcatgcnaggaactgtatggcccactgcactgccgattaccgagttatt

SEQ ID NO: 342524 - DNA, 3031 bp, Homo sapiens
ggagtcaccgtgatacctgacatctagcaatcactagagtaggaaatgagtatagatcagcaacaagtccagcctttacagttgcagcagaggtttcctgtggctcgagtgtggcgagtcccggaaacctcggagcccgcagacttcccttcgcgggagcccgcccgaactccatcctttgccggcagccacgccccgcagtgggaaggagggactgaaaagcatttccttgaggctggcacaccttgccctacccaaccctgtcattatttcccctccgactgggccggtgccatcggaaaccggagtgaccagaggagggacacgcatccaatttcactgggctgcaagatatcaataagccttgcctctttaaactacttatgtacaaataaaagtgatggtgagaacctggctcaggaaatgcagtagcaggccatattgcatccaaaggaattactcacagctgtgctgtgtgcattctctgtgggcctagcagggaaggggacagccctgtggcaatgggcatgacacggatgctcctggaatgcagtctcagtgacaagttgtgtgtcatccaggagaagcagtatgaagtgattatcgtcccaactttgttggttactatcttcctcatccttcttggggtcatcctgtggctttttatcagagaacaaagaactcaacagcagcgttctggacctcaaggcattgcccctgttcctccacctagggacctaagctgggaagcaggacatggaggaaatgtggctttgccacttaaggagacatccgtggaaaactttctgggagctaccacacctgccctggctaagctgcaggtgccgcgggagcaactctctgaagttctggagcagatttgcagtggtagctgtgggcccatctttcgagccaatatgaacactggggacccttctaagcccaagagtgttattctcaaggctttaaaagaaccagctgggctccatgaggtacaagatttcttagggcgaatccaattccatcaatacctggggaaacacaaaaacctggtgcagctggaaggctgctgcactgaaaagctgccactctatatggtgttggaggatgtggcccagggggacctgctcggctttctctggacctgtcggcgggtgagcagtagggcagaggatgtgatgactatggatggtcttctctatgatctcacagaaaaacaagtatatcacatcggaaagcaggtccttttggcgctggaattcctgcaggagaagcatttgttccatggggatgtggcagccaggaatattctgatgcaaagtgatctcactgctaagctctgtggattaggcctggcttatgaagtttacacccgaggggccatctcctctactcaaaccatacctctcaagtggcttgccccagaacggcttctcctgagacctgctagcatcagagcagatgtctggtcttttgggatcctgctctatgagatggtgactctaggagcaccaccgtatcctgaagtccctcctaccagcatcctagagcatctccaaagaaggaaaatcatgaagagacccagtagctgcacacataccatgtacagtatcatgaagtcctgctggcgctggcgtgaggctgaccgcccctcacctagagagctgcgcttgcgcctagaagctgccattaaaactgcagatgacgaggctgtgttacaagtaccagagttggtggtacctgaactgtatgcagctgtggccggcatcagagtggagagcctcttctacaactatagcatgctttgaagagtctcgggcaagaaacattcatgcatgagtatatgttcttggaatcaattcctctaagaacagagaatggtctttcccagggacacaaagggagaaatgggacatggattcttgatcttcctttacacatttctcgggaaatctgaaatgatgctggatgggactctacacatcctgagctaagacatactgtcagtctcacttctgctgtcccagtcctagaaatcctgggtagaagtggtggacctgtgcaaaggaggttttagaactctgcagtatttgttggggcatggcacaaataagctcatccctcccgtccgaggctagtttcctctggaaccacatttttatctagatgaaaatttggaatgaaatgaaggaatagaaatccaataaaagagttgaagggaaagaaaatttaaggttcttcttgctcaggattacagatatggaccaacacctccttcaagaaaaggtggtaggacacaaagttcttcagtcctgagccctacatgtggggttggaggagaactataacggaaaaacctctgagtttcaccttaggtatagataaaagaaagatggtccccttttatctgattctgagacaggtaaattctgtttgttactacgtttaattagaaggtggaggagtcatttcatgattaagaacattcaacatgtattgttcattaagctagcttcctagttccgattagactaaggagactaagcctagagagtcaatgttagaacagtgaaaagaattctgtgtgtgtgtgtgtgtgtgtgcacaataaataggaaatgtagaaaccaagcaagaaggcttagtagctcagtctttaacaagggctagaaaagaatgtaatctgatatggaaggatagcagcttctaattttcaatcatctgttgatatactgtgaaacttattttattaaattaatatttattaaatggaaatatgcttttctggtttataactactaaaaatatcatagggaggataaaagtaaataagtgaaagttaatgccaatagaaaaattcaagagataatgtacaatgtcagaaaagggattctttatgtgtaaatggggataatacctatttcacaaggttgttctgaggattgatacgttttgagtatgtatttgtacactatctggcacatatgcgctcaataaacgtgtttctccttttcttttgcccttcctaacc

SEQ ID NO: 342525 - DNA, 1786 bp, Homo sapiens
ggagtcaccgtgatacctgacatctagcaatcactagagtaggaaatgagtatagatcagcaacaagtccagcctttacagttgcagcagaggtttcctgtggctcgagtgtggcgagtcccggaaacctcggagcccgcagacttcccttcgcgggagcccgcccgaactccatcctttgccggcagccacgccccgcagtgggaaggagggactgaaaagcatttccttgaggctggcacaccttgccctacccaaccctgtcattatttcccctccgactgggccggtgccatcggaaaccggagtgaccagaggagggacacgcatccaatttcactgggctgcaagatatcaataagccttgcctctttaaactacttatgtacaaataaaagtgatggtgagaacctggctcaggaaatgcagtagcaggccatattgcatccaaaggaattactcacagctgtgctgtgtgcattctctgtgggcctagcagggaaggggacagccctgtggcaatgggcatgacacggatgctcctggaatgcagtctcagtgacaagttgtgtgtcatccaggagaagcagtatgaagtgattatcgtcccaactttgttggttactatcttcctcatccttcttggggtcatcctgtggctttttatcagagaacaaagaactcaacagcagcgttctggacctcaaggcattgcccctgttcctccacctagggacctaagctgggaagcaggacatggaggaaatgtggctttgccacttaaggagacatccgtggaaaactttctgggagctaccacacctgccctggctaagctgcaggtgccgcgggagcaactctctgaagttctggagcagatttgcagtggtagctgtgggcccatctttcgagccaatatgaacactggggacccttctaagcccaagagtgttattctcaaggctttaaaagaaccagctgggctccatgaggtacaagatttcttagggcgaatccaattccatcaatacctggggaaacacaaaaacctggtgcagctggaaggctgctgcactgaaaagctgccactctatatggtgttggaggatgtggcccagggggacctgctcggctttctctggacctgtcggcgggatgtgatgactatggatggtcttctctatgatctcacagaaaaacaagtatatcacatcggaaagcaggtccttttggcgctggaattcctgcaggagaagcatttgttccatggggatgtggcagccaggaatattctgatgcaaagtgatctcactgctaagctctgtggattaggcctggcttatgaagtttacacccgaggggccatctcctctactcaaaccatacctctcaagtggcttgccccagaacggcttctcctgagacctgctagcatcagagcagatgtctggtcttttgggatcctgctctatgagatggtgactctaggaagcacaccgtatcctgaagtcctcctaacaagatctagagcatttcaagaagcaaaccagaagaaccagagctggcaataccgtcaggatagagtctgcgcgcgccacatgacgcccaacaagagaccgggccaaggcacagcgacaagcgcccttgcccaaggggaccagagagtaggcgagagaacccataagaagattcctaaaccatatatctcgagaggggggctcgccactcgttccacttctgtcttacacagaagccacaagaacacaatcaacagctagccggcctt

SEQ ID NO: 342526 - DNA, 5590 bp, Homo sapiens
caacaacaaaaggacttggactggccggcctgggcgcacgacccgagggctggagtcggccccgcgcctgccgtctgggtacctgaacgaggtgcagcgcagcccggccccaccgcagctacctcagcagtcccgccccgcccgcgtccttccccgccgagccggcccgctcccttccccgcgcagccccgcacggcccgggcccacgtacaatgactcttcttgcttttcacctaagttgaataagcaccctgtgcactttaatctcctgtcggtaccattgggccaactaaagacaaggttttgaaatctcagctataaaagacatccagccaaactctcagtcttgccttaacaatgttccagaggctgaataaaatgtttgtgggtgaagtcagttcttcctccaaccaagaaccagaattcaatgagaaagaagatgatgaatggattcttgttgacttcatagatacttgcactggtttctcagcagaagaagaagaagaagaggaggacatcagtgaagagtcacctactgagcacccttcagtcttttcctgtttaccggcatctcttgagtgcttggctgatacaagtgattcctgctttctccagtttgagtcatgtccaatggaggagagctggtttatcaccccacccccatgttttactgcaggtggattaaccactatcaaggtggaaacaagtcctatggaaaaccttctcattgaacatcccagcatgtctgtctatgctgtgcataactcctgccctggtctcagtgaggccacccgtgggactgatgaattacatagcccaagtagtcccagagtggaagctcaaaatgaaatggggcagcatattcattgttatgttgcagctcttgctgctcatacaacttttctggaacaacccaagagctttcgcccttcccagtggataaaagaacacagtgaaagacagcctcttaacagaaatagccttcgtcgccaaaatcttaccagggattgccaccctcggcaagtcaagcacaatggctgggttgttcatcagccctgcccgcgtcagtacaattactaatagtttcaagttttgttggttggtttctcttggtttgtgcttacatgtatggatgtgtgtatatgtacagtgaaaatgttgtctctttacaaccaattgataaccaatcacatagttttatcagtgtatttagacactatcttgaaaatcagatttatatgctgtgtatcacataatgccttgcctttaacatttactttttttgtacactttttcagattatttctggaaacatatcaatataattacagtgtttgggggtgtctttaaatatattaggttatacattagtcagcattttaaagacatttcttcccaagtacgagaataggcatctttcattttcattttattttgtattacttaatcttttaagcaagcaaaaatttattctcagggtcagctgtacactttattgaccagtacttgataatctctctgtatatgatgaatacatttttatacactaacattagcattaacaggtgatagttgccatggatataatggaattatggctggactttcttttgaaagaaaacttgatgtattctgtgtgtatggtttttccccagattagtcatacagttcatttggaattcaggtacattaagctttagtgaagagtgcatgcagtaattccaatgtgactgcatgacgtggtacagacattacaggtgttgtagacagaggcacttgtctcgtgcagagggattaaattagacctgtgagattatatttggaaaaattcatgtctgtaactaacccattagtgcagtatttaatttgttactattccttcccgccaattctgtccactcctcacctcgcatcagctataaatttggaagtacttgtccaggcactcaagtgacttcatatttctctctgcccatgggaaaagagataggctttatatttccacagagtgaaaaatcctctgtcatggagcctgtcctgccaagtggcaagagtgtggggactgtctggtgatgatgtctttcatggcatctgagtgaagagtgacaggttggctcaacttttttctttttttttttttaattgccttgtattgtaagtattcttccctgcagtccaagtgacttttcattttttgttttaacttcaggcaaaatctttaaccactctggcctctgtttcccccaccaacggggagcagtgacatttacctccctcacagagtcactgtgaggattctatactgatttgaagtggagctgttcagaactgaaccttgtaggaaattccaagggcctttctactgaatctggtgatggggtggggccgtggcactttctctgccacagctgttcttcacagtgttggtgctaatgaggccagggtgcagggttcgattcacacgtaggccagttaacttagagaaaatctatttccttacctctagccagtcacttcctttttccgcagttgtgatgggttttgctgagccatccactctgactgatttcctctgaagtaaacatatttacaatccaaagcaattctactgacagaagtgttgccttcataatcaaacagcttgtttttccatctcctctgcaaccctaattaaatgagtacaggtctacaaaatgttttcaaggagaaaagcagcatatccttaagtgaagtattatatttttcaataaccctgtagtggcttgatgcagggaaccctgggggactttcagcgaagagctgtgctcttttctgactagattagagcgtttggagtggaagacgtcaaatgtgtagtgagatggaggttttacattgttcttctactggctgtgatgaagtgccagaatgtctctttagaacaagagttagattccccctttctccttattgccccttccgttttgacttcccctttatttatttgttgtctaattaggggccaagtctgtaaagttttgtcaaagtgagttagaagttgttttctcttactatttgtgtttaccagagttgggagataagatagtttccatgaaggtgtgtatgttttatacgatgtttgttatagggccatgcattggtaacttgaaaatagaccagcttaatgtcttcaggatgtaaaactctgaatacacggcgtctctttttcatacattgcatgtaagttgttagtacctcacaagctacagaagttcagccatgagattttgtttggcaacatgaacagatttgtgtataactgcaatggcctttttttccagatttccttattgactttttgtttgccttacctggggctagttttttatgctttgtacctagaaaacaaaaaattacattcgttgggctttttttcaaggttgggattaccacaccacctggaatatcatactgtggtttctgcctaaaattggcacatgtaagtattgaagaaaatggttatataattcagttgaaactcttggttattagatgttaggcatctcctgtatgtaagacacaaggccaaccacaacacagaacgatgttgacctgttaagtattctctgaaacatggccaaaatgcattttatgagcttttttttttttgctattgtaaatattagtggtttacaatgcgctttagacatatttctttaaaatgcaagcagtgagaaataagacctctctgaattagtagctctaaactgttaacatagaatgttacttggaaaaagtctggaatatgtggtgtacacaagcagtgcttcgtgaatgagtttcttagcttttatagtgcgccatgtttctcaaagtttgtttttgttgacaaaacattttataatatatatcttatgtttattttttttctcaactaattgtgtactgcactgtaaggtgaaaattagccatccattatttatcttctgtggcaatgcatttatatggttgattgggtggggaattttttgcagaaagatgcaaagtgattgggttttcgacttcctatcgcagggagcttttaagaaatattaatttcctatacatttttccaatccccatgcaaactgttcctgtttacataccttctctgttgtatcagtactttgagtgagaagacagtttatttaaaacttgagcaggctgttcagcattgtttctgcttctgaaatctgtatagtacactggtttgtaatcattatgtcttcattgaaatccttgctacttctcttcctcctcaatgaaatacattatatattatctttatgtactcttaagaaaaacgagcaaggaagagtatcttcattattctcattttctctgagttggaaacaaaaacatgaaggactccaactagaagacagatatttacatttaaatagattagtgggaaaactttaagagtttccacatattagttttcattttttgagtcaagagactgctccttgtactgggagacactagtagtatatgtttgtaatgttactttaaaattatctttttattttataaggcccataaatactggttaaactctgttaaaagtgggccttctatcttggatggtttcactgccatcagccatgctgatatattagaaatggcatccctatctacttactttaatgcttaaaattatacataaaatgctttatttagaaaacctacatgatacagtggtgtcagccttgccatgtatcagtttcacttgaaatttgagaccaattaaatttcaactgtttagggtggagaaagaggtactggaaaacatgcagatgaggatatcttttatgtgcaacagtatcctttgcatgggaggagagttactcttgaaaggcaggcagcttaagtggacaatgttttgtatatagttgagaattttacgacacttttaaaaattgtgtaattgttaaatgtccagttttgctctgttttgcctgaagttttagtatttgttttctaggtggacctctgaaaaccaaaccagtacctggggaggttagatgtgtgtttcaggcttggagtgtatgagtggttttgcttgtattttcctccagagattttgaactttaataattgcgtgtgtgtttttttttttttaagtggctttgtttttttttctcaagtaaaattgtgaacatatttcctttataggggcagggcatgagttagggagactgaagagtattgtagactgtacatgtgccttcttaatgtgtttctcgacacattttttttcagtaacttgaaaattcaaaagggacatttggttaggttactgtacatcaatctatgcataaatggcagcttgttttcttgagccactgtctaaattttgtttttatagaaattttttatactgattggttcatagatggtcagttttgtacacagactgaacaatacagcactttgccaaaaatgagtgtagcattgtttaaacattgtgtgttaacacctgttctttgtaattgggttgtggtgcattttgcactacctggagttacagttttcaatctgtcagtaaataaagtgtcctttaacttca

SEQ ID NO: 342527 - DNA, 573 bp, Homo sapiens
tgtagaatgtaggccaaggcatatgctttcttctaagggtatgtgtgtatgtgtatgtacttatgtatatatgtgcatgctgatttgaaataacttcctttttctgttttattttaggtacaatgactcttcttgcttttcacctaagttgaataagcaccctgtgcactttaatctcctgtcggtaccattgggccaactaaagacaaggttttgaaatctcagctataaaagacatccagccaaactctcagtcttgccttaacaatgttccagaggctgaataaaatgtttgtgggtgaagtcagttcttcctccaaccaagaaccagaattcaatgagaaagaagatgatgaatggattcttgttgacttcataggtaaggtacacttggttacttggtggttcatcttcacagtaaaaatggaaacttgcatctcagtttttgcataaggaaaccaataactgaggggttttcagccttaaaagtaagcaggagtttgtctttaaaaaattgcaggaaaccatctgtgctagataatgtcagtgaaattgactgacatcagacttttt

SEQ ID NO: 342528 - DNA, 5538 bp, Homo sapiens
tgtagaatgtaggccaaggcatatgctttcttctaagggtatgtgtgtatgtgtatgtacttatgtatatatgtgcatgctgatttgaaataacttcctttttctgttttattttaggtacaatgactcttcttgcttttcacctaagttgaataagcaccctgtgcactttaatctcctgtcggtaccattgggccaactaaagacaaggttttgaaatctcagctataaaagacatccagccaaactctcagtcttgccttaacaatgttccagaggctgaataaaatgtttgtgggtgaagtcagttcttcctccaaccaagaaccagaattcaatgagaaagaagatgatgaatggattcttgttgacttcatagatacttgcactggtttctcagcagaagaagaagaagaagaggaggacatcagtgaagagtcacctactgagcacccttcagtcttttcctgtttaccggcatctcttgagtgcttggctgatacaagtgattcctgctttctccagtttgagtcatgtccaatggaggagagctggtttatcaccccacccccatgttttactgcaggtggattaaccactatcaaggtggaaacaagtcctatggaaaaccttctcattgaacatcccagcatgtctgtctatgctgtgcataactcctgccctggtctcagtgaggccacccgtgggactgatgaattacatagcccaagtagtcccagggccaggaaaagctgcttataagactcacgggcacagaagtggaagctcaaaatgaaatggggcagcatattcattgttatgttgcagctcttgctgctcatacaacttttctggaacaacccaagagctttcgcccttcccagtggataaaagaacacagtgaaagacagcctcttaacagaaatagccttcgtcgccaaaatcttaccagggattgccaccctcggcaagtcaagcacaatggctgggttgttcatcagccctgcccgcgtcagtacaattactaatagtttcaagttttgttggttggtttctcttggtttgtgcttacatgtatggatgtgtgtatatgtacagtgaaaatgttgtctctttacaaccaattgataaccaatcacatagttttatcagtgtatttagacactatcttgaaaatcagatttatatgctgtgtatcacataatgccttgcctttaacatttactttttttgtacactttttcagattatttctggaaacatatcaatataattacagtgtttgggggtgtctttaaatatattaggttatacattagtcagcattttaaagacatttcttcccaagtacgagaataggcatctttcattttcattttattttgtattacttaatcttttaagcaagcaaaaatttattctcagggtcagctgtacactttattgaccagtacttgataatctctctgtatatgatgaatacatttttatacactaacattagcattaacaggtgatagttgccatggatataatggaattatggctggactttcttttgaaagaaaacttgatgtattctgtgtgtatggtttttccccagattagtcatacagttcatttggaattcaggtacattaagctttagtgaagagtgcatgcagtaattccaatgtgactgcatgacgtggtacagacattacaggtgttgtagacagaggcacttgtctcgtgcagagggattaaattagacctgtgagattatatttggaaaaattcatgtctgtaactaacccattagtgcagtatttaatttgttactattccttcccgccaattctgtccactcctcacctcgcatcagctataaatttggaagtacttgtccaggcactcaagtgacttcatatttctctctgcccatgggaaaagagataggctttatatttccacagagtgaaaaatcctctgtcatggagcctgtcctgccaagtggcaagagtgtggggactgtctggtgatgatgtctttcatggcatctgagtgaagagtgacaggttggctcaacttttttctttttttttttttaattgccttgtattgtaagtattcttccctgcagtccaagtgacttttcattttttgttttaacttcaggcaaaatctttaaccactctggcctctgtttcccccaccaacggggagcagtgacatttacctccctcacagagtcactgtgaggattctatactgatttgaagtggagctgttcagaactgaaccttgtaggaaattccaagggcctttctactgaatctggtgatggggtggggccgtggcactttctctgccacagctgttcttcacagtgttggtgctaatgaggccagggtgcagggttcgattcacacgtaggccagttaacttagagaaaatctatttccttacctctagccagtcacttcctttttccgcagttgtgatgggttttgctgagccatccactctgactgatttcctctgaagtaaacatatttacaatccaaagcaattctactgacagaagtgttgccttcataatcaaacagcttgtttttccatctcctctgcaaccctaattaaatgagtacaggtctacaaaatgttttcaaggagaaaagcagcatatccttaagtgaagtattatatttttcaataaccctgtagtggcttgatgcagggaaccctgggggactttcagcgaagagctgtgctcttttctgactagattagagcgtttggagtggaagacgtcaaatgtgtagtgagatggaggttttacattgttcttctactggctgtgatgaagtgccagaatgtctctttagaacaagagttagattccccctttctccttattgccccttccgttttgacttcccctttatttatttgttgtctaattaggggccaagtctgtaaagttttgtcaaagtgagttagaagttgttttctcttactatttgtgtttaccagagttgggagataagatagtttccatgaaggtgtgtatgttttatacgatgtttgttatagggccatgcattggtaacttgaaaatagaccagcttaatgtcttcaggatgtaaaactctgaatacacggcgtctctttttcatacattgcatgtaagttgttagtacctcacaagctacagaagttcagccatgagattttgtttggcaacatgaacagatttgtgtataactgcaatggcctttttttccagatttccttattgactttttgtttgccttacctggggctagttttttatgctttgtacctagaaaacaaaaaattacattcgttgggctttttttcaaggttgggattaccacaccacctggaatatcatactgtggtttctgcctaaaattggcacatgtaagtattgaagaaaatggttatataattcagttgaaactcttggttattagatgttaggcatctcctgtatgtaagacacaaggccaaccacaacacagaacgatgttgacctgttaagtattctctgaaacatggccaaaatgcattttatgagcttttttttttttgctattgtaaatattagtggtttacaatgcgctttagacatatttctttaaaatgcaagcagtgagaaataagacctctctgaattagtagctctaaactgttaacatagaatgttacttggaaaaagtctggaatatgtggtgtacacaagcagtgcttcgtgaatgagtttcttagcttttatagtgcgccatgtttctcaaagtttgtttttgttgacaaaacattttataatatatatcttatgtttattttttttctcaactaattgtgtactgcactgtaaggtgaaaattagccatccattatttatcttctgtggcaatgcatttatatggttgattgggtggggaattttttgcagaaagatgcaaagtgattgggttttcgacttcctatcgcagggagcttttaagaaatattaatttcctatacatttttccaatccccatgcaaactgttcctgtttacataccttctctgttgtatcagtactttgagtgagaagacagtttatttaaaacttgagcaggctgttcagcattgtttctgcttctgaaatctgtatagtacactggtttgtaatcattatgtcttcattgaaatccttgctacttctcttcctcctcaatgaaatacattatatattatctttatgtactcttaagaaaaacgagcaaggaagagtatcttcattattctcattttctctgagttggaaacaaaaacatgaaggactccaactagaagacagatatttacatttaaatagattagtgggaaaactttaagagtttccacatattagttttcattttttgagtcaagagactgctccttgtactgggagacactagtagtatatgtttgtaatgttactttaaaattatctttttattttataaggcccataaatactggttaaactctgttaaaagtgggccttctatcttggatggtttcactgccatcagccatgctgatatattagaaatggcatccctatctacttactttaatgcttaaaattatacataaaatgctttatttagaaaacctacatgatacagtggtgtcagccttgccatgtatcagtttcacttgaaatttgagaccaattaaatttcaactgtttagggtggagaaagaggtactggaaaacatgcagatgaggatatcttttatgtgcaacagtatcctttgcatgggaggagagttactcttgaaaggcaggcagcttaagtggacaatgttttgtatatagttgagaattttacgacacttttaaaaattgtgtaattgttaaatgtccagttttgctctgttttgcctgaagttttagtatttgttttctaggtggacctctgaaaaccaaaccagtacctggggaggttagatgtgtgtttcaggcttggagtgtatgagtggttttgcttgtattttcctccagagattttgaactttaataattgcgtgtgtgtttttttttttttaagtggctttgtttttttttctcaagtaaaattgtgaacatatttcctttataggggcagggcatgagttagggagactgaagagtattgtagactgtacatgtgccttcttaatgtgtttctcgacacattttttttcagtaacttgaaaattcaaaagggacatttggttaggttactgtacatcaatctatgcataaatggcagcttgttttcttgagccactgtctaaattttgtttttatagaaattttttatactgattggttcatagatggtcagttttgtacacagactgaacaatacagcactttgccaaaaatgagtgtagcattgtttaaacattgtgtgttaacacctgttctttgtaattgggttgtggtgcattttgcactacctggagttacagttttcaatctgtcagtaaataaagtgtcctttaacttca

SEQ ID NO: 342529 - DNA, 5574 bp, Homo sapiens
caacaacaaaaggacttggactggccggcctgggcgcacgacccgagggctggagtcggccccgcgcctgccgtctgggtacctgaacgaggtgcagcgcagcccggccccaccgcagctacctcagcagtcccgccccgcccgcgtccttccccgccgagccggcccgctcccttccccgcgcagccccgcacggcccgggcccacgtacaatgactcttcttgcttttcacctaagttgaataagcaccctgtgcactttaatctcctgtcggtaccattgggccaactaaagacaaggttttgaaatctcagctataaaagacatccagccaaactctcagtcttgccttaacaatgttccagaggctgaataaaatgtttgtgggtgaagtcagttcttcctccaaccaagaaccagaattcaatgagaaagaagatgatgaatggattcttgttgacttcatagatacttgcactggtttctcagcagaagaagaagaagaagaggaggacatcagtgaagagtcacctactgagcacccttcagtcttttcctgtttaccggcatctcttgagtgcttggctgatacaagtgattcctgctttctccagtttgagtcatgtccaatggaggagagctggtttatcaccccacccccatgttttactgcaggtggattaaccactatcaaggtggaaacaagtcctatggaaaaccttctcattgaacatcccagcatgtctgtctatgctgtgcataactcctgccctggtctcagtgaggccacccgtgggactgatgaattacatagcccaagtagtcccagggccaggaaaagctgcttataagactcacgggcacagaagtggaagctcaaaatgaaatggggcagcatattcattgttatgttgcagctcttgctgctcatacaacttttctggaacaacccaagagctttcgcccttcccagtggataaaagaacacagtgaaagacagcctcttaacagaaatagccttcgtcgccaaaatcttaccagggattgccaccctcggcaagtcaagcacaatggctgggttgttcatcagccctgcccgcgtcagtacaattactaatagtttcaagttttgttggttggtttctcttggtttgtgcttacatgtatggatgtgtgtatatgtacagtgaaaatgttgtctctttacaaccaattgataaccaatcacatagttttatcagtgtatttagacactatcttgaaaatcagatttatatgctgtgtatcacataatgccttgcctttaacatttactttttttgtacactttttcagattatttctggaaacatatcaatataattacagtgtttgggggtgtctttaaatatattaggttatacattagtcagcattttaaagacatttcttcccaagtacgagaataggcatctttcattttcattttattttgtattacttaatcttttaagcaagcaaaaatttattctcagggtcagctgtacactttattgaccagtacttgataatctctctgtatatgatgaatacatttttatacactaacattagcattaacaggtgatagttgccatggatataatggaattatggctggactttcttttgaaagaaaacttgatgtattctgtgtgtatggtttttccccagattagtcatacagttcatttggaattcaggtacattaagctttagtgaagagtgcatgcagtaattccaatgtgactgcatgacgtggtacagacattacaggtgttgtagacagaggcacttgtctcgtgcagagggattaaattagacctgtgagattatatttggaaaaattcatgtctgtaactaacccattagtgcagtatttaatttgttactattccttcccgccaattctgtccactcctcacctcgcatcagctataaatttggaagtacttgtccaggcactcaagtgacttcatatttctctctgcccatgggaaaagagataggctttatatttccacagagtgaaaaatcctctgtcatggagcctgtcctgccaagtggcaagagtgtggggactgtctggtgatgatgtctttcatggcatctgagtgaagagtgacaggttggctcaacttttttctttttttttttttaattgccttgtattgtaagtattcttccctgcagtccaagtgacttttcattttttgttttaacttcaggcaaaatctttaaccactctggcctctgtttcccccaccaacggggagcagtgacatttacctccctcacagagtcactgtgaggattctatactgatttgaagtggagctgttcagaactgaaccttgtaggaaattccaagggcctttctactgaatctggtgatggggtggggccgtggcactttctctgccacagctgttcttcacagtgttggtgctaatgaggccagggtgcagggttcgattcacacgtaggccagttaacttagagggttttgctgagccatccactctgactgatttcctctgaagtaaacatatttacaatccaaagcaattctactgacagaagtgttgccttcataatcaaacagcttgtttttccatctcctctgcaaccctaattaaatgagtacaggtctacaaaatgttttcaaggagaaaagcagcatatccttaagtgaagtattatatttttcaataaccctgtagtggcttgatgcagggaaccctgggggactttcagcgaagagctgtgctcttttctgactagattagagcgtttggagtggaagacgtcaaatgtgtagtgagatggaggttttacattgttcttctactggctgtgatgaagtgccagaatgtctctttagaacaagagttagattccccctttctccttattgccccttccgttttgacttcccctttatttatttgttgtctaattaggggccaagtctgtaaagttttgtcaaagtgagttagaagttgttttctcttactatttgtgtttaccagagttgggagataagatagtttccatgaaggtgtgtatgttttatacgatgtttgttatagggccatgcattggtaacttgaaaatagaccagcttaatgtcttcaggatgtaaaactctgaatacacggcgtctctttttcatacattgcatgtaagttgttagtacctcacaagctacagaagttcagccatgagattttgtttggcaacatgaacagatttgtgtataactgcaatggcctttttttccagatttccttattgactttttgtttgccttacctggggctagttttttatgctttgtacctagaaaacaaaaaattacattcgttgggctttttttcaaggttgggattaccacaccacctggaatatcatactgtggtttctgcctaaaattggcacatgtaagtattgaagaaaatggttatataattcagttgaaactcttggttattagatgttaggcatctcctgtatgtaagacacaaggccaaccacaacacagaacgatgttgacctgttaagtattctctgaaacatggccaaaatgcattttatgagcttttttttttttgctattgtaaatattagtggtttacaatgcgctttagacatatttctttaaaatgcaagcagtgagaaataagacctctctgaattagtagctctaaactgttaacatagaatgttacttggaaaaagtctggaatatgtggtgtacacaagcagtgcttcgtgaatgagtttcttagcttttatagtgcgccatgtttctcaaagtttgtttttgttgacaaaacattttataatatatatcttatgtttattttttttctcaactaattgtgtactgcactgtaaggtgaaaattagccatccattatttatcttctgtggcaatgcatttatatggttgattgggtggggaattttttgcagaaagatgcaaagtgattgggttttcgacttcctatcgcagggagcttttaagaaatattaatttcctatacatttttccaatccccatgcaaactgttcctgtttacataccttctctgttgtatcagtactttgagtgagaagacagtttatttaaaacttgagcaggctgttcagcattgtttctgcttctgaaatctgtatagtacactggtttgtaatcattatgtcttcattgaaatccttgctacttctcttcctcctcaatgaaatacattatatattatctttatgtactcttaagaaaaacgagcaaggaagagtatcttcattattctcattttctctgagttggaaacaaaaacatgaaggactccaactagaagacagatatttacatttaaatagattagtgggaaaactttaagagtttccacatattagttttcattttttgagtcaagagactgctccttgtactgggagacactagtagtatatgtttgtaatgttactttaaaattatctttttattttataaggcccataaatactggttaaactctgttaaaagtgggccttctatcttggatggtttcactgccatcagccatgctgatatattagaaatggcatccctatctacttactttaatgcttaaaattatacataaaatgctttatttagaaaacctacatgatacagtggtgtcagccttgccatgtatcagtttcacttgaaatttgagaccaattaaatttcaactgtttagggtggagaaagaggtactggaaaacatgcagatgaggatatcttttatgtgcaacagtatcctttgcatgggaggagagttactcttgaaaggcaggcagcttaagtggacaatgttttgtatatagttgagaattttacgacacttttaaaaattgtgtaattgttaaatgtccagttttgctctgttttgcctgaagttttagtatttgttttctaggtggacctctgaaaaccaaaccagtacctggggaggttagatgtgtgtttcaggcttggagtgtatgagtggttttgcttgtattttcctccagagattttgaactttaataattgcgtgtgtgtttttttttttttaagtggctttgtttttttttctcaagtaaaattgtgaacatatttcctttataggggcagggcatgagttagggagactgaagagtattgtagactgtacatgtgccttcttaatgtgtttctcgacacattttttttcagtaacttgaaaattcaaaagggacatttggttaggttactgtacatcaatctatgcataaatggcagcttgttttcttgagccactgtctaaattttgtttttatagaaattttttatactgattggttcatagatggtcagttttgtacacagactgaacaatacagcactttgccaaaaatgagtgtagcattgtttaaacattgtgtgttaacacctgttctttgtaattgggttgtggtgcattttgcactacctggagttacagttttcaatctgtcagtaaataaagtgtcctttaacttca

SEQ ID NO: 342530 - DNA, 2661 bp, Homo sapiens
cgatctaggtccaccaaatctcatcttgaataccacgtgttgtgagagggaccaggtgggaggtaactgagtcggtgggaggtaactgagtcatgaggacgggtcttttccgtgctgttatcatgatagtgaataagtctcatgagatctgatggttttataagtaggtgtgtatgttttatacgatgtttgttatagggccatgcattggtaacttgaaaatagaccagcttaatgtcttcaggatgtaaaactctgaatacacggcgtctctttttcatacattgcatgtaagttgttagtacctcacaagctacagaagttcagccatgagattttgtttggcaacatgaacagatttgtgtataactgcaatggcctttttttccagatttccttattgactttttgtttgccttacctggggctagttttttatgctttgtacctagaaaacaaaaaattacattcgttgggctttttttcaaggttgggattaccacaccacctggaatatcatactgtggtttctgcctaaaattggcacatgtaagtattgaagaaaatggttatataattcagttgaaactcttggttattagatgttaggcatctcctgtatgtaagacacaaggccaaccacaacacagaacgatgttgacctgttaagtattctctgaaacatggccaaaatgcattttatgagcttttttttttttgctattgtaaatattagtggtttacaatgcgctttagacatatttctttaaaatgcaagcagtgagaaataagacctctctgaattagtagctctaaactgttaacatagaatgttacttggaaaaagtctggaatatgtggtgtacacaagcagtgcttcgtgaatgagtttcttagcttttatagtgcgccatgtttctcaaagtttgtttttgttgacaaaacattttataatatatatcttatgtttattttttttctcaactaattgtgtactgcactgtaaggtgaaaattagccatccattatttatcttctgtggcaatgcatttatatggttgattgggtggggaattttttgcagaaagatgcaaagtgattgggttttcgacttcctatcgcagggagcttttaagaaatattaatttcctatacatttttccaatccccatgcaaactgttcctgtttacataccttctctgttgtatcagtactttgagtgagaagacagtttatttaaaacttgagcaggctgttcagcattgtttctgcttctgaaatctgtatagtacactggtttgtaatcattatgtcttcattgaaatccttgctacttctcttcctcctcaatgaaatacattatatattatctttatgtactcttaagaaaaacgagcaaggaagagtatcttcattattctcattttctctgagttggaaacaaaaacatgaaggactccaactagaagacagatatttacatttaaatagattagtgggaaaactttaagagtttccacatattagttttcattttttgagtcaagagactgctccttgtactgggagacactagtagtatatgtttgtaatgttactttaaaattatctttttattttataaggcccataaatactggttaaactctgttaaaagtgggccttctatcttggatggtttcactgccatcagccatgctgatatattagaaatggcatccctatctacttactttaatgcttaaaattatacataaaatgctttatttagaaaacctacatgatacagtggtgtcagccttgccatgtatcagtttcacttgaaatttgagaccaattaaatttcaactgtttagggtggagaaagaggtactggaaaacatgcagatgaggatatcttttatgtgcaacagtatcctttgcatgggaggagagttactcttgaaaggcaggcagcttaagtggacaatgttttgtatatagttgagaattttacgacacttttaaaaattgtgtaattgttaaatgtccagttttgctctgttttgcctgaagttttagtatttgttttctaggtggacctctgaaaaccaaaccagtacctggggaggttagatgtgtgtttcaggcttggagtgtatgagtggttttgcttgtattttcctccagagattttgaactttaataattgcgtgtgtgtttttttttttttaagtggctttgtttttttttctcaagtaaaattgtgaacatatttcctttataggggcagggcatgagttagggagactgaagagtattgtagactgtacatgtgccttcttaatgtgtttctcgacacattttttttcagtaacttgaaaattcaaaagggacatttggttaggttactgtacatcaatctatgcataaatggcagcttgttttcttgagccactgtctaaattttgtttttatagaaattttttatactgattggttcatagatggtcagttttgtacacagactgaacaatacagcactttgccaaaaatgagtgtagcattgtttaaacattgtgtgttaacacctgttctttgtaattgggttgtggtgcattttgcactacctggagttacagttttcaatctgtcagtaaataaagtgtcctttaacttca

SEQ ID NO: 342531 - DNA, 5575 bp, Homo sapiens
caacaacaaaaggacttggactggccggcctgggcgcacgacccgagggctggagtcggccccgcgcctgccgtctgggtacctgaacgaggtgcagcgcagcccggccccaccgcagctacctcagcagtcccgccccgcccgcgtccttccccgccgagccggcccgctcccttccccgcgcagccccgcacggcccgggcccacgtacaatgactcttcttgcttttcacctaagttgaataagcaccctgtgcactttaatctcctgtcggtaccattgggccaactaaagacaaggttttgaaatctcagctataaaagacatccagccaaactctcagtcttgccttaacaatgttccagaggctgaataaaatgtttgtgggtgaagtcagttcttcctccaaccaagaaccagaattcaatgagaaagaagatgatgaatggattcttgttgacttcatagatacttgcactggtttctcagcagaagaagaagaagaagaggaggacatcagtgaagagtcacctactgagcacccttcagtcttttcctgtttaccggcatctcttgagtgcttggctgatacaagtgattcctgctttctccagtttgagtcatgtccaatggaggagagctggtttatcaccccacccccatgttttactgcaggtggattaaccactatcaaggtggaaacaagtcctatggaaaaccttctcattgaacatcccagcatgtctgtctatgctgtgcataactcctgccctggtctcagtgaggccacccgtgggactgatgaattacatagcccaagtagtcccagggccaggaaaagctgcttataagactcacgggcacagaagtggaagctcaaaatgaaatggggcagcatattcattgttatgttgcagctcttgctgctcatacaacttttctggaacaacccaagagctttcgcccttcccagtggataaaagaacacagtgaaagacagcctcttaacagaaatagccttcgtcgccaaaatcttaccagggattgccaccctcggcaagtcaagcacaatggctgggttgttcatcagccctgcccgcgtcagtacaattactaatagtttcaagttttgttggttggtttctcttggtttgtgcttacatgtatggatgtgtgtatatgtacagtgaaaatgttgtctctttacaaccaattgataaccaatcacatagttttatcagtgtatttagacactatcttgaaaatcagatttatatgctgtgtatcacataatgccttgcctttaacatttactttttttgtacactttttcagattatttctggaaacatatcaatataattacagtgtttgggggtgtctttaaatatattaggttatacattagtcagcattttaaagacatttcttcccaagtacgagaataggcatctttcattttcattttattttgtattacttaatcttttaagcaagcaaaaatttattctcagggtcagctgtacactttattgaccagtacttgataatctctctgtatatgatgaatacatttttatacactaacattagcattaacaggtgatagttgccatggatataatggaattatggctggactttcttttgaaagaaaacttgatgtattctgtgtgtatggtttttccccagattagtcatacagttcatttggaattcaggtacattaagctttagtgaagagtgcatgcagtaattccaatgtgactgcatgacgtggtacagacattacaggtgttgtagacagaggcacttgtctcgtgcagagggattaaattagacctgtgagattatatttggaaaaattcatgtctgtaactaacccattagtgcagtatttaatttgttactattccttcccgccaattctgtccactcctcacctcgcatcagctataaatttggaagtacttgtccaggcactcaagtgacttcatatttctctctgcccatgggaaaagagataggctttatatttccacagagtgaaaaatcctctgtcatggagcctgtcctgccaagtggcaagagtgtggggactgtctggtgatgatgtctttcatggcatctgagtgaagagtgacaggttggctcaacttttttctttttttttttttaattgccttgtattgtaagtattcttccctgcagtccaagtgacttttcattttttgttttaacttcaggcaaaatctttaaccactctggcctctgtttcccccaccaacggggagcagtgacatttacctccctcacagagtcactgtgaggattctatactgatttgaagtggagctgttcagaactgaaccttgtaggaaattccaagggcctttctactgaatctggtgatggggtggggccgtggcactttctctgccacagctgttcttcacagtgttggtgctaatgaggccagggtgcagggttcgattcacacgtaggccagttaacttagagaaaatctatttccttacctctagccagtcacttcctttttccgcagttgtgatgggttttgctgagccatccactctgactgatttcctctgaagtaaacatatttacaatccaaagcaattctactgacagaagtgttgccttcataatcaaacagcttgtttttccatctcctctgcaaccctaattaaatgagtacaggtctacaaaatgttttcaaggagaaaagcagcatatccttaagtgaagtattatatttttcaataaccctgtagtggcttgatgcagggaaccctgggggactttcagcgaagagctgtgctcttttctgactagattagagcgtttggagtggaagacgtcaaatgtgtagtgagatggaggttttacattgttcttctactggctgtgatgaagtgccagaatgtctctttagaacaagagttagattccccctttctccttattgccccttccgttttgacttcccctttatttatttgttgtctaattaggggccaagtctgtaaagttttgtcaaagtgagttagaagttgttttctcttactatttgtgtttaccagagttgggagataagatagtttccatgaaggtgtgtatgttttatacgatgtttgttatagggccatgcattggtaacttgaaaatagaccagcttaatgtcttcaggatgtaaaactctgaatacacggcgtctctttttcatacattgcatgtaagttgttagtacctcacaagctacagaagttcagccatgagattttgtttggcaacatgaacagatttgtgtataactgcaatggcctttttttccagatttccttattgactttttgtttgccttacctggggctagttttttatgctttgtacctagaaaacaaaaaattacattcgttgggctttttttcaaggttgggattaccacaccacctggaatatcatactgtggtttctgcctaaaattggcacatgtaagtattgaagaaaatggttatataattcagttgaaactcttggttattagatgttaggcatctcctgtatgtaagacacaaggccaaccacaacacagaacgatgttgacctgttaagtattctctgaaacatggccaaaatgcattttatgagcttttttttttttgctattgtaaatattagtggtttacaatgcgctttagacatatttctttaaaatgcaagcagtgagaaataagacctctctgaattagtagctctaaactgttaacatagaatgttacttggaaaaagtctggaatatgtggtgtacacaagcagtgcttcgtgaatgagtttcttagcttttatagtgcgccatgtttctcaaagtttgtttttgttgacaaaacattttataatatatatcttatgtttattttttttctcaactaattgtgtactgcactgtaaggtgaaaattagccatccattatttatcttctgtggcaatgcatttatatggttgattgggtggggaattttttgcagaaagatgcaaagtgattgggttttcgacttcctatcgcagggagcttttaagaaatattaatttcctatacatttttccaatccccatgcaaactgttcctgtttacataccttctctgttgtatcagtactttgagtgagaagacagtttatttaaaacttgagcaggctgttcagcattgtttctgcttctgaaatctgtatagtacactggtttgtaatcattatgtcttcattgaaatccttgctacttctcttcctcctcaatgaaatacattatatattatctttatgtactcttaagaaaaacgagcaaggaagagtatcttcattattctcattttctctgagttggaaacaaaaacatgaaggactccaactagaagacagatatttacatttaaatagattagtgggaaaactttaagagtttccacatattagttttcattttttgagtcaagagactgctccttgtactgggagacactagtagtatatgtttgtaatgttactttaaaattatctttttattttataaggcccataaatactggttaaactctgttaaaagtgggccttctatcttggatggtttcactgccatcagccatgctgatatattagaaatggcatccctatctacttactttaatgcttaaaattatacataaaatgctttatttagaaaacctacatgatacagtggtgtcagccttgccatgtatcagtttcacttgaaatttgagaccaattaaatttcaactgtttagggtggagaaagaggtactggaaaacatgcagatgaggatatcttttatgtgcaacagtatcctttgcatgggaggagagttactcttgaaaggcaggcagcttaagtggacaatgttttgtatatagttgagaattttacgacacttttaaaaattgtgtaattgttaaatgtccagttttgctctgttttgcctgaagttttagtatttgttttctaggtggacctctgaaaaccaaaccagtacctggggaggttagatgtgtgtttcaggcttggagtgtatgagtggttttgcttgtattttcctccagagattttgaactttaataattgcgtgtgtgtttttttttttttaagtggctttgtttttttttctcaatgaagagtattgtagactgtacatgtgccttcttaatgtgtttctcgacacattttttttcagtaacttgaaaattcaaaagggacatttggttaggttactgtacatcaatctatgcataaatggcagcttgttttcttgagccactgtctaaattttgtttttatagaaattttttatactgattggttcatagatggtcagttttgtacacagactgaacaatacagcactttgccaaaaatgagtgtagcattgtttaaacattgtgtgttaacacctgttctttgtaattgggttgtggtgcattttgcactacctggagttacagttttcaatctgtcagtaaataaagtgtcctttaacttca

SEQ ID NO: 342532 - DNA, 5628 bp, Homo sapiens
caacaacaaaaggacttggactggccggcctgggcgcacgacccgagggctggagtcggccccgcgcctgccgtctgggtacctgaacgaggtgcagcgcagcccggccccaccgcagctacctcagcagtcccgccccgcccgcgtccttccccgccgagccggcccgctcccttccccgcgcagccccgcacggcccgggcccacgtacaatgactcttcttgcttttcacctaagttgaataagcaccctgtgcactttaatctcctgtcggtaccattgggccaactaaagacaaggttttgaaatctcagctataaaagacatccagccaaactctcagtcttgccttaacaatgttccagaggctgaataaaatgtttgtgggtgaagtcagttcttcctccaaccaagaaccagaattcaatgagaaagaagatgatgaatggattcttgttgacttcatagatacttgcactggtttctcagcagaagaagaagaagaagaggaggacatcagtgaagagtcacctactgagcacccttcagtcttttcctgtttaccggcatctcttgagtgcttggctgatacaagtgattcctgctttctccagtttgagtcatgtccaatggaggagagctggtttatcaccccacccccatgttttactgcaggtggattaaccactatcaaggtggaaacaagtcctatggaaaaccttctcattgaacatcccagcatgtctgtctatgctgtgcataactcctgccctggtctcagtgaggccacccgtgggactgatgaattacatagcccaagtagtcccagggccaggaaaagctgcttataagactcacgggcacagaagtggaagctcaaaatgaaatggggcagcatattcattgttatgttgcagctcttgctgctcatacaacttttctggaacaacccaagagctttcgcccttcccagtggataaaagaacacagtgaaagacagcctcttaacagaaatagccttcgtcgccaaaatcttaccagggattgccaccctcggcaagtcaagcacaatggctgggttgttcatcagccctgcccgcgtcagtacaattactaatagtttcaagttttgttggttggtttctcttggtttgtgcttacatgtatggatgtgtgtatatgtacagtgaaaatgttgtctctttacaaccaattgataaccaatcacatagttttatcagtgtatttagacactatcttgaaaatcagatttatatgctgtgtatcacataatgccttgcctttaacatttactttttttgtacactttttcagattatttctggaaacatatcaatataattacagtgtttgggggtgtctttaaatatattaggttatacattagtcagcattttaaagacatttcttcccaagtacgagaataggcatctttcattttcattttattttgtattacttaatcttttaagcaagcaaaaatttattctcagggtcagctgtacactttattgaccagtacttgataatctctctgtatatgatgaatacatttttatacactaacattagcattaacaggtgatagttgccatggatataatggaattatggctggactttcttttgaaagaaaacttgatgtattctgtgtgtatggtttttccccagattagtcatacagttcatttggaattcaggtacattaagctttagtgaagagtgcatgcagtaattccaatgtgactgcatgacgtggtacagacattacaggtgttgtagacagaggcacttgtctcgtgcagagggattaaattagacctgtgagattatatttggaaaaattcatgtctgtaactaacccattagtgcagtatttaatttgttactattccttcccgccaattctgtccactcctcacctcgcatcagctataaatttggaagtacttgtccaggcactcaagtgacttcatatttctctctgcccatgggaaaagagataggctttatatttccacagagtgaaaaatcctctgtcatggagcctgtcctgccaagtggcaagagtgtggggactgtctggtgatgatgtctttcatggcatctgagtgaagagtgacaggttggctcaacttttttctttttttttttttaattgccttgtattgtaagtattcttccctgcagtccaagtgacttttcattttttgttttaacttcaggcaaaatctttaaccactctggcctctgtttcccccaccaacggggagcagtgacatttacctccctcacagagtcactgtgaggattctatactgatttgaagtggagctgttcagaactgaaccttgtaggaaattccaagggcctttctactgaatctggtgatggggtggggccgtggcactttctctgccacagctgttcttcacagtgttggtgctaatgaggccagggtgcagggttcgattcacacgtaggccagttaacttagagaaaatctatttccttacctctagccagtcacttcctttttccgcagttgtgatgggttttgctgagccatccactctgactgatttcctctgaagtaaacatatttacaatccaaagcaattctactgacagaagtgttgccttcataatcaaacagcttgtttttccatctcctctgcaaccctaattaaatgagtacaggtctacaaaatgttttcaaggagaaaagcagcatatccttaagtgaagtattatatttttcaataaccctgtagtggcttgatgcagggaaccctgggggactttcagcgaagagctgtgctcttttctgactagattagagcgtttggagtggaagacgtcaaatgtgtagtgagatggaggttttacattgttcttctactggctgtgatgaagtgccagaatgtctctttagaacaagagttagattccccctttctccttattgccccttccgttttgacttcccctttatttatttgttgtctaattaggggccaagtctgtaaagttttgtcaaagtgagttagaagttgttttctcttactatttgtgtttaccagagttgggagataagatagtttccatgaaggtgtgtatgttttatacgatgtttgttatagggccatgcattggtaacttgaaaatagaccagcttaatgtcttcaggatgtaaaactctgaatacacggcgtctctttttcatacattgcatgtaagttgttagtacctcacaagctacagaagttcagccatgagattttgtttggcaacatgaacagatttgtgtataactgcaatggcctttttttccagatttccttattgactttttgtttgccttacctggggctagttttttatgctttgtacctagaaaacaaaaaattacattcgttgggctttttttcaaggttgggattaccacaccacctggaatatcatactgtggtttctgcctaaaattggcacatgtaagtattgaagaaaatggttatataattcagttgaaactcttggttattagatgttaggcatctcctgtatgtaagacacaaggccaaccacaacacagaacgatgttgacctgttaagtattctctgaaacatggccaaaatgcattttatgagcttttttttttttgctattgtaaatattagtggtttacaatgcgctttagacatatttctttaaaatgcaagcagtgagaaataagacctctctgaattagtagctctaaactgttaacatagaatgttacttggaaaaagtctggaatatgtggtgtacacaagcagtgcttcgtgaatgagtttcttagcttttatagtgcgccatgtttctcaaagtttgtttttgttgacaaaacattttataatatatatcttatgtttattttttttctcaactaattgtgtactgcactgtaaggtgaaaattagccatccattatttatcttctgtggcaatgcatttatatggttgattgggtggggaattttttgcagaaagatgcaaagtgattgggttttcgacttcctatcgcagggagcttttaagaaatattaatttcctatacatttttccaatccccatgcaaactgttcctgtttacataccttctctgttgtatcagtactttgagtgagaagacagtttatttaaaacttgagcaggctgttcagcattgtttctgcttctgaaatctgtatagtacactggtttgtaatcattatgtcttcattgaaatccttgctacttctcttcctcctcaatgaaatacattatatattatctttatgtactcttaagaaaaacgagcaaggaagagtatcttcattattctcattttctctgagttggaaacaaaaacatgaaggactccaactagaagacagatatttacatttaaatagattagtgggaaaactttaagagtttccacatattagttttcattttttgagtcaagagactgctccttgtactgggagacactagtagtatatgtttgtaatgttactttaaaattatctttttattttataaggcccataaatactggttaaactctgttaaaagtgggccttctatcttggatggtttcactgccatcagccatgctgatatattagaaatggcatccctatctacttactttaatgcttaaaattatacataaaatgctttatttagaaaacctacatgatacagtggtgtcagccttgccatgtatcagtttcacttgaaatttgagaccaattaaatttcaactgtttagggtggagaaagaggtactggaaaacatgcagatgaggatatcttttatgtgcaacagtatcctttgcatgggaggagagttactcttgaaaggcaggcagcttaagtggacaatgttttgtatatagttgagaattttacgacacttttaaaaattgtgtaattgttaaatgtccagttttgctctgttttgcctgaagttttagtatttgttttctaggtggacctctgaaaaccaaaccagtacctggggaggttagatgtgtgtttcaggcttggagtgtatgagtggttttgcttgtattttcctccagagattttgaactttaataattgcgtgtgtgtttttttttttttaagtggctttgtttttttttctcaagtaaaattgtgaacatatttcctttataggggcagggcatgagttagggagactgaagagtattgtagactgtacatgtgccttcttaatgtgtttctcgacacattttttttcagtaacttgaaaattcaaaagggacatttggttaggttactgtacatcaatctatgcataaatggcagcttgttttcttgagccactgtctaaattttgtttttatagaaattttttatactgattggttcatagatggtcagttttgtacacagactgaacaatacagcactttgccaaaaatgagtgtagcattgtttaaacattgtgtgttaacacctgttctttgtaattgggttgtggtgcattttgcactacctggagttacagttttcaatctgtcagtaaataaagtgtcctttaacttca

SEQ ID NO: 342533 - DNA, 663 bp, Homo sapiens
caacaacaaaaggacttggactggccggcctgggcgcacgacccgagggctggagtcggccccgcgcctgccgtctgggtacctgaacgaggtgcagcgcagcccggccccaccgcagctacctcagcagtcccgccccgcccgcgtccttccccgccgagccggcccgctcccttccccgcgcagccccgcacggcccgggcccacgtacaatgactcttcttgcttttcacctaagttgaataagcaccctgtgcactttaatctcctgtcggtaccattgggccaactaaagacaaggttttgaaatctcagctataaaagacatccagccaaactctcagtcttgccttaacaatgttccagaggctgaataaaatgtttgtgggtgaagtcagttcttcctccaaccaagaaccagaattcaatgagaaagaagatgatgaatggattcttgttgacttcataggtaaggtacacttggttacttggtggttcatcttcacagtaaaaatggaaacttgcatctcagtttttgcataaggaaaccaataactgaggggttttcagccttaaaagtaagcaggagtttgtctttaaaaaattgcaggaaaccatctgtgctagataatgtcagtgaaattgactgacatcagacttttt

SEQ ID NO: 342534 - DNA, 5574 bp, Homo sapiens
caacaacaaaaggacttggactggccggcctgggcgcacgacccgagggctggagtcggccccgcgcctgccgtctgggtacctgaacgaggtgcagcgcagcccggccccaccgcagctacctcagcagtcccgccccgcccgcgtccttccccgccgagccggcccgctcccttccccgcgcagccccgcacggcccgggcccacgtacaatgactcttcttgcttttcacctaagttgaataagcaccctgtgcactttaatctcctgtcggtaccattgggccaactaaagacaaggttttgaaatctcagctataaaagacatccagccaaactctcagtcttgccttaacaatgttccagaggctgaataaaatgtttgtgggtgaagtcagttcttcctccaaccaagaaccagaattcaatgagaaagaagatgatgaatggattcttgttgacttcatagatacttgcactggtttctcagcagaagaagaagaagaagaggaggacatcagtgaagagtcacctactgagcacccttcagtcttttcctgtttaccggcatctcttgagtgcttggctgatacaagtgattcctgctttctccagtttgagtcatgtccaatggaggagagctggtttatcaccccacccccatgttttactgcaggtggattaaccactatcaaggtggaaacaagtcctatggaaaaccttctcattgaacatcccagcatgtctgtctatgctgtgcataactcctgccctggtctcagtgaggccacccgtgggactgatgaattacatagcccaagtagtcccagggccaggaaaagctgcttataagactcacgggcacagaagtggaagctcaaaatgaaatggggcagcatattcattgttatgttgcagctcttgctgctcatacaacttttctggaacaacccaagagctttcgcccttcccagtggataaaagaacacagtgaaagacagcctcttaacagaaatagccttcgtcgccaaaatcttaccagggattgccaccctcggcaagtcaagcacaatggctgggttgttcatcagccctgcccgcgtcagtacaattactaatagtttcaagttttgttggttggtttctcttggtttgtgcttacatgtatggatgtgtgtatatgtacagtgaaaatgttgtctctttacaaccaattgataaccaatcacatagttttatcagtgtatttagacactatcttgaaaatcagatttatatgctgtgtatcacataatgccttgcctttaacatttactttttttgtacactttttcagattatttctggaaacatatcaatataattacagtgtttgggggtgtctttaaatatattaggttatacattagtcagcattttaaagacatttcttcccaagtacgagaataggcatctttcattttcattttattttgtattacttaatcttttaagcaagcaaaaatttattctcagggtcagctgtacactttattgaccagtacttgataatctctctgtatatgatgaatacatttttatacactaacattagcattaacaggtgatagttgccatggatataatggaattatggctggactttcttttgaaagaaaacttgatgtattctgtgtgtatggtttttccccagattagtcatacagttcatttggaattcaggtacattaagctttagtgaagagtgcatgcagtaattccaatgtgactgcatgacgtggtacagacattacaggtgttgtagacagaggcacttgtctcgtgcagagggattaaattagacctgtgagattatatttggaaaaattcatgtctgtaactaacccattagtgcagtatttaatttgttactattccttcccgccaattctgtccactcctcacctcgcatcagctataaatttggaagtacttgtccaggcactcaagtgacttcatatttctctctgcccatgggaaaagagataggctttatatttccacagagtgaaaaatcctctgtcatggagcctgtcctgccaagtggcaagagtgtggggactgtctggtgatgatgtctttcatggcatctgagtgaagagtgacaggttggctcaacttttttctttttttttttttaattgccttgtattgtaagtattcttccctgcagtccaagtgacttttcattttttgttttaacttcaggcaaaatctttaaccactctggcctctgtttcccccaccaacggggagcagtgacatttacctccctcacagagtcactgtgaggattctatactgatttgaagtggagctgttcagaactgaaccttgtaggaaattccaagggcctttctactgaatctggtgatggggtggggccgtggcactttctctgccacagctgttcttcacagtgttggtgctaatgaggccagggtgcagggttcgattcacacgtaggccagttaacttagagaaaatctatttccttacctctagccagtcacttcctttttccgcagttgtgatgggttttgctgagccatccactctgactgatttcctctgaagtaaacatatttacaatccaaagcaattctactgacagaagtgttgccttcataatcaaacagcttgtttttccatctcctctgcaaccctaattaaatgagtacaggtctacaaaatgttttcaaggagcttgatgcagggaaccctgggggactttcagcgaagagctgtgctcttttctgactagattagagcgtttggagtggaagacgtcaaatgtgtagtgagatggaggttttacattgttcttctactggctgtgatgaagtgccagaatgtctctttagaacaagagttagattccccctttctccttattgccccttccgttttgacttcccctttatttatttgttgtctaattaggggccaagtctgtaaagttttgtcaaagtgagttagaagttgttttctcttactatttgtgtttaccagagttgggagataagatagtttccatgaaggtgtgtatgttttatacgatgtttgttatagggccatgcattggtaacttgaaaatagaccagcttaatgtcttcaggatgtaaaactctgaatacacggcgtctctttttcatacattgcatgtaagttgttagtacctcacaagctacagaagttcagccatgagattttgtttggcaacatgaacagatttgtgtataactgcaatggcctttttttccagatttccttattgactttttgtttgccttacctggggctagttttttatgctttgtacctagaaaacaaaaaattacattcgttgggctttttttcaaggttgggattaccacaccacctggaatatcatactgtggtttctgcctaaaattggcacatgtaagtattgaagaaaatggttatataattcagttgaaactcttggttattagatgttaggcatctcctgtatgtaagacacaaggccaaccacaacacagaacgatgttgacctgttaagtattctctgaaacatggccaaaatgcattttatgagcttttttttttttgctattgtaaatattagtggtttacaatgcgctttagacatatttctttaaaatgcaagcagtgagaaataagacctctctgaattagtagctctaaactgttaacatagaatgttacttggaaaaagtctggaatatgtggtgtacacaagcagtgcttcgtgaatgagtttcttagcttttatagtgcgccatgtttctcaaagtttgtttttgttgacaaaacattttataatatatatcttatgtttattttttttctcaactaattgtgtactgcactgtaaggtgaaaattagccatccattatttatcttctgtggcaatgcatttatatggttgattgggtggggaattttttgcagaaagatgcaaagtgattgggttttcgacttcctatcgcagggagcttttaagaaatattaatttcctatacatttttccaatccccatgcaaactgttcctgtttacataccttctctgttgtatcagtactttgagtgagaagacagtttatttaaaacttgagcaggctgttcagcattgtttctgcttctgaaatctgtatagtacactggtttgtaatcattatgtcttcattgaaatccttgctacttctcttcctcctcaatgaaatacattatatattatctttatgtactcttaagaaaaacgagcaaggaagagtatcttcattattctcattttctctgagttggaaacaaaaacatgaaggactccaactagaagacagatatttacatttaaatagattagtgggaaaactttaagagtttccacatattagttttcattttttgagtcaagagactgctccttgtactgggagacactagtagtatatgtttgtaatgttactttaaaattatctttttattttataaggcccataaatactggttaaactctgttaaaagtgggccttctatcttggatggtttcactgccatcagccatgctgatatattagaaatggcatccctatctacttactttaatgcttaaaattatacataaaatgctttatttagaaaacctacatgatacagtggtgtcagccttgccatgtatcagtttcacttgaaatttgagaccaattaaatttcaactgtttagggtggagaaagaggtactggaaaacatgcagatgaggatatcttttatgtgcaacagtatcctttgcatgggaggagagttactcttgaaaggcaggcagcttaagtggacaatgttttgtatatagttgagaattttacgacacttttaaaaattgtgtaattgttaaatgtccagttttgctctgttttgcctgaagttttagtatttgttttctaggtggacctctgaaaaccaaaccagtacctggggaggttagatgtgtgtttcaggcttggagtgtatgagtggttttgcttgtattttcctccagagattttgaactttaataattgcgtgtgtgtttttttttttttaagtggctttgtttttttttctcaagtaaaattgtgaacatatttcctttataggggcagggcatgagttagggagactgaagagtattgtagactgtacatgtgccttcttaatgtgtttctcgacacattttttttcagtaacttgaaaattcaaaagggacatttggttaggttactgtacatcaatctatgcataaatggcagcttgttttcttgagccactgtctaaattttgtttttatagaaattttttatactgattggttcatagatggtcagttttgtacacagactgaacaatacagcactttgccaaaaatgagtgtagcattgtttaaacattgtgtgttaacacctgttctttgtaattgggttgtggtgcattttgcactacctggagttacagttttcaatctgtcagtaaataaagtgtcctttaacttca

SEQ ID NO: 342535 - DNA, 1111 bp, Homo sapiens
caacaacaaaaggacttggactggccggcctgggcgcacgacccgagggctggagtcggccccgcgcctgccgtctgggtacctgaacgaggtgcagcgcagcccggccccaccgcagctacctcagcagtcccgccccgcccgcgtccttccccgccgagccggcccgctcccttccccgcgcagccccgcacggcccgggcccacgtacaatgactcttcttgcttttcacctaagttgaataagcaccctgtgcactttaatctcctgtcggtaccattgggccaactaaagacaaggttttgaaatctcagctataaaagacatccagccaaactctcagtcttgccttaacaatgttccagaggctgaataaaatgtttgtgggtgaagtcagttcttcctccaaccaagaaccagaattcaatgagaaagaagatgatgaatggattcttgttgacttcatagatacttgcactggtttctcagcagaagaagaagaagaagaggaggacatcagtgaagagtcacctactgagcacccttcagtcttttcctgtttaccggcatctcttgagtgcttggctgatacaagtgattcctgctttctccagtttgagtcatgtccaatggaggagagctggtttatcaccccacccccatgttttactgcaggtggattaaccactatcaaggtggaaacaagtcctatggaaaaccttctcattgaacatcccagcatgtctgtctatgctgtgcataactcctgccctggtctcagtgaggccacccgtgggactgatgaattacatagcccaagtagtcccaggtacgttacaagtatttaactctctgtaggcagtccactgagcatgcattttgtctctactgtaattcaaagctaagttattagaagatgcaaaactaattttgttagagatttatgaaagcatgtgcatagtacacaagatggtccgtaagataacttgttgaccagtcacagtgtctcacacctgtaatcccagcactttgggaggccaaggcaggcagatcacttaagctcaggagttcaagaccaccctgggcaacatggtgaaaccccgtctgtac

SEQ ID NO: 342536 - DNA, 1560 bp, Homo sapiens
gcccagttccaaggctccggcatcctgtgtctcactgagcactgctgcccgatggccatccccaagcactccctgagcccagtgccgtgggaagaggacagcttccttcaagtgaaggtggaggaggaagaggaagccagcctctcccagggcggagaatccagccatgaccacattgctcactctgaggctgcacgcctgcgcttccggcacttccgctatgaggaggcatctggtccacacgaggccctggcccacctccgagcgctgtgctgtcagtggctgcagcccgaggcgcactccaaggagcagatactggagctgctggtgctggagcagttcctgggtgcgctgcccccagagatccaagcctgggtgggagcccagagtcccaagagcggagaggaagccgctgtgctggtggaggatctgactcaggtgctggacaagagaggatgggatccaggagccgagcccacagaggcaagctgcaagcagagtgacctgggagagtcagagccatcaaatgtcactgagaccctcatgggaggtgtttcccttggacccgcctttgtcaaggcatgtgaacctgagggcagctcagagaggtctggactatcaggggagatctggacaaagtctgtcacccaacagatccacttcaagaaaacttcagggccttacaaggatgtccccacagaccagcgtggccgtgaatctggtgcctcgaggaacagttctagtgcgtggccaaacctcacctcccaagagaagcctccttcagaagacaaatttgatctggtggatgcttatgggacagagcctccatacacctactcagggaagaggtcctccaagtgtcgcgagtgtaggaagatgttccagagtgcttcggcgctcgaggcacaccagaagacccattctcggaagaccccatatgcctgcagcgagtgtgggaaagccttcagccggagcactcacctcgcccagcaccaggttgtccacacaggggcgaagccccatgagtgtaaggaatgtgggaaggccttcagccgagtcacccacctgactcagcaccaaaggattcatactggagagaaaccctacaaatgtggggaatgtggtaaaaccttcagccgcagcactcacctcacccagcaccagcgggtgcacacgggggagcggccctacgagtgtgacgcgtgtgggaaagccttcagccagagcacgcacctgactcaacaccagcgcatccacaccggggagaagccctacaagtgtgacgcgtgtggccgagccttcagcgactgctcagccctgatccgacatctgagaatccactctggagagaagccatatcagtgtaaggttgtccgaaggcctttgcacagagctcctccctcattgagcaccagaggatccacacgggagagaagccttataagtgcagcgactgtgggaaggccttcagtcgtagctcagccctgatggttcacttgcggatccacatcacggtgctgcaatgaccggaagtcgcccctgggggcgtagcacagcgtc

SEQ ID NO: 342537 - DNA, 421 bp, Homo sapiens
tctaaaacagaatatgcttatatactgtgaagaattgtattcaccactgtctttgataaattagtgtcagagagcagttatatgaaagttaaatacaatttcatcattatcattaatttttataaataaattctgaaaaccttcttgctcttgaaagcaccaggagtctttgcataattagagaactatcacattttgccacttttattgtctagtaataaatggttttgttagataaatgatataatattctttcataattcaagagactatcaagtgaagggcagttgacttctgctagacatttaaatagtttgcatccaacactctgctgttaaaatagtgaatagattgtattaagcttgagactgccaagtagtgcaggcgatcttggtaatgttaggacttcacgttcaaggaa

SEQ ID NO: 342538 - DNA, 236 bp, Homo sapiens
cagcagtcattactacacaacagggtcaaaagtcctagatcagaatcatcaatctactgctctccataccaagttttataaattataaatctattttatcatctgaaaaaaaagaaaatacccaacctttcaaacaatggttgtaagcattaaaaagacaataaattccccaataaattctgaagcattaactattttatcaatattctagacttggaggtatatagaactcacct

SEQ ID NO: 342539 - DNA, 659 bp, Homo sapiens
aaagtaaaagacaagccaaatatttgtaaatcatatatctgacacgggtcttctatctagtacatataaataactattacaactcactaataagaagaaaaatagctcaattttgaagtacttaaacagacatttctccaaagaagacataccaatgacctaagaagaacatgaaatgttcaacatcattggccattaggcaaatgtaaatcgaaatcacaataagataccacttaacatccagtatgatggctaaaaacaaaaagtcagatgagttttaaggagtgtgtggaaaaactgaaatgctcatagactgatagtgggatgtataatggtgcagccactttggaaaccagtagggaggttcctcaaaaaattaaacacggagtagtaaccatatgctccaacaattctgttccttgatatatttgtaagaaaagtgaaaatatatatctatacaaaacttatatatattcatatccttgtttctaatagtcaaaagacagaaacaatccaaacgtccatcagctgatgaatggataaacaaaaggtgatgtatgcatacaacattcagccataaaaagaaatgaaatactgatacacacaacacaaatgatccttaaaaacattatgctaagtgaaagaaaccagtcacaaaa

SEQ ID NO: 342540 - DNA, 211 bp, Homo sapiens
tcctaatccttctaccatttctttctctttttcttttttgtttgagatggagtctcgctcccattcccattgcacaggctggagtgcagtcgcgctatcttggctcactgcaacctccatctcctgggttcaagcgattcttcttcctcagcctcccgagtagctgggattacagacgtgcgccaccacatctagctaatttttgtatttt

SEQ ID NO: 342541 - DNA, 1446 bp, Homo sapiens
cggtttccatttcagtttgtcttagagtttccatgtctctgcctacagtgggcatcagtttttgaatgtcgtgtagttttttccattaaagcccttagcacattaattatagttactaaattctcacagtgatgattccaaaatctctgccatatatgagtctggttttgatgcccgcgttgtcttttcagactctgttttttgcctttagcatgccttgtaattttttttttttttttgataagctggatgtgacataaggggtaaaaagaactgagataaacaggcctttagtgtggcctagaggcctatctggctaggagttaggctgtgtttactgtttgatgtagctttggtgtcagagattaaaatttcctctcgtgtaactgcttttgtctcctttgttgtctttgggtttccctaataactccttcataagtaggttccgaggcttgtagttatttaagctgtaagtccctgttattacacaggagccctattgatgtggtgtgtgtgtgtgtaaaagtgttctataatcttatgattagctcttagtgagcctgtgtctttggactgtgaccttcatgagtgctttttagctcctgcaacctttacctcccaatacttaagtgagaaagtaggaaggctgggaggcggctggagttttgtatttctcttcccacaagttggttagttggtggataacaaactggaatgtgaaacctcggatgaggggaggctactgtagtttcttttgaggacaggtctttgttattgagaacagagatcgctgggcaatttcagaatggttattttttctctcctattggaagctagagggaatttttctttgatcttcacttgtgaatctctgatggggcacctggaggtaaaactcaggaaagtttcctctgtctctcccccagccagactgcccatcccctgagcttttaattctcaagctagtccacgttgaacctccagcaatttacattacagtgttcctatggatactggctccagctgtttgtttctcttgctggggtttgtgatacccgtagctgtggttttctgtagtcacatctctctccagttttgggagcagcagtttgccctgaacctcaattctctattgggtctaagaagagttaactgattttcggccgggcacggtggctcacgccagtaatcccagcgctttgggaggccgaggtgggcggatcaccaggtcaggagatccagaatatcctggctaacatggtgaggcactgtctctactaaaaatacaaaaaaattagctgggcgtggtggcgggcacctgtattcccagctgcttgggagacagagccaggagaatggcgtgaacctgggaggcggagcttgcagtgagccgagatcctgccactgcattcctgcctgggcgacaaagccagactccgtcccagg

SEQ ID NO: 342542 - DNA, 319 bp, Homo sapiens
cactgcaccccagcctgagttacggagcaagaccctgtcatttgttgttgttttctctctcttcttagataaaatttctgtttgtgacacaaacagccattagagagaaatgattagctattatacttctcagtggtggttagcaatggtctataattattcatttctattaggagccattagccattaattccatgtattagaattttgagagcagcttgaccacattgattcctgggtctacatttaaaatagatgtgagagagagagagagacagagagagagagagagagagagagagagagagagagagagaga

SEQ ID NO: 342543 - DNA, 893 bp, Homo sapiens
tcctgagagcgagggaagcaggggatgtgacctgccctggtatgttgctgtaatctgcctgggactctggctgttctgtggagaaatcattagagcagcatgggtagacagggaggctagttcggaagctttgttgtagtggacaggatttggacatgatctgcatattctggttagtcttggtgctggatggaatgaagaggggctggaagagggcagcgttcaggatgacccctgagcttctggtttgccttactggtgagatggcaatgccattttcagagctggggagccctggaaaggggccaggtctgtaaggtagaccccaagtccagtggtaaaagctgagacatcccaatgcagatggagaagaaacagctgaaggcacagctccagagcacaaggtgagaaattatggagaccagtccagggctccagggggctcccaaatggaaatatggatccagatgttgacaggcttctggggcatttttaggcgaggggatggctgaggacaaaaaaatcaagcccaaggagcaccaacatttggagattagaaaagagaagaagaatcctctgagagcactgaaaagaaagagccgggaggtgtctcagcagaaagacagggtggtcagcagtgggtgtgtgcagagaggtcaggaggaccagggcaatccctgaactactccagtgtgcacctgcacaacctccatggtgcctctggaattgggtagcatggtggccctgctgatgagcaccccaaggggccattgggggacctctgagaatctctgccagagcagtttgggtgggagtcgattaaggaaagaagcagcaagatccaggacttttaatcttaaaagagagagaaatgctggcagatgaacattctg

SEQ ID NO: 342544 - DNA, 311 bp, Homo sapiens
cacttgctgcttccagacaaggttataacaggatgtgtccaagggctgggtttaatggtgagtctgctgattacaaaatgatgttatgtaacactttccattgcttttcagacatccattcattcattcactcattcattcaacaaatacggtctgtgttgagtacttaatagtctgctagcttcagttcttggaactagaaaaacagtagtgaatggaaaatctccttgctccttggggcttacatactagaaagaaagagcaatcctaaatgaataaattacagaaagagagagagagagagagagaga

SEQ ID NO: 342545 - DNA, 446 bp, Homo sapiens
aagcctctgttctagcgtttgtatgccacaaactatctgtgtgacctagagtcttcatctgtcgtcatctttagaatcacttgtcttgtagctctgactcagtgactcagtttattctggtcttattttttaaaaacttatttctactatggccttaaagtcagtttcttgaaaataagccaatgcagtcaccagataggatgaactgggaagtgttgtgaaataagccaccttctgtggcttcagttatttgcttggctatatgttctttctttactctggtagagttacattagattttctacccacaccaggttaggactagataattttttaatttagagacagatttaaacctatcactgaattagcatttattgaatactaatggtattgttaaggaatttagatttgatatggcacttcaagaagccagtgtggaaaga

SEQ ID NO: 342546 - DNA, 352 bp, Homo sapiens
catatcacagctgtgagccaaaataaacctttcttctttataaattatccagtctcaagtattctgttatagcaacagaaaatggactaagacaaaattggtactgagagagtggagttgttgctataacaatacttgaaaatgtagaagcagcttgaaagtgaataatagattgtagagggaagaatttgcaggagcaggctagaaaaagcctgtattgccatgaacagagcgttaagggtaattctggtgaagacaccaagaaatccctaggactaggggaatctggaacttctttgagattacataagtggtcatgagcagaatattgatagaaatatgcgacagtaaa

SEQ ID NO: 342547 - DNA, 419 bp, Homo sapiens
aaccttccttaccacccatacctaagcaatcacgaagtctcaccgaatctaactcacaaatagctcttgaatttaaactctcctccctattacctattatctgttttacatactggctttcatatataattccttttgagagtaggggtacgaagctaattttttttaaagtttgaaagccactgagataaaagataaagcttaagcaccttcacatggtgctttaatggactcgcctcatttcccaccacacctgtctccccgcacgtggtatttcctgcttcccactttgcttgggccacctagttctcccagaacacactgcaacccatctgcttccatcatctgaatatatctactcatccttgaatgtcacctcctccaagaagccagtcctaatcacctcaagctgagacagg

SEQ ID NO: 342548 - DNA, 356 bp, Homo sapiens
atatgcccaaatgttagtccaggcttttctggcccatttttctgtgtatctattcctgtcctggtgctccactgttttattaccatattttatacaaagtcttgttatctggtatattaattctcacaccaccatacccttcttcaaaattgttgtggccattcttggccatttactcatcatatgaattttcagatgagcctatcgggtctcctaaaaaattgtgttgggagctagattgaatttatgttttaatgccagaagttacatctttataatattgtgcctcctaatcttgaacatggtatatcatttcctttacattgggcttcaataaaactttacattattcttta

SEQ ID NO: 342549 - DNA, 717 bp, Homo sapiens
ggtatccacaaaaagcctatagtagcttaactaatgataaaggaacaaattgctttgctccgaagatgctaaggcaaagatatactcttgccaatttcattttgtttgagtttttgttgttttgtttgtttttgttttgttttgttttttaagacagagtctcactctgtcactcaggcaggttggagtgcagcagctcaatcacggctcactgtaacctcaatctcctgggctcaggagatcctcccacctcagccttccaagtagctgggactacacacatgcactgctagtgcgcccagctaatttttttatattttgtagaggcagagtcttcttacccaggctggtcttgaactcctggcttcgagtgatcctctagcctcagtcccagagttctgtgtaatagtgtctagaaaaagactcacatatgctgtccattctcattattcatggtattatgttttacagagtcatactgaattagcaaatactgaacctagggaaaatgcaaagttaagttgctgtgagccttcgatcacacatcagccaatcagtatataaccttgttgtatgtgtgtttctgtttaaagacaccttatttaacatatattgttgattcactaacactgaactcacagctaacagcactataacccatgcccaaatgaagcatatctgatgcacttatttcctccataagggacatcacaactt

SEQ ID NO: 342550 - DNA, 837 bp, Homo sapiens
acagcttaggccagagtggtggcagtgagttattgagaaaagatatatttcgaaggtagagtcagcaggatttcttgatggactggatatgggaggggagagaagagttaaggatgacacatgaatgattgaggttggaagtgcctgagtttagagtttgggagtagtttggccctcattgtcttatgccccagctttagggggtggccaggggcagaaccagaataatgagtggactagtcatatcttgtaaatgtttgtgaagccataaatttcttctttaagttcaagaggagctagtcaacaaagggaaagtttggacttatcagaagtgtctgaagtagagtctaattatggtgccactgaagaggatttaataacatctgcatcaaaaacagaagagaccttgtcaaaaaagagagagtaccagtcttcctcctgtgtctcctccacatcctcttcctattcttcctcttctgaatccagattttctgaatctattggtcgtttggactgggagactcttgtgcacgaaaatctgcccgggctaatggaaatggatcaggatgaccgtgtttggcccagagactcactcttccgatattttgagttgctagaaaagcttcagtataacctagaggaacgtaagaagttacaagagtttgcagtgcaggcactgatgaacttggaagacaagtaaagcaatggatggcttcaatatccttgggcccagcaaaagataatgaagggaattgttggaaatagagaattgaaaatataaacattcagatagaacaatgtctgttcattaaaattaaaaagtataagtgtctaggc

SEQ ID NO: 342551 - DNA, 555 bp, Homo sapiens
gcttcttaatttcccctgtacttcttcttcacttcgggtaagtgtggctgtggccctctttgctcgttgtaaaaagtggtttcttactgatgcaccctttccctccttgcttcctgttacctctttccaccccacctttccacccacaccataggatttaccagctcttacccaacttttacaaatctagacgtgcttttctgaagcattcctccctgcaggtcgtttggactgggagactcttgtgcacgaaaatctgcccgggctaatggaaatggatcaggatgaccgtgtttggcccagagactcactcttccgatattttgagttgctagaaaagcttcagtataacctagaggaacgtaagaagttacaagagtttgcagtgcaggcactgatgaacttggaagacaagtaaagcaatggatggcttcaatatccttgggcccagcaaaagataatgaagggaattgttggaaatagagaattgaaaatataaacattcagatagaacaatgtctgttcattaaaattaaaaagtataagtgtctaggc

SEQ ID NO: 342552 - DNA, 567 bp, Homo sapiens
ccacccgcctcagcctccaaaagtgttgggattacaggtgtgagccatcgtgcccagctgcagatgggttgtagttttaaacagggtagtcacggtgacctcattgaaaaggtaatgtgagcaaagactcgaaggaggtaaggggattaccatgtggatatctgtaagaagattgttaataggcagatgaaacggtgcaaagctccgaagctggaagcatgcttggtttgtttgagaaacagcagaggccattgtgactggagtagagtgagcagggggaagagtgctgggaaatgatgaccgtgtttggcccagagactcactcttccgatattttgagttgctagaaaagcttcagtataacctagaggaacgtaagaagttacaagagtttgcagtgcaggcactgatgaacttggaagacaagtaaagcaatggatggcttcaatatccttgggcccagcaaaagataatgaagggaattgttggaaatagagaattgaaaatataaacattcagatagaacaatgtctgttcattaaaattaaaaagtataagtgtctaggc

SEQ ID NO: 342553 - DNA, 350 bp, Homo sapiens
ccacccgcctcagcctccaaaagtgttgggattacaggtgtgagccatcgtgcccagctgcagatgggttgtagttttaaacagggtagtcacggtgacctcattgaaaaggtaatgtgagcaaagactcgaaggaggtaaggggattaccatgtggatatctgtaagaagattgttaataggcagatgaaacggtgcaaagctccgaagctggaagcatgcttggtttgtttgagaaacagcagaggccattgtgactggagtagagtgagcagggggaagagtgctgggaaatcgggcggagcgcaacaccgggcggagcgcaacaccgggcgggagcacaccgggcg

SEQ ID NO: 342554 - DNA, 3201 bp, Homo sapiens
gttcaggctgaggagctggggcgagcttttcgctgcatgtaccctggaggacagggtgactatgctggcttccctggttgtgggctgcttcgtctccatagcactttccgccacgatctcaagatctatgcctctgatgagggtcgtgttcagatgactgctgctgccttcgccaagggccttctggctctagaaggggagctgacacccattttggtgcaaatggtgaagagtgccaacatgaatgggctactggacagcgatggggattccttgagcagctgccagcaccgggtgaaggctcggctgcaccatattctacagcaggatgcgccctttggccctgaggactacgatcagctggctcccaccagaagtacttccctgctcaactccatgactatcatccagaatcctgtgaaggtctgtgatcaggtatttgccctgatcgaaaacctcacccaccagatccgggaacgaatgcaggaccccaggtctgtagacctgcagctctaccacagtgagacactagagctaatgctacagcgttggagcaagctggagcgtgactttcgacagaagagtgggcgctatgatatcagtaagatccctgacatctatgactgtgtcaagtatgatgtgcagcacaatgggagtctgggacttcaaggcacagcagagttgctccgtctctctaaggcactggctgatgtggtcattccccaggagtacgggatcagtcgggaggagaaactggaaattgctgtgggcttctgtcttccactgttgcggaagatactacttgacctgcagagaacccacgaggatgagtctgtcaacaagctgcatcccctgtactcccgaggcgtgctctccccaggtcgccacgttcgaacgcgtctctatttcaccagtgagagccatgtccactccctgctcagtgtcttccgttatggaggacttcttgatgagacccaggatgcacaatggcagcgagctttggattatcttagtgccatctcagagcttaactacatgacccagattgtcatcatgctttatgaggacaacacacaggatcccttatcagaggaacggttccatgtggagctacacttcagccccggagtgaaaggtgttgaggaagaaggcagtgccccggctggctgtggattccgtccagcctcttctgagaatgaggagatgaaaaccaaccaaggcagtatggagaacctgtgtccaggaaaggcatcagatgaaccagaccgggcattgcagacttcaccccagcctcctgagggccctggcctcccgaggagatcacccctcattcgtaaccgaaaagctggttccatggaggtactttctgagacttcatcctcgaggcctggtggctaccggctcttttcatcttcacggccacccacagaaatgaagcagagtggcctaggctcacagtgcacagggctgttcagcaccacagtgctgggtggctcctccagtgccccgaatcttcaggactacgcccgcagccatggcaaaaagctaccacctgccagtctgaagcaccgagatggtactcttttcgtttggacagaggtatctgccggtactgagatgtaagtgatcagctgaagggagaaactgtacaccatgtgacggacaaattgcctgcctcaagaaagcacttaggaccattctgcagccactcagtgaccttggctagaaaccaatggctgtgcggcgtgagagacatggccgcttaccaacaagaagagcagatgcagcttccccgagctgatgccattcgttcacgtctcatcgatactttctctctcattgagcatttgcaaggcttgagccaagctgtgccgcggcacactatcagggagttacttgatccttcccgccagaagaaacttgtattgggagatcaacaccagctagtgcgtttctctataaagcctcagcgtatagaacagatttcacatgcccagaggctgttgagcaggcttcatgtgcgctgcagtcagaggccacctctttctttgtgggccggatgggtccttgagtgtcctctcttcaaaaacttcatcatcttcctggtctttttgaatacgatcatattgatggttgaaatagaattgctggaatccacaaataccaaactatggccattgaagctgaccttggaggtggcagcttggtttatcttgcttattttcatcctggagatccttcttaagtggctatccaacttttctgttttctggaagagtgcctggaatgtctttgactttgttgttaccatgttggtaaggatagagatcctgagggttcgtttagtgggatgaagaatgtgcctaggtgaatcgaaagaacaagttaacatgataataggaagaaacaaaaatttacttaacttctttcttttgattttttttccctaaaactaaacatcaatcattgcaggagttgttggtattaggagcaaagtagactaactacaacatcaatgccaacaagagcatctgccggttactgagcacttactaagtgccaagcattattttaagtgttttccttacattatctcatttatgctccacaacaacccaattaaataaccatgaattttatccccctttttatatctgaacaagtttaagtatagtgtttaagcaacttaatatagaaaggctgaatagtaagcacttctcagagaatgctattcaagggataacgcccagggaacaatgaagaggataagatgaagaagctgcaattctgcctgggtgccttggggtgtattttacttataacctgtgtgttttccacagtccctgcttcccgaggttgtggtattggtaggggtaacaggccaatcggtgtggcttcagcttctgaggatctgccgggtgctgaggtctctcaaactccttgcacaattccgtcaaattcaaattattattttggtcctggtcagggccctcaaggtgatttgactgttgcaagctaaagcagggggcaaggtagataaatgtgagggcttaacatagaatatgaaacaaattggccgggtgcggtggctcacgcctgtaatcccagcactttgggaagccgagggggatgggtcatgaggtcaggagttcgagaccagcctgaccaacatggtgaaaccctgtctctactaaaaatacc

SEQ ID NO: 342555 - DNA, 3177 bp, Homo sapiens
gttcaggctgaggagctggggcgagcttttcgctgcatgtaccctggaggacagggtgactatgctggcttccctggttgtgggctgcttcgtctccatagcactttccgccacgatctcaagatctatgcctctgatgagggtcgtgttcagatgactgctgctgccttcgccaagggccttctggctctagaaggggagctgacacccattttggtgcaaatggtgaagagtgccaacatgaatgggctactggacagcgatggggattccttgagcagctgccagcaccgggtgaaggctcggctgcaccatattctacagcaggatgcgccctttggccctgaggactacgatcagctggctcccaccagaagtacttccctgctcaactccatgactatcatccagaatcctgtgaaggtctgtgatcaggtatttgccctgatcgaaaacctcacccaccagatccgggaacgaatgcaggaccccaggtctgtagacctgcagctctaccacagtgagacactagagctaatgctacagcgttggagcaagctggagcgtgactttcgacagaagagtgggcgctatgatatcagtaagatccctgacatctatgactgtgtcaagtatgatgtgcagcacaatgggagtctgggacttcaaggcacagcagagttgctccgtctctctaaggcactggctgatgtggtcattccccaggagtacgggatcagtcgggaggagaaactggaaattgctgtgggcttctgtcttccactgttgcggaagatactacttgacctgcagagaacccacgaggatgagtactcccgaggcgtgctctccccaggtcgccacgttcgaacgcgtctctatttcaccagtgagagccatgtccactccctgctcagtgtcttccgttatggaggacttcttgatgagacccaggatgcacaatggcagcgagctttggattatcttagtgccatctcagagcttaactacatgacccagattgtcatcatgctttatgaggacaacacacaggatcccttatcagaggaacggttccatgtggagctacacttcagccccggagtgaaaggtgttgaggaagaaggcagtgccccggctggctgtggattccgtccagcctcttctgagaatgaggagatgaaaaccaaccaaggcagtatggagaacctgtgtccaggaaaggcatcagatgaaccagaccgggcattgcagacttcaccccagcctcctgagggccctggcctcccgaggagatcacccctcattcgtaaccgaaaagctggttccatggaggtactttctgagacttcatcctcgaggcctggtggctaccggctcttttcatcttcacggccacccacagaaatgaagcagagtggcctaggctcacagtgcacagggctgttcagcaccacagtgctgggtggctcctccagtgccccgaatcttcaggactacgcccgcagccatggcaaaaagctaccacctgccagtctgaagcaccgagatggtactcttttcgtttggacagaggtatctgccggtactgagatgtaagtgatcagctgaagggagaaactgtacaccatgtgacggacaaattgcctgcctcaagaaagcacttaggaccattctgcagccactcagtgaccttggctagaaaccaatggctgtgcggcgtgagagacatggccgcttaccaacaagaagagcagatgcagcttccccgagctgatgccattcgttcacgtctcatcgatactttctctctcattgagcatttgcaaggcttgagccaagctgtgccgcggcacactatcagggagttacttgatccttcccgccagaagaaacttgtattgggagatcaacaccagctagtgcgtttctctataaagcctcagcgtatagaacagatttcacatgcccagaggctgttgagcaggcttcatgtgcgctgcagtcagaggccacctctttctttgtgggccggatgggtccttgagtgtcctctcttcaaaaacttcatcatcttcctggtctttttgaatacgatcatattgatggttgaaatagaattgctggaatccacaaataccaaactatggccattgaagctgaccttggaggtggcagcttggtttatcttgcttattttcatcctggagatccttcttaagtggctatccaacttttctgttttctggaagagtgcctggaatgtctttgactttgttgttaccatgttggtaaggatagagatcctgagggttcgtttagtgggatgaagaatgtgcctaggtgaatcgaaagaacaagttaacatgataataggaagaaacaaaaatttacttaacttctttcttttgattttttttccctaaaactaaacatcaatcattgcaggagttgttggtattaggagcaaagtagactaactacaacatcaatgccaacaagagcatctgccggttactgagcacttactaagtgccaagcattattttaagtgttttccttacattatctcatttatgctccacaacaacccaattaaataaccatgaattttatccccctttttatatctgaacaagtttaagtatagtgtttaagcaacttaatatagaaaggctgaatagtaagcacttctcagagaatgctattcaagggataacgcccagggaacaatgaagaggataagatgaagaagctgcaattctgcctgggtgccttggggtgtattttacttataacctgtgtgttttccacagtccctgcttcccgaggttgtggtattggtaggggtaacaggccaatcggtgtggcttcagcttctgaggatctgccgggtgctgaggtctctcaaactccttgcacaattccgtcaaattcaaattattattttggtcctggtcagggccctcaaggtgatttgactgttgcaagctaaagcagggggcaaggtagataaatgtgagggcttaacatagaatatgaaacaaattggccgggtgcggtggctcacgcctgtaatcccagcactttgggaagccgagggggatgggtcatgaggtcaggagttcgagaccagcctgaccaacatggtgaaaccctgtctctactaaaaatacc

SEQ ID NO: 342556 - DNA, 3075 bp, Homo sapiens
gttcaggctgaggagctggggcgagcttttcgctgcatgtaccctggaggacagggtgactatgctggcttccctggttgtgggctgcttcgtctccatagcactttccgccacgatctcaagatctatgcctctgatgagggtcgtgttcagatgactgctgctgccttcgccaagggccttctggctctagaaggggagctgacacccattttggtgcaaatggtgaagagtgccaacatgaatgggctactggacagcgatggggattccttgagcagctgccagcaccgggtgaaggctcggctgcaccatattctacagcaggatgcgccctttggccctgaggactacgatcagctggctcccaccagaagtacttccctgctcaactccatgactatcatccagaatcctgtgaaggtctgtgatcaggtatttgccctgatcgaaaacctcacccaccagatccgggaacgaatgcaggaccccaggtctgtagacctgcagctctaccacagtgagacactagagctaatgctacagcgttggagcaagctggagcgtgactttcgacagaagagtgggcgctatgatatcagtaagatccctgacatctatgactgtgtcaagtatgatgtgcagcacaatgggagtctgggacttcaaggcacagcagagttgctccgtctctctaaggcactggctgatgtggtcattccccaggagtacgggatcagtcgggaggagaaactggaaattgctgtgggcttctgtcttccactgttgcggaagatactacttgacctgcagagaacccacgaggatgagtctgtcaacaagctgcatcccctgtactcccgaggcgtgctctccccaggtcgccacgttcgaacgcgtctctatttcaccagtgagagccatgtccactccctgctcagtgtcttccgttatggaggacttcttgatgagacccaggatgcacaatggcagcgagctttggattatcttagtgccatctcagagcttaactacatgacccagattgtcatcatgctttatgaggacaacacacaggatcccttatcagaggaacggttccatgtggagctacacttcagccccggagtgaaaggtgttgaggaagaaggcagtgccccggctggctgtggattccgtccagcctcttctgagaatgaggagatgaaaaccaaccaaggcagtatggagaacctgtgtccaggaaaggcatcagatgaaccagaccgggcattgcagacttcaccccagcctcctgagggccctggcctcccgaggagatcacccctcattcgtaaccgaaaagctggttccatggaggtactttctgagacttcatcctcgaggcctggtggctaccggctcttttcatcttcacggccacccacagaaatgaagcagagtggcctaggtactcttttcgtttggacagaggtatctgccggtactgagatgtaagtgatcagctgaagggagaaactgtacaccatgtgacggacaaattgcctgcctcaagaaagcacttaggaccattctgcagccactcagtgaccttggctagaaaccaatggctgtgcggcgtgagagacatggccgcttaccaacaagaagagcagatgcagcttccccgagctgatgccattcgttcacgtctcatcgatactttctctctcattgagcatttgcaaggcttgagccaagctgtgccgcggcacactatcagggagttacttgatccttcccgccagaagaaacttgtattgggagatcaacaccagctagtgcgtttctctataaagcctcagcgtatagaacagatttcacatgcccagaggctgttgagcaggcttcatgtgcgctgcagtcagaggccacctctttctttgtgggccggatgggtccttgagtgtcctctcttcaaaaacttcatcatcttcctggtctttttgaatacgatcatattgatggttgaaatagaattgctggaatccacaaataccaaactatggccattgaagctgaccttggaggtggcagcttggtttatcttgcttattttcatcctggagatccttcttaagtggctatccaacttttctgttttctggaagagtgcctggaatgtctttgactttgttgttaccatgttggtaaggatagagatcctgagggttcgtttagtgggatgaagaatgtgcctaggtgaatcgaaagaacaagttaacatgataataggaagaaacaaaaatttacttaacttctttcttttgattttttttccctaaaactaaacatcaatcattgcaggagttgttggtattaggagcaaagtagactaactacaacatcaatgccaacaagagcatctgccggttactgagcacttactaagtgccaagcattattttaagtgttttccttacattatctcatttatgctccacaacaacccaattaaataaccatgaattttatccccctttttatatctgaacaagtttaagtatagtgtttaagcaacttaatatagaaaggctgaatagtaagcacttctcagagaatgctattcaagggataacgcccagggaacaatgaagaggataagatgaagaagctgcaattctgcctgggtgccttggggtgtattttacttataacctgtgtgttttccacagtccctgcttcccgaggttgtggtattggtaggggtaacaggccaatcggtgtggcttcagcttctgaggatctgccgggtgctgaggtctctcaaactccttgcacaattccgtcaaattcaaattattattttggtcctggtcagggccctcaaggtgatttgactgttgcaagctaaagcagggggcaaggtagataaatgtgagggcttaacatagaatatgaaacaaattggccgggtgcggtggctcacgcctgtaatcccagcactttgggaagccgagggggatgggtcatgaggtcaggagttcgagaccagcctgaccaacatggtgaaaccctgtctctactaaaaatacc

SEQ ID NO: 342557 - DNA, 2812 bp, Homo sapiens
gttcaggctgaggagctggggcgagcttttcgctgcatgtaccctggaggacagggtgactatgctggcttccctggttgtgggctgcttcgtctccatagcactttccgccacgatctcaagatctatgcctctgatgagggtcgtgttcagatgactgctgctgccttcgccaagggccttctggctctagaaggggagctgacacccattttggtgcaaatggtgaagagtgccaacatgaatgggctactggacagcgatggggattccttgagcagctgccagcaccgggtgaaggctcggctgcaccatattctacagcaggatgcgccctttggccctgaggactacgatcagctggctcccaccagaagtacttccctgctcaactccatgactatcatccagaatcctgtgaaggtctgtgatcaggtatttgccctgatcgaaaacctcacccaccagatccgggaacgaatgcaggaccccaggtctgtagacctgcagctctaccacagtgagacactagagctaatgctacagcgttggagcaagctggagcgtgactttcgacagaagagtgggcgctatgatatcagtaagatccctgacatctatgactgtgtcaagtatgatgtgcagcacaatgggagtctgggacttcaaggcacagcagagttgctccgtctctctaaggcactggctgatgtggtcattccccaggagtacgggatcagtcgggaggagaaactggaaattgctgtgggcttctgtcttccactgttgcggaagatactacttgacctgcagagaacccacgaggatgagtctgtcaacaagctgcatcccctgtactcccgaggcgtgctctccccaggtcgccacgttcgaacgcgtctctatttcaccagtgagagccatgtccactccctgctcagtgtcttccgttatggaggacttcttgatgagacccaggatgcacaatggcagcgagctttggattatcttagtgccatctcagagcttaactacatgacccagattgtcatcatgctttatgaggacaacacacaggatcccttatcagaggaacggttccatgtggagctacacttcagccccggagtgaaaggtgttgaggaagaaggcagtgccccggctggctgtggattccgtccagcctcttctgagaatgaggagatgaaaaccaaccaaggcagtatggagaacctgtgtccaggaaaggcatcagatgaaccagaccgggcattgcagacttcaccccagcctcctgagggccctggcctcccgaggagatcacccctcattcgtaaccgaaaagctggttccatggaggtactttctgagacttcatcctcgaggcctggtggctaccggctcttttcatcttcacggccacccacagaaatgaagcagagtggcctaggctcacagtgcacagggctgttcagcaccacagtgctgggtggctcctccagtgccccgaatcttcaggactacgcccgcagccatggcaaaaagctaccacctgccagtctgaagcaccgagatggtactcttttcgtttggacagaggtatctgccggtactgagatgtaagtgatcagctgaagggagaaactgtacaccatgtgacggacaaattgcctgcctcaagaaagcacttaggaccattctgcagccactcagtgaccttggctagaaaccaatggctgtgcggcgtgagagacatggccgcttaccaacaagaagagcagatgcagcttccccgagctgatgccattcgttcacgtctcatcgatactttctctctcattgagcatttgcaaggcttgagccaagctgtgccgcggcacactatcagggagttacttgatccttcccgccagaagaaacttgtattgggagatcaacaccagctagtgcgtttctctataaagcctcagcgtatagaacagatttcacatgcccagaggctgttgagcaggcttcatgtgcgctgcagtcagaggccacctctttctttgtgggccggatgggtccttgagtgtcctctcttcaaaaacttcatcatcttcctggtctttttgaatacgatcatattgatggttgaaatagaattgctggaatccacaaataccaaactatggccattgaagctgaccttggaggtggcagcttggtttatcttgcttattttcatcctggagatccttcttaagtggctatccaacttttctgttttctggaagagtgcctggaatgtctttgactttgttgttaccatgttgtccctgcttcccgaggttgtggtattggtaggggtaacaggccaatcggtgtggcttcagcttctgaggatctgccgggtgctgaggtctctcaaactccttgcacaattccgtcaaattcaaattattattttggtcctggtcagggccctcaagagcatgaccttcctcttgatgttgctgctcatcttcttctacatttttgctgtgactggtgtctacgtcttctcagagtacacccgttcacctcgtcaggacctggagtaccatgtgttcttctcgtaagcagagctggggacagctgggtgaggggagaaaatttggctaagagaccaggaagcttgtccaaagtatagtaatataaaaagtgcagtctattccaagaaactgaaatagaacacaatagggagagtctccgtcgaactggtccacacacattttacatctgattcattttatgttttatcattttatatctagagagtctccgtcgaact

SEQ ID NO: 342558 - DNA, 1973 bp, Homo sapiens
gttcaggctgaggagctggggcgagcttttcgctgcatgtaccctggaggacagggtgactatgctggcttccctggttgtgggctgcttcgtctccatagcactttccgccacgatctcaagatctatgcctctgatgagggtcgtgttcagatgactgctgctgccttcgccaagggccttctggctctagaaggggagctgacacccattttggtgcaaatggtgaagagtgccaacatgaatgggctactggacagcgatggggattccttgagcagctgccagcaccgggtgaaggctcggctgcaccatattctacagcaggatgcgccctttggccctgaggactacgatcagctggctcccaccagaagtacttccctgctcaactccatgactatcatccagaatcctgtgaaggtctgtgatcaggtatttgccctgatcgaaaacctcacccaccagatccgggaacgaatgcaggaccccaggtctgtagacctgcagctctaccacagtgagacactagagctaatgctacagcgttggagcaagctggagcgtgactttcgacagaagagtgggcgctatgatatcagtaagatccctgacatctatgactgtgtcaagtatgatgtgcagcacaatgggagtctgggacttcaaggcacagcagagttgctccgtctctctaaggcactggctgatgtggtcattccccaggagtacgggatcagtcgggaggagaaactggaaattgctgtgggcttctgtcttccactgttgcggaagatactacttgacctgcagagaacccacgaggatgagtctgtcaacaagctgcatcccctgtactcccgaggcgtgctctccccaggtcgccacgttcgaacgcgtctctatttcaccagtgagagccatgtccactccctgctcagtgtcttccgttatggaggacttcttgatgagacccaggatgcacaatggcagcgagctttggattatcttagtgccatctcagagcttaactacatgacccagattgtcatcatgctttatgaggacaacacacaggatcccttatcagaggaacggttccatgtggagctacacttcagccccggagtgaaaggtgttgaggaagaaggcagtgccccggctggctgtggattccgtccagcctcttctgagaatgaggagatgaaaaccaaccaaggcagtatggagaacctgtgtccaggaaaggcatcagatgaaccagaccgggcattgcagacttcaccccagcctcctgagggccctggcctcccgaggagatcacccctcattcgtaaccgaaaagctggttccatggaggtactttctgagacttcatcctcgaggcctggtggctaccggctcttttcatcttcacggccacccacagaaatgaagcagagtggcctaggctcacagtgcacagggctgttcagcaccacagtgctgggtggctcctccagtgccccgaatcttcaggactacgcccgcagccatggcaaaaagctaccacctgccagtctgaagcaccgagatgagctcttgtttgtcccggccgtaaaacgattttctgtgtcgtttgcaaagcatccgactaacggtcgtttggactgggagactcttgtgcacgaaaatctgcccgggctaatggaaatggatcaggatgaccgtgtttggcccagagactcactcttccgatattttgagttgctagaaaagcttcagtataacctagaggaacgtaagaagttacaagagtttgcagtgcaggcactgatgaacttggaagacaagtaaagcaatggatggcttcaatatccttgggcccagcaaaagataatgaagggaattgttggaaatagagaattgaaaatataaacattcagatagaacaatgtctgttcattaaaattaaaaagtataagtgtctaggc

SEQ ID NO: 342559 - DNA, 1990 bp, Homo sapiens
gttcaggctgaggagctggggcgagcttttcgctgcatgtaccctggaggacagggtgactatgctggcttccctggttgtgggctgcttcgtctccatagcactttccgccacgatctcaagatctatgcctctgatgagggtcgtgttcagatgactgctgctgccttcgccaagggccttctggctctagaaggggagctgacacccattttggtgcaaatggtgaagagtgccaacatgaatgggctactggacagcgatggggattccttgagcagctgccagcaccgggtgaaggctcggctgcaccatattctacagcaggatgcgccctttggccctgaggactacgatcagctggctcccaccagaagtacttccctgctcaactccatgactatcatccagaatcctgtgaaggtctgtgatcaggtatttgccctgatcgaaaacctcacccaccagatccgggaacgaatgcaggaccccaggtctgtagacctgcagctctaccacagtgagacactagagctaatgctacagcgttggagcaagctggagcgtgactttcgacagaagagtgggcgctatgatatcagtaagatccctgacatctatgactgtgtcaagtatgatgtgcagcacaatgggagtctgggacttcaaggcacagcagagttgctccgtctctctaaggcactggctgatgtggtcattccccaggagtacgggatcagtcgggaggagaaactggaaattgctgtgggcttctgtcttccactgttgcggaagatactacttgacctgcagagaacccacgaggatgagtctgtcaacaagctgcatcccctgtactcccgaggcgtgctctccccaggtcgccacgttcgaacgcgtctctatttcaccagtgagagccatgtccactccctgctcagtgtcttccgttatggaggacttcttgatgagacccaggatgcacaatggcagcgagctttggattatcttagtgccatctcagagcttaactacatgacccagattgtcatcatgctttatgaggacaacacacaggatcccttatcagaggaacggttccatgtggagctacacttcagccccggagtgaaaggtgttgaggaagaaggcagtgccccggctggctgtggattccgtccagcctcttctgagaatgaggagatgaaaaccaaccaaggcagtatggagaacctgtgtccaggaaaggcatcagatgaaccagaccgggcattgcagacttcaccccagcctcctgagggccctggcctcccgaggagatcacccctcattcgtaaccgaaaagctggttccatggaggtactttctgagacttcatcctcgaggcctggtggctaccggctcttttcatcttcacggccacccacagaaatgaagcagagtggcctaggctcacagtgcacagggctgttcagcaccacagtgctgggtggctcctccagtgccccgaatcttcaggactacgcccgcagccatggcaaaaagctaccacctgccagtctgaagcaccgagatggtactcttttcgtttggacagaggtatctgccggtactgagatgtaagtgatcagctgaagggagaaactgtacaccatgtgacggacaaattgcctgcctcaagaaagcacttaggaccattctgcagccactcagtgaccttggctagaaaccaatggctgtgcggcgtgaggtaagatgaaaggaaataccctagggatccaggacttctgcatttggtgaaacgtccgcttccactacaaggctttgggatgtctagtctgtagactggagtaacattaatactgactcatgcagaaacaatatagctacatattgaactgggggaaggggtggcaaaaccctctgcaaataggaagtgccacaagagcaccgagataaggatgaggccctgcgtgagcgcagccttcgg

SEQ ID NO: 342560 - DNA, 1670 bp, Homo sapiens
agcgttgctccgcatggtcctgggctgtgggtaggggctagggccgggtcccggggtgagccgaaacctgggggtcgagcggggcggggaatggggcgcagtgaggctgggagccggccctgagctcgtcttgcataggggtagccaggctcggggcacctgagctggaggcggaagcgtgaaataaggactgagtgggcaaagagaacctgggctgagagacatggccgcttaccaacaagaagagcagatgcagcttccccgagctgatgccattcgttcacgtctcatcgatactttctctctcattgagcatttgcaaggcttgagccaagctgtgccgcggcacactatcagggagttacttgatccttcccgccagaagaaacttgtattgggagatcaacaccagctagtgcgtttctctataaagcctcagcgtatagaacagatttcacatgcccagaggctgttgagcaggcttcatgtgcgctgcagtcagaggccacctctttctttgtgggccggatgggtccttgagtgtcctctcttcaaaaacttcatcatcttcctggtctttttgaatacgatcatattgatggttgaaatagaattgctggaatccacaaataccaaactatggccattgaagctgaccttggaggtggcagcttggtttatcttgcttattttcatcctggagatccttcttaagtggctatccaacttttctgttttctggaagagtgcctggaatgtctttgactttgttgttaccatgttggtaaggatagagatcctgagggttcgtttagtgggatgaagaatgtgcctaggtgaatcgaaagaacaagttaacatgataataggaagaaacaaaaatttacttaacttctttcttttgattttttttccctaaaactaaacatcaatcattgcaggagttgttggtattaggagcaaagtagactaactacaacatcaatgccaacaagagcatctgccggttactgagcacttactaagtgccaagcattattttaagtgttttccttacattatctcatttatgctccacaacaacccaattaaataaccatgaattttatccccctttttatatctgaacaagtttaagtatagtgtttaagcaacttaatatagaaaggctgaatagtaagcacttctcagagaatgctattcaagggataacgcccagggaacaatgaagaggataagatgaagaagctgcaattctgcctgggtgccttggggtgtattttacttataacctgtgtgttttccacagtccctgcttcccgaggttgtggtattggtaggggtaacaggccaatcggtgtggcttcagcttctgaggatctgccgggtgctgaggtctctcaaactccttgcacaattccgtcaaattcaaattattattttggtcctggtcagggccctcaaggtgatttgactgttgcaagctaaagcagggggcaaggtagataaatgtgagggcttaacatagaatatgaaacaaattggccgggtgcggtggctcacgcctgtaatcccagcactttgggaagccgagggggatgggtcatgaggtcaggagttcgagaccagcctgaccaacatggtgaaaccctgtctctactaaaaatacc

SEQ ID NO: 342561 - DNA, 801 bp, Homo sapiens
gcctgaagtcagtcgcatcttcagcagcatctatttcatcctttggttgttgcttggctccattatctttcgaagtatcatagtagccatgatggttactaactttcagaatatcaggaaagagctgaatgaggagatggcgcgtcgggaggttcagctcaaagctgacatgttcaagcggcagatcatccagaggagaaaaaacatgtcacatgaagcactgacgtcaagccatagcaaaatagaggacagaagaggagctagtcaacaaagggaaagtttggacttatcagaagtgtctgaagtagagtctaattatggtgccactgaagaggatttaataacatctgcatcaaaaacagaagagaccttgtcaaaaaagagagagtaccagtcttcctcctgtgtctcctccacatcctcttcctattcttcctcttctgaatccagattttctgaatctattggtcgtttggactgggagactcttgtgcacgaaaatctgcccgggctaatggaaatggatcaggatgaccgtgtttggcccagagactcactcttccgatattttgagttgctagaaaagcttcagtataacctagaggaacgtaagaagttacaagagtttgcagtgcaggcactgatgaacttggaagacaagtaaagcaatggatggcttcaatatccttgggcccagcaaaagataatgaagggaattgttggaaatagagaattgaaaatataaacattcagatagaacaatgtctgttcattaaaattaaaaagtataagtgtctaggc

SEQ ID NO: 342562 - DNA, 665 bp, Homo sapiens
gcctgaagtcagtcgcatcttcagcagcatctatttcatcctttggttgttgcttggctccattatctttcgaagtatcatagtagccatgatggttactaactttcagaatatcaggaaagagctgaatgaggagatggcgcgtcgggaggttcagctcaaagctgacatgttcaagcggcagatcatccagaggagaaaaaacatgtcacatgaagcactgacgtcaagccatagcaaaatagaggacagatcctaagttaaggatcttgagatgagatcatcctagattatccaggtaggtcctaaatccaatggcaagggtccttataaaagatgaaagaggagaagacacagagaataggagaaggcgatgtgaagacggagatagaggttggggctaatgccaccgcaagccaagggaagctgaggaatgccaggcagctgccagaaggtagaagaggcaaggaacttctcccctaaagcctccagagggaatatggccctgccaacaccttcatttcagactctagcctctagaattgtgacggaatatatttctgtcattttaagctaccaagtttatagtaatttgttatggcagccacaggacactaatacaaataccttccatgaaacagatatgattctagaccccaagtgtt

SEQ ID NO: 342563 - DNA, 586 bp, Homo sapiens
ttgcttggctttgtagggacaggaatccaggacctgagttttatactttggggttgaggtggcaaaatgattaatatagagtcctttttctgcaggtactttctgagacttcatcctcgaggcctggtggctaccggctcttttcatcttcacggccacccacagaaatgaagcagagtggcctaggtatggttttgccagcatttctcacctattgttggaaaagttgtctgtctgttcttcagagttttattgtgggaaacctttgtcatgggatttgggaccgtccaatcagtggaatatcatcaggtggaggtagggaggatgaagtgggagaagccatagttagatgtgaacttggatctcagatgattattccatcccaggaaggtgtttatctcttggttttctataccaaccacatttccctggccaaagggcgtttttctggctttccctctcattccttatctgtccctccagtctagcccagaccttaaggggccatggagactctgaaccttcagagttatcaaagacagagctataaatagaggtacttgcaaccctcataaatgtcgtattc

SEQ ID NO: 342564 - DNA, 266 bp, Homo sapiens
atgcagcttccccgagctgatgccattcgttcacgtctcatcgatactttctctctcattgagcatttgcaaggcttgagccaagctgtgccgcggcacactatcagggagttacttggtcagcagcctatttcttcactaatttaaatttaagactcctatccacatcctctacatttaagagtggaaaattctggggaggtttagttgctggtttaccaaacttgataaatcaagggcttgtaaataaaactgaagagatagaa

SEQ ID NO: 342565 - DNA, 423 bp, Homo sapiens
gaactccactctgtacatttccttaagagacaacaggtcctctcttcaaaaacttcatcatcttcctggtctttttgaatacgatcatattgatggttgaaataggtgagaactgaccttgtatgaaagaggaagtgaggccgggcacgccggctcacacgtgtaatcctagcactttgggaggccggggcgtgtggattgccggagctcaggagttggagaccagcctgggcaacatggtgaaaccctgtctctactaaaaaatacaaaaaattagccgggcttggtagcacgcgcttgtagtcccagctacttgggaggctgaggcaggagaatcgcttaaacccaggaggcgtaggtttcagtgagccgagattgtgccactgcatttcagcctgggcgacagagtacaactctgtctca

SEQ ID NO: 342566 - DNA, 415 bp, Homo sapiens
gtgagcttgactgggctgttggtggagatcagcctagtttggcccacatctgacatgagagttatggcctctagagcatgaccttcctcttgatgttgctgctcatcttcttctacatttttgctgtgactggtgtctacgtcttctcagagtacacccgttcacctcgtcaggacctggagtaccatgtgttcttctcgtaagcagagctggggacagctgggtgaggggagaaaatttggctaagagaccaggaagcttgtccaaagtatagtaatataaaaagtgcagtctattccaagaaactgaaatagaacacaatagggagagtctccgtcgaactggtccacacacattttacatctgattcattttatgttttatcattttatatctagagagtctccgtcgaact

SEQ ID NO: 342567 - DNA, 3300 bp, Homo sapiens
tcattgactgttactgtcctacaagcctgagtcagaacccagttttgaggcagcatttctactctaggctcaggctagcatcttgtttagaggaagaagataatgttatctgtgatctctactcatgaaaacattctgtggagattttgagggattttggttcaatctttattctccagtattttccatgtgtattctagagccctcaagaaaagaacttaggtctgttttattttctctggactcttaaaatcaatccctcttagacgactatatgctagagcagtgcccttacctgaaggcctagaactgctagtatgcccagtaacctaagaatgctcactggagtgaaccaacatacagagctgtattgtgagtagtctctgtgtaataaactcacaggaatctgggcaattagtgccgagcctgtcttgcttttcttctctctattcttcatagctggctcccaccagaagtacttccctgctcaactccatgactatcatccagaatcctgtgaaggtctgtgatcaggtatttgccctgatcgaaaacctcacccaccagatccgggaacgaatgcaggaccccaggtctgtagacctgcagctctaccacagtgagacactagagctaatgctacagcgttggagcaagctggagcgtgactttcgacagaagagtgggcgctatgatatcagtaagatccctgacatctatgactgtgtcaagtatgatgtgcagcacaatgggagtctgggacttcaaggcacagcagagttgctccgtctctctaaggcactggctgatgtggtcattccccaggagtacgggatcagtcgggaggagaaactggaaattgctgtgggcttctgtcttccactgttgcggaagatactacttgacctgcagagaacccacgaggatgagtctgtcaacaagctgcatcccctgtactcccgaggcgtgctctccccaggtcgccacgttcgaacgcgtctctatttcaccagtgagagccatgtccactccctgctcagtgtcttccgttatggaggacttcttgatgagacccaggatgcacaatggcagcgagctttggattatcttagtgccatctcagagcttaactacatgacccagattgtcatcatgctttatgaggacaacacacaggatcccttatcagaggaacggttccatgtggagctacacttcagccccggagtgaaaggtgttgaggaagaaggcagtgccccggctggctgtggattccgtccagcctcttctgagaatgaggagatgaaaaccaaccaaggcagtatggagaacctgtgtccaggaaaggcatcagatgaaccagaccgggcattgcagacttcaccccagcctcctgagggccctggcctcccgaggagatcacccctcattcgtaaccgaaaagctggttccatggaggtactttctgagacttcatcctcgaggcctggtggctaccggctcttttcatcttcacggccacccacagaaatgaagcagagtggcctaggctcacagtgcacagggctgttcagcaccacagtgctgggtggctcctccagtgccccgaatcttcaggactacgcccgcagccatggcaaaaagctaccacctgccagtctgaagcaccgagatggtactcttttcgtttggacagaggtatctgccggtactgagatgtaagtgatcagctgaagggagaaactgtacaccatgtgacggacaaattgcctgcctcaagaaagcacttaggaccattctgcagccactcagtgaccttggctagaaaccaatggctgtgcggcgtgagagacatggccgcttaccaacaagaagagcagatgcagcttccccgagctgatgccattcgttcacgtctcatcgatactttctctctcattgagcatttgcaaggcttgagccaagctgtgccgcggcacactatcagggagttacttgatccttcccgccagaagaaacttgtattgggagatcaacaccagctagtgcgtttctctataaagcctcagcgtatagaacagatttcacatgcccagaggctgttgagcaggcttcatgtgcgctgcagtcagaggccacctctttctttgtgggccggatgggtccttgagtgtcctctcttcaaaaacttcatcatcttcctggtctttttgaatacgatcatattgatggttgaaatagaattgctggaatccacaaataccaaactatggccattgaagctgaccttggaggtggcagcttggtttatcttgcttattttcatcctggagatccttcttaagtggctatccaacttttctgttttctggaagagtgcctggaatgtctttgactttgttgttaccatgttggtaaggatagagatcctgagggttcgtttagtgggatgaagaatgtgcctaggtgaatcgaaagaacaagttaacatgataataggaagaaacaaaaatttacttaacttctttcttttgattttttttccctaaaactaaacatcaatcattgcaggagttgttggtattaggagcaaagtagactaactacaacatcaatgccaacaagagcatctgccggttactgagcacttactaagtgccaagcattattttaagtgttttccttacattatctcatttatgctccacaacaacccaattaaataaccatgaattttatccccctttttatatctgaacaagtttaagtatagtgtttaagcaacttaatatagaaaggctgaatagtaagcacttctcagagaatgctattcaagggataacgcccagggaacaatgaagaggataagatgaagaagctgcaattctgcctgggtgccttggggtgtattttacttataacctgtgtgttttccacagtccctgcttcccgaggttgtggtattggtaggggtaacaggccaatcggtgtggcttcagcttctgaggatctgccgggtgctgaggtctctcaaactccttgcacaattccgtcaaattcaaattattattttggtcctggtcagggccctcaaggtgatttgactgttgcaagctaaagcagggggcaaggtagataaatgtgagggcttaacatagaatatgaaacaaattggccgggtgcggtggctcacgcctgtaatcccagcactttgggaagccgagggggatgggtcatgaggtcaggagttcgagaccagcctgaccaacatggtgaaaccctgtctctactaaaaatacc

SEQ ID NO: 342568 - DNA, 2505 bp, Homo sapiens
aggtatttattcctggcctgtggcccctaggagtacgggatcagtcgggaggagaaactggaaattgctgtgggcttctgtcttccactgttgcggaagatactacttgacctgcagagaacccacgaggatgagtctgtcaacaagctgcatcccctgtactcccgaggcgtgctctccccaggtcgccacgttcgaacgcgtctctatttcaccagtgagagccatgtccactccctgctcagtgtcttccgttatggaggacttcttgatgagacccaggatgcacaatggcagcgagctttggattatcttagtgccatctcagagcttaactacatgacccagattgtcatcatgctttatgaggacaacacacaggatcccttatcagaggaacggttccatgtggagctacacttcagccccggagtgaaaggtgttgaggaagaaggcagtgccccggctggctgtggattccgtccagcctcttctgagaatgaggagatgaaaaccaaccaaggcagtatggagaacctgtgtccaggaaaggcatcagatgaaccagaccgggcattgcagacttcaccccagcctcctgagggccctggcctcccgaggagatcacccctcattcgtaaccgaaaagctggttccatggaggtactttctgagacttcatcctcgaggcctggtggctaccggctcttttcatcttcacggccacccacagaaatgaagcagagtggcctaggctcacagtgcacagggctgttcagcaccacagtgctgggtggctcctccagtgccccgaatcttcaggactacgcccgcagccatggcaaaaagctaccacctgccagtctgaagcaccgagatggtactcttttcgtttggacagaggtatctgccggtactgagatgtaagtgatcagctgaagggagaaactgtacaccatgtgacggacaaattgcctgcctcaagaaagcacttaggaccattctgcagccactcagtgaccttggctagaaaccaatggctgtgcggcgtgagagacatggccgcttaccaacaagaagagcagatgcagcttccccgagctgatgccattcgttcacgtctcatcgatactttctctctcattgagcatttgcaaggcttgagccaagctgtgccgcggcacactatcagggagttacttgatccttcccgccagaagaaacttgtattgggagatcaacaccagctagtgcgtttctctataaagcctcagcgtatagaacagatttcacatgcccagaggctgttgagcaggcttcatgtgcgctgcagtcagaggccacctctttctttgtgggccggatgggtccttgagtgtcctctcttcaaaaacttcatcatcttcctggtctttttgaatacgatcatattgatggttgaaatagaattgctggaatccacaaataccaaactatggccattgaagctgaccttggaggtggcagcttggtttatcttgcttattttcatcctggagatccttcttaagtggctatccaacttttctgttttctggaagagtgcctggaatgtctttgactttgttgttaccatgttggtaaggatagagatcctgagggttcgtttagtgggatgaagaatgtgcctaggtgaatcgaaagaacaagttaacatgataataggaagaaacaaaaatttacttaacttctttcttttgattttttttccctaaaactaaacatcaatcattgcaggagttgttggtattaggagcaaagtagactaactacaacatcaatgccaacaagagcatctgccggttactgagcacttactaagtgccaagcattattttaagtgttttccttacattatctcatttatgctccacaacaacccaattaaataaccatgaattttatccccctttttatatctgaacaagtttaagtatagtgtttaagcaacttaatatagaaaggctgaatagtaagcacttctcagagaatgctattcaagggataacgcccagggaacaatgaagaggataagatgaagaagctgcaattctgcctgggtgccttggggtgtattttacttataacctgtgtgttttccacagtccctgcttcccgaggttgtggtattggtaggggtaacaggccaatcggtgtggcttcagcttctgaggatctgccgggtgctgaggtctctcaaactccttgcacaattccgtcaaattcaaattattattttggtcctggtcagggccctcaaggtgatttgactgttgcaagctaaagcagggggcaaggtagataaatgtgagggcttaacatagaatatgaaacaaattggccgggtgcggtggctcacgcctgtaatcccagcactttgggaagccgagggggatgggtcatgaggtcaggagttcgagaccagcctgaccaacatggtgaaaccctgtctctactaaaaatacc

SEQ ID NO: 342569 - DNA, 1639 bp, Homo sapiens
gttcaggctgaggagctggggcgagcttttcgctgcatgtaccctggaggacagggtgactatgctggcttccctggttgtgggctgcttcgtctccatagcactttccgccacgatctcaagatctatgcctctgatgagggtcgtgttcagatgactgctgctgccttcgccaagggccttctggctctagaaggggagctgacacccattttggtgcaaatggtgaagagtgccaacatgaatgggctactggacagcgatggggattccttgagcagctgccagcaccgggtgaaggctcggctgcaccatattctacagcaggatgcgccctttggccctgaggactacgatcagctggctcccaccagaagtacttccctgctcaactccatgactatcatccagaatcctgtgaaggtctgtgatcaggtatttgccctgatcgaaaacctcacccaccagatccgggaacgaatgcaggaccccaggtctgtagacctgcagctctaccacagtgagacactagagctaatgctacagcgttggagcaagctggagcgtgactttcgacagaagagtgggcgctatgatatcagtaagatccctgacatctatgactgtgtcaagtatgatgtgcagcacaatgggagtctgggacttcaaggcacagcagagttgctccgtctctctaaggcactggctgatgtggtcattccccaggagtacgggatcagtcgggaggagaaactggaaattgctgtgggcttctgtcttccactgttgcggaagatactacttgacctgcagagaacccacgaggatgagtctgtcaacaagctgcatcccctgtactcccgaggcgtgctctccccaggtcgccacgttcgaacgcgtctctatttcaccagtgagagccatgtccactccctgctcagtgtcttccgttatggaggacttcttgatgagacccaggatgcacaatggcagcgagctttggattatcttagtgccatctcagagcttaactacatgacccagattgtcatcatgctttatgaggacaacacacaggatcccttatcagaggaacggttccatgtggagctacacttcagccccggagtgaaaggtgttgaggaagaaggcagtgccccggctggctgtggattccgtccagcctcttctgagaatgaggagatgaaaaccaaccaaggcagtatggagaacctgtgtccaggaaaggcatcagatgaaccagaccgggcattgcagacttcaccccagcctcctgagggccctggcctcccgaggagatcacccctcattcgtaaccgaaaagctggttccatggaggtactttctgagacttcatcctcgaggcctggtggctaccggctcttttcatcttcacggccacccacagaaatgaagcagagtggcctaggctcacagtgcacagggctgttcagcaccacagtgctgggtggctcctccagtgccccgaatcttcaggactacgcccgcagccatggcaaaaagctaccacctgccagtctgaagcaccgagatgggtttgaagggtgttccatggtgcctaccatctaccctctggaaacactgcataatgcccttt

SEQ ID NO: 342570 - DNA, 1702 bp, Homo sapiens
gttcaggctgaggagctggggcgagcttttcgctgcatgtaccctggaggacagggtgactatgctggcttccctggttgtgggctgcttcgtctccatagcactttccgccacgatctcaagatctatgcctctgatgagggtcgtgttcagatgactgctgctgccttcgccaagggccttctggctctagaaggggagctgacacccattttggtgcaaatggtgaagagtgccaacatgaatgggctactggacagcgatggggattccttgagcagctgccagcaccgggtgaaggctcggctgcaccatattctacagcaggatgcgccctttggccctgaggactacgatcagctggctcccaccagaagtacttccctgctcaactccatgactatcatccagaatcctgtgaaggtctgtgatcaggtatttgccctgatcgaaaacctcacccaccagatccgggaacgaatgcaggaccccaggtctgtagacctgcagctctaccacagtgagacactagagctaatgctacagcgttggagcaagctggagcgtgactttcgacagaagagtgggcgctatgatatcagtaagatccctgacatctatgactgtgtcaagtatgatgtgcagcacaatgggagtctgggacttcaaggcacagcagagttgctccgtctctctaaggcactggctgatgtggtcattccccaggagtacgggatcagtcgggaggagaaactggaaattgctgtgggcttctgtcttccactgttgcggaagatactacttgacctgcagagaacccacgaggatgagtctgtcaacaagctgcatcccctgtactcccgaggcgtgctctccccaggtcgccacgttcgaacgcgtctctatttcaccagtgagagccatgtccactccctgctcagtgtcttccgttatggaggacttcttgatgagacccaggatgcacaatggcagcgagctttggattatcttagtgccatctcagagcttaactacatgacccagattgtcatcatgctttatgaggacaacacacaggatcccttatcagaggaacggttccatgtggagctacacttcagccccggagtgaaaggtgttgaggaagaaggcagtgccccggctggctgtggattccgtccagcctcttctgagaatgaggagatgaaaaccaaccaaggcagtatggagaacctgtgtccaggaaaggcatcagatgaaccagaccgggcattgcagacttcaccccagcctcctgagggccctggcctcccgaggagatcacccctcattcgtaaccgaaaagctggttccatggaggtactttctgagacttcatcctcgaggcctggtggctaccggctcttttcatcttcacggccacccacagaaatgaagcagagtggcctaggctcacagtgcacagggctgttcagcaccacagtgctgggtggctcctccagtgccccgaatcttcaggactacgcccgcagccatggcaaaaagctaccacctgccagtctgaagcaccgagatgagctcttgtttgtcccggccgtaaaacgattttctgtgtcgtttgcaaagcatccgactaacgggtttgaagggtgttccatggtgcctaccatctaccctctggaaacactgcataatgcccttt

SEQ ID NO: 342571 - DNA, 1287 bp, Homo sapiens
gttcaggctgaggagctggggcgagcttttcgctgcatgtaccctggaggacagggtgactatgctggcttccctggttgtgggctgcttcgtctccatagcactttccgccacgatctcaagatctatgcctctgatgagggtcgtgttcagatgactgctgctgccttcgccaagggccttctggctctagaaggggagctgacacccattttggtgcaaatggtgaagagtgccaacatgaatgggctactggacagcgatggggattccttgagcagctgccagcaccgggtgaaggctcggctgcaccatattctacagcaggatgcgccctttggccctgaggactacgatcagctggctcccaccagaagtacttccctgctcaactccatgactatcatccagaatcctgtgaaggtctgtgatcaggtatttgccctgatcgaaaacctcacccaccagatccgggaacgaatgcaggaccccaggtctgtagacctgcagctctaccacagtgagacactagagctaatgctacagcgttggagcaagctggagcgtgactttcgacagaagagtgggcgctatgatatcagtaagatccctgacatctatgactgtgtcaagtatgatgtgcagcacaatgggagtctgggacttcaaggcacagcagagttgctccgtctctctaaggcactggctgatgtggtcattccccaggagtacgggatcagtcgggaggagaaactggaaattgctgtgggcttctgtcttccactgttgcggaagatactacttgacctgcagagaacccacgaggatgagtctgtcaacaagctgcatcccctgtactcccgaggcgtgctctccccaggtcgccacgttcgaacgcgtctctatttcaccagtgagagccatgtccactccctgctcagtgtcttccgttatggaggacttcttgatgagacccaggatgcacaatggcagcgagctttggattatcttagtgccatctcagagcttaactacatgacccagattgtcatcatgctttatgaggacaacacacaggatcccttatcagaggaacggttccatgtggagctacacttcagccccggagtgaaaggtgttgaggaagaaggcagtgccccggctggctgtggattccgtccagcctcttctgagatgaccgagaagaataaagaggcgagatcttgctggaaaaagaagcggagttcccccgcatgcaagagaagatggtctatggactgcagggaa

SEQ ID NO: 342572 - DNA, 847 bp, Homo sapiens
gcctgaagtcagtcgcatcttcagcagcatctatttcatcctttggttgttgcttggctccattatctttcgaagtatcatagtagccatgatggttactaactttcagaatatcaggaaagagctgaatgaggagatggcgcgtcgggaggttcagctcaaagctgacatgttcaagcggcagatcatccagaggagaaaaaacatgtcacatgaagcactgacgtcaagccatagcaaaatagaggacagatcctaagttaaggatcttgagatgagatcatcctagattatccagaagaggagctagtcaacaaagggaaagtttggacttatcagaagtgtctgaagtagagtctaattatggtgccactgaagaggatttaataacatctgcatcaaaaacagaagagaccttgtcaaaaaagagagagtaccagtcttcctcctgtgtctcctccacatcctcttcctattcttcctcttctgaatccagattttctgaatctattggtcgtttggactgggagactcttgtgcacgaaaatctgcccgggctaatggaaatggatcaggatgaccgtgtttggcccagagactcactcttccgatattttgagttgctagaaaagcttcagtataacctagaggaacgtaagaagttacaagagtttgcagtgcaggcactgatgaacttggaagacaagtaaagcaatggatggcttcaatatccttgggcccagcaaaagataatgaagggaattgttggaaatagagaattgaaaatataaacattcagatagaacaatgtctgttcattaaaattaaaaagtataagtgtctaggc

SEQ ID NO: 342573 - DNA, 807 bp, Homo sapiens
aggaaaaggaagcaaagcagatgaccaatgaaggaatcatagttaggctcatagcagacttcttgtcagcaacaatagatatcagatgacagtacagtaatatcttcaaagtgttgagataaaaaaattgtgaacctggaattttatacccagctaaacaatcattccactggcctttttcagacacagagagtttcctacttactgagttcattaaaagcattattaaaagatgaattatgggggaaattaaggtacaagggcataaaaagcaacagtgaacagagctgttgagtaaaacaatgttagtaaaatgagttgaatattaagtgttaaaagttgtttgtatgttaaaaaaagattacaattaggcaactttaaaaaggtgagtggtgtttaatggataaagttgctaaaattcatctccgatttggaggaatataagaaaaccaaattacttcatgctttattagaaaaaatttaatcaagtttgaatgttaaaaaaaatttaatgacttttccatttacttatctttctcatcatctatttacaaatgaatttttaaaattctttgcccttcctcagactctctcagtaatgaaagtatcttaagctcctttgttatttttattttcttaaattgtaagagtcatccatgtgtttgaaaaaaaatcttacaatgttaaaaaaaaaatgtaagggtaaaatgtaatccttagattctaaagcagtagaggacagggaagggatattattaaaaactctattaaaccaacagaagacatgaaaagaaaaaagatgcagga

SEQ ID NO: 342574 - DNA, 547 bp, Homo sapiens
cgtcgcactgtgtaaggcctattttgatctctgaaatcaggtttgtctaagaaatacagaacttagagtacatcttgagtacttatggcaagtctagcgctattcaaggcactttagatgcacaaactcattgtgttctctcaacagccatgtgagattaagtaatattactttgtttgatagaagaagaaactgagggtctggacaattggtagtaaagggcaaagttaggaactctgaacagatcagacaaagccgtgtacttcaagtgttctcctaatgtctgcaatagaaatgtggatggagaggcttctggtcagctattctggaagctaaaaaaccttgtcaatagaataacattggaaattgtgaccacatagccagacaaagccatgagagaaattcagtcagtcaaggatcagaaatatctggaagagttgattgttctacgagacaatgtgaaagaatatgacattctgccaaattcaaaggtatttagatttagatataaaagacagctacatattctaaaaggttacgagtgcaa

SEQ ID NO: 342575 - DNA, 1074 bp, Homo sapiens
  misc_feature (681)..(681): n is a, c, g, or t
  misc_feature (704)..(704): n is a, c, g, or t
  misc_feature (709)..(709): n is a, c, g, or t
  misc_feature (713)..(713): n is a, c, g, or t
  misc_feature (737)..(737): n is a, c, g, or t
  misc_feature (986)..(986): n is a, c, g, or t
  misc_feature (1065)..(1065): n is a, c, g, or t
ggaatatatctctcacagtgtcctcttctcatgctcaggagacagatgttcctgttttaggattggacagtggattgttgcatgaataggggaatagacttaatgtgtctgtccctgtctgactttgttgcagacattgaaaaaaatcaagaagaagaagaagaccaagacccacaatgccccaggctgagcccggatctgccagaggtggaggaacaggacgtcccacaggactccctggatgaagtttacttgactccttcactcccccatgacctgtctgactgccagcaaccttacaacagcacgttgtactcattggaggatcagctcacctgctttgctctcgatgtagcctgatcttagtgcaacattgctctgcaaacttggaccagggcagagtgagatagcagaggagctgtgccagcgtctacagcgaaaggaaaggatgctgcaggaccttctaagtgatcaaaacaaagaagtggtagaagatgaaatggagattcaaggcctgctttggtctatgcgcaccggggagcaggaaagccaaggttcaatgcagataccttccagagatgatagcacttcatcgactgccaaagaggatgccagcatacccagatgcacattagataagtatcaaatttcatttcattaagggactttgtttccttagtntctatagtatgtcgtatatagtnggcangctnttattgctactaatgacaacagtngaatcttgaagctagactgctactatgtagtaggatgcttgtacattgcaggaccttattctcctacaagtgcggtacatgcgagcatctgcacactgatacttcggtttaagtggctctgatgctctctgacttgaggagggactgttcacttcaccgggttactcaggttttcaagcctcaggaaggggttatttctaaactccgtgtgaaaaccgagaaggggtctttccataccacttttacaangtcccgtcaaatttactaagtcatataaatttaacgcctatccgggggaaattttttttaagggctttgtctctctctngtgtttcct

SEQ ID NO: 342576 - DNA, 274 bp, Homo sapiens
agcatgcctatgaacatcccagcttgctccttttattattaatcacacttattttcagaaggtttgtgtagatgcagatatctgttagctaattatcaatgcactgctagtgactgttacctgcaaaatattctacagtttgagaattaaatgtcttgtgtaaatttaaaaaatgcccctttgaaaggaccaaatgtagtgatttaatctcagaggaggaagattagagatgggggtcataataaactggcctttcaggtgggtattatcattg

SEQ ID NO: 342577 - DNA, 386 bp, Homo sapiens
caatagctcattcactgccttgattccttttgccaacaatttaaccagtgattattcctaacatattatgcaattttctcttggtgctacctgatggaattcctgcacttaaagttctggctgactaaacaagatatgtcaacattttctttcttctctttttgtttggaaaatcaagtacttctttgaatgatgatttctttctttcattactgacatgattgtcagtaaaacaatcatgttagacttcagacctccagggattctttccatgtcctgaaagagaattgtttaattatttaataagaaaaaaatttatattaatgattgtttcctttagtaatttattgctgtgtactgatatttaaataaagagttatatttcc

SEQ ID NO: 342578 - DNA, 261 bp, Homo sapiens
attctcccaacatcagcttcattattttgtttattacactttcagaagagagaatttgacatacatattaccagtagcacactatcaacagtgttggttctttaattactgaatgccatgaggcattctccctagtggctgggctgtcttcctgttgggtacctctttctgtttggaaggatagaaacaacaacatacctgttggtttgttttctgagtagagtcagttcccaacatatataatacatgtcatgtgtaaag

SEQ ID NO: 342579 - DNA, 835 bp, Homo sapiens
ctatagctcttttagaatttgtccagcaggctttctagttttcccacactaagaaacaaaaaaacctgtagaaacaaatacaaataaatacaataggcaaaatacacttttatattatttaaagtttttaaaatggaaaaagaaaagcatttggccctttgagtatagctgaattcggctcagtgaaacgagggtatggctgggtggcacacgcctgccgtcccagctactcaggaggctcaggtgggaggattgattgagcccaggagtttgagaccaacctgggcaacatagggagacccctgtctctaaacaaaaaataaaaaagaaaatgagggtacagaggaatcccattgtatgtttgatgcactgagggcatcttcggaatgtgctaagttgtcttgatacccagtgggggtgttacctgtgtatgtgtgattatccgagggtctctcatgcttgagtgtgataaccttggagagagtttctggatgtctagttgtctgctgtgagagacagagtggacagagggagacagcctttcttgacctggtgaggccaaaataaataaatagataaataaataaagcagagtctttttggttaccgcagcccctagaattaggccccttctgactttgtcattgttcctgcacgtctcaaatctgcagttgaaggccccatccaggagttgatctgaaagggcttcggcctcctgggcctttggatttgatcccatagtccttgaggccctgcctgagtggacctgtctcagaataaatgaggaataaacgaggtatgacctttgaacgtcccccactgtcccccatgatca

SEQ ID NO: 342580 - DNA, 570 bp, Homo sapiens
tatttcatcagtaggttgccatagaacataatagttatataatcaaacagcagaataattttatatgaggtttattgatacagaaatgtttggttcagtgtttgtcttccagttttgcagattttcttttcgattttaaaactggagaatacattaaaaccagaaactttcagcctctataatgccctcaaaactcagcaggttttgaaaatgcctcttccttctcttctcctccccataatcctgcttatttttggcattaagtgagtcaggggttccaaacccaaatacgtttttcaaggctatgtagtcagtgtgaatgagagaagtaaatctgttgggtcctgtgccacactggagtttccaaggctggtctaaatgagttcaacttcagtttttttgtgtttttttagagatggagtcttgctgtgttgcttgagctggtcttgaactcccgggctcaagtgatcttccagccttggcctcccaaggtgctagaattataggcatgagccactgtgctggccaatttttttttttttagcccactgtgctaccagtttgtgatct

SEQ ID NO: 342581 - DNA, 920 bp, Homo sapiens
tcagtggatgacctcagaaaagatacagatatatcattatgtctcatttttattttcaggtgttcagattaaaactattgctttaaattggatattagagctcaagaaatattgagacacgtttgaccacttttgtttccttggttcatttacttgtccacatactgaagactactgtaaaaacagggaaaacatttttaaatgacaacttgttcaaaatctaaactttaaaaactaagctctagaaattcaaggaaaataataagatgacattttgttttgcctcaagccctgaacacatcattggtataatcatttagctaatgtcaaacaacatagtgtctggcaagattttagctagagtcaactatcaactctccacagcttatcactgaaataacaagcttcgtgtgaccatattaaaaattatcagttttacatttgaaaggcccagtgccaacctggaaaaaattgcttgcattgatgagtaataaattctacattttgcatattctcacaactgcatgaattcatttcacaatgttggcaaataatctgaattcttggtggcacgggtcctccgtatgctgagcgccggtcccctgggcccacttttctttctctatactttgtgtctctttcttttctcagtctctcgtcccacccgactggaaacacccacaggtgtggaggggcaggccaccccttcatctggtgcccaacgtgggtgcttttctctaggttgaaggtatgctcgagcatgatcattgaggacaagtcgacgagattcccgagtacgtctacagtcagccttgtgacatttgaagttctacaatgaacccgtcggagatgcaaagaaaagcacctccacggagacagagacaccgcagtcgagcaccatcggctcacaagatgaacag

SEQ ID NO: 342582 - DNA, 182 bp, Homo sapiens
acacttttttcctttagagtttcagcatttttaaagaaaaagagattcccccaatttttattatgtgtttttgagccatttcttcatacatgaaagcaaagttttcaatattaaataaaccattcattccattcaaattttaaaatcattaggcatgttaccctttacgtttaaatgtggta

SEQ ID NO: 342583 - DNA, 275 bp, Homo sapiens
cctgggcaacaagagtgaaactccatctcaaaaaaagaaaaaaaaaagaaagaaagaaaagaaaaaaagaaattctcaatattccaaatactgacgagaatgaagagcaaatagaactttcaggtattgctggtagaaatgtaaaatgataaagcaattttgaaaaacagtttgtcagtttcttataaatataaatatgtactcaacatagaacccaccaatcccactcatatgtatttacccaagtaaattgaaaacatgttcacaaaaaacct

SEQ ID NO: 342584 - DNA, 426 bp, Homo sapiens
tgttagttttggttatcataattgtttatctactacagcctctaggaggacattgtacctagggagattttaaaaaatcaaacttagtatgaggccagaatacgaataattttatcattaattacatttcatttcccctaatgcttcttatgtgtgagagtagtacttgttcttaagtgaccaacatatttaatgtactatgtccatatattaaaagaatagaaactagtcttggcagacactgaaatagttaattggcttttacagccaagatagttttataaaactttgtgaaaattaagaaacgggaagaaaagtatttttctatgcactaatggcatattttattaaccctttaccttaggctataacattttttttttttgcagcattctttcattagataagcagctggaggaaggaggc

SEQ ID NO: 342585 - DNA, 201 bp, Homo sapiens
aaaaggggatggagcgagagaaggtggtgaaagcgctcaagcctccgtgaagttctgaccctgtgaaatgggggaaggcaggagcactggcagtggggaagaagtgtcttactgttcagtgtagatctgacgtccaggctgatgggagacactgagccaacgtggccagctgaggtatctgtcttttaggaatggacctac

SEQ ID NO: 342586 - DNA, 852 bp, Homo sapiens
gtagagatgggggagctctcactatgttgctcaggctggccttgaactcctgggctcaagcaagcctcctgccttggcctcccaaaatgctgagattacaggcaagagcaaccacactcggcctaaagctgatgtttttttccactgtaccacatttttttaggtgctgaaagggaatataagagaagctgtctagagattttacgtcttaattgtccttcctttatgttttttattgaaacctcattgagatataacaggagttattttaaatgtcctgtgattgtcaaaatgttttttacatttaaattttgaagatgcaagatagagaatgaaagaaaaatgccttgagtacaaattacatgtttgtcttctgttctccacaaaaatttaaactttctaggtgcgagcaaaaaagaagaaaagcagtgaagaacgagaaaaagcaacagcaagtatctcttaacgtttttacagacaatagaataggtgttttggtttaatataaaatgagtcatggtaaagcttgattggatttactgggaccaaataagtatttgttgggaaaggtgtggtgtgttcagcagcttcacttaatgggtaggagaaagtcaaaatggttcaggaaaaataaaaaataccctggtagcaagcatgtcctgtttccatttcagtattttactgttagaaatataagctcagggctgggcgctgtgtctcacgcctgtaatcccagcactttgagaggctgaggcaggtggatcatgaggtcaggagctcgagaccatcctggctaacacggtgaaaccccgtctctactaaaaatacaaaaaattagccgggcatggtggc

SEQ ID NO: 342587 - DNA, 467 bp, Homo sapiens
taggcggagtggggaggcggcaagaggacctgcggcaggccctcttcggcagtctctccggcccggtttccctcggcgtgctactgtgcgctcgatccagcaccatggggaagcgggacaatcgggtggcctatatgaacccaatagcaatggcgagatcaaggggtccaatccagtcttcagggccaacaatacaggattatctgaatcgaccaaggcctacctgggaagaagtaaaagagcaactagaaaagaaaaagaaaggctccaaggctttggctgaatttgaagaaaaaatgaatgaggtttgtaaaaagtacctgttaaaaaaatagactaatttggccagttatggtggctcatacctataattccagcactttgggaggccgaaacgggaggccaggagttcatgaccagcctgggcaacaaagtaaggcccccccccgccgcccttgtctccatta

SEQ ID NO: 342588 - DNA, 2439 bp, Homo sapiens
taggcggagtggggaggcggcaagaggacctgcggcaggccctcttcggcagtctctccggcccggtttccctcggcgtgctactgtgcgctcgatccagcaccatggggaagcgggacaatcgggtggtactgccaaaattatgacatgataccaaggaaattagaatgtgatcaatattgttgaaaacaaaaacaaaaacctgagaccagttaaatttaacaaaggcctatatgaacccaatagcaatggcgagatcaaggggtccaatccagtcttcagggccaacaatacaggattatctgaatcgaccaaggcctacctgggaagaagtaaaagagcaactagaaaagaaaaagaaaggctccaaggctttggctgaatttgaagaaaaaatgaatgagaactggaagaaagaactggaaaaacacagggagaaattgttaagtggaagtgagagctcatccaaaaaaagacagagaaagaaaaaagaaaagaagaaatctggtaggtattcatcttcttcttcatcaagctctgattcttccagcagttcttctgattctgaagatgaggataagaaacaaggaaaacggagaaagaaaaagaagaaccgttcacataaatcttctgaaagctccatgtcagaaactgaatcagacagtaaggatagtttaaaaaagaaaaagaagtcaaaagatggaactgagaaagaaaaggatattaaaggactcagcaaaaagagaaagatgtattctgaagataaacctttatcatctgagtccttgtcagaatcagagtatattgaggaggtgcgagcaaaaaagaagaaaagcagtgaagaacgagaaaaagcaacagaaaaaacaaaaaagaaaaagaagcataagaaacacagtaagaagaagaaaaagaaggctgctagttcaagtcctgactcaccataacattaagaaaaatcaggattcccttataaagaaagtgcaatgtctgaggaaatttcaactgtgaaaactacaacatatttactaaaatgcatgaattttcttgtttttggaattattcctggactattcagtagccactcagatgccactgtgtgaaagggccataaatgttgcctgctgcttgaacatctatttttttctcttccagtgcttgataactctgggagataatacactgcagtcgtactagtggttaagatatttgggaataaaattaatacttttgactagaagcgtctaaggataaaccaacagaaattgaatctggatacatctttaagatgtaatcagaaatgaccagatgactctagttagaatttttgaaggagggattacattaatatttcaaaacccttactctgtagataagtgtattttaattttttcccctcgtatacttttatttacctggggaaggagcttttagggttggggggtggtttgctatctctttagctagcagaatagtgtgcctttgatcctcacacatcctgtattatggacacagtagccatgcttcacggggaggtcagagctggctaccagcagtcttgccctttactgagcttagtgtcatctttggatgctgtcatatgctgctttgagtgaaccagagaaacagccatttgcagcatgagaaagccccaaaagctctgggatttacctccactttagtaataatgaatattttttagcattagaatgtgttatgtcatttgaattaattttgactacactttggcttgggagaggaattattttaaatagacattggtactttttgaacttgatagctaaagattctaaaatgcatgttttatactaagttttaaccagtcaggaaaattttatgtaactagtgatagtttatttttttgtatgaattttgtttaggctgcaatgtttagcttttgttaactcctcactcttgctgtcttaagttcattactatgtttaatggcctacttgccaagatatttagcatgtaaaaagcagggttttgattaaaaaaaaaaaacggcttcatattgaagctgagacttacaataacaagttgagtggcaagcctggtatgctgtgtcttattgccagaatcttagtaaatgtaatgttttaaaagtttgttgtctttgtatattaataacaaattatgacaagttaagtttaaataagagttacattattgctctccctgtgtcatattttactaagattttgtgcctcatgtctactgctgaattgtttactaggaatgttaaaaggaattgataattcattttcattttacatttttatataatcaggtaacatgacatacaacttgatgtacaattttgcctgttacaaagggtgtgctaattatagtggtatatgcacagaacatgttggcatgacaacaggctgaataaatagctattttacttaaaaaaag

SEQ ID NO: 342589 - DNA, 2311 bp, Homo sapiens
taggcggagtggggaggcggcaagaggacctgcggcaggccctcttcggcagtctctccggcccggtttccctcggcgtgctactgtgcgctcgatccagcaccatggggaagcgggacaatcgggtggcctatatgaacccaatagcaatggcgagatcaaggggtccaatccagtcttcagggccaacaatacaggattatctgaatcgaccaaggcctacctgggaagaagtaaaagagcaactagaaaagaaaaagaaaggctccaaggctttggctgaatttgaagaaaaaatgaatgagaactggaagaaagaactggaaaaacacagggagaaattgttaagtggaagtgagagctcatccaaaaaaagacagagaaagaaaaaagaaaagaagaaatctggtaggtattcatcttcttcttcatcaagctctgattcttccagcagttcttctgattctgaagatgaggataagaaacaaggaaaacggagaaagaaaaagaagaaccgttcacataaatcttctgaaagctccatgtcagaaactgaatcagacagtaaggatagtttaaaaaagaaaaagaagtcaaaagatggaactgagaaagaaaaggatattaaaggactcagcaaaaagagaaagatgtattctgaagataaacctttatcatctgagtccttgtcagaatcagagtatattgaggaggtgcgagcaaaaaagaagaaaagcagtgaagaacgagaaaaagcaacagaaaaaacaaaaaagaaaaagaagcataagaaacacagtaagaagaagaaaaagaaggctgctagttcaagtcctgactcaccataacattaagaaaaatcaggattcccttataaagaaagtgcaatgtctgaggaaatttcaactgtgaaaactacaacatatttactaaaatgcatgaattttcttgtttttggaattattcctggactattcagtagccactcagatgccactgtgtgaaagggccataaatgttgcctgctgcttgaacatctatttttttctcttccagtgcttgataactctgggagataatacactgcagtcgtactagtggttaagatatttgggaataaaattaatacttttgactagaagcgtctaaggataaaccaacagaaattgaatctggatacatctttaagatgtaatcagaaatgaccagatgactctagttagaatttttgaaggagggattacattaatatttcaaaacccttactctgtagataagtgtattttaattttttcccctcgtatacttttatttacctggggaaggagcttttagggttggggggtggtttgctatctctttagctagcagaatagtgtgcctttgatcctcacacatcctgtattatggacacagtagccatgcttcacggggaggtcagagctggctaccagcagtcttgccctttactgagcttagtgtcatctttggatgctgtcatatgctgctttgagtgaaccagagaaacagccatttgcagcatgagaaagccccaaaagctctgggatttacctccactttagtaataatgaatattttttagcattagaatgtgttatgtcatttgaattaattttgactacactttggcttgggagaggaattattttaaatagacattggtactttttgaacttgatagctaaagattctaaaatgcatgttttatactaagttttaaccagtcaggaaaattttatgtaactagtgatagtttatttttttgtatgaattttgtttaggctgcaatgtttagcttttgttaactcctcactcttgctgtcttaagttcattactatgtttaatggcctacttgccaagatatttagcatgtaaaaagcagggttttgattaaaaaaaaaaaacggcttcatattgaagctgagacttacaataacaagttgagtggcaagcctggtatgctgtgtcttattgccagaatcttagtaaatgtaatgttttaaaagtttgttgtctttgtatattaataacaaattattttaaatagacattgattggtactttttgaacttgatagctaaagattctaaaatgcatattttatactaagttttaaccagtcaggaaaattttatgtaactagtgatagtttatttttttgtatgaattttgtttaggctgcaatgtttagcttttgttaactcctcactcttgctgtcttaagttcattactatgtttaatggcctacttgccaagatatttagcatgtaaaaagcagggttttgatt

SEQ ID NO: 342590 - DNA, 2299 bp, Homo sapiens
taggcggagtggggaggcggcaagaggacctgcggcaggccctcttcggcagtctctccggcccggtttccctcggcgtgctactgtgcgctcgatccagcaccatggggaagcgggacaatcgggtggcctatatgaacccaatagcaatggcgagatcaaggggtccaatccagtcttcagggccaacaatacaggattatctgaatcgaccaaggcctacctgggaagaagtaaaagagcaactagaaaagaaaaagaaaggctccaaggctttggctgaatttgaagaaaaaatgaatgagaactggaagaaagaactggaaaaacacagggagaaattgttaagtggaagtgagagctcatccaaaaaaagacagagaaagaaaaaagaaaagaagaaatctggtaggttcttctgattctgaagatgaggataagaaacaaggaaaacggagaaagaaaaagaagaaccgttcacataaatcttctgaaagctccatgtcagaaactgaatcagacagtaaggatagtttaaaaaagaaaaagaagtcaaaagatggaactgagaaagaaaaggatattaaaggactcagcaaaaagagaaagatgtattctgaagataaacctttatcatctgagtccttgtcagaatcagagtatattgaggaggtgcgagcaaaaaagaagaaaagcagtgaagaacgagaaaaagcaacagaaaaaacaaaaaagaaaaagaagcataagaaacacagtaagaagaagaaaaagaaggctgctagttcaagtcctgactcaccataacattaagaaaaatcaggattcccttataaagaaagtgcaatgtctgaggaaatttcaactgtgaaaactacaacatatttactaaaatgcatgaattttcttgtttttggaattattcctggactattcagtagccactcagatgccactgtgtgaaagggccataaatgttgcctgctgcttgaacatctatttttttctcttccagtgcttgataactctgggagataatacactgcagtcgtactagtggttaagatatttgggaataaaattaatacttttgactagaagcgtctaaggataaaccaacagaaattgaatctggatacatctttaagatgtaatcagaaatgaccagatgactctagttagaatttttgaaggagggattacattaatatttcaaaacccttactctgtagataagtgtattttaattttttcccctcgtatacttttatttacctggggaaggagcttttagggttggggggtggtttgctatctctttagctagcagaatagtgtgcctttgatcctcacacatcctgtattatggacacagtagccatgcttcacggggaggtcagagctggctaccagcagtcttgccctttactgagcttagtgtcatctttggatgctgtcatatgctgctttgagtgaaccagagaaacagccatttgcagcatgagaaagccccaaaagctctgggatttacctccactttagtaataatgaatattttttagcattagaatgtgttatgtcatttgaattaattttgactacactttggcttgggagaggaattattttaaatagacattggtactttttgaacttgatagctaaagattctaaaatgcatgttttatactaagttttaaccagtcaggaaaattttatgtaactagtgatagtttatttttttgtatgaattttgtttaggctgcaatgtttagcttttgttaactcctcactcttgctgtcttaagttcattactatgtttaatggcctacttgccaagatatttagcatgtaaaaagcagggttttgattaaaaaaaaaaaacggcttcatattgaagctgagacttacaataacaagttgagtggcaagcctggtatgctgtgtcttattgccagaatcttagtaaatgtaatgttttaaaagtttgttgtctttgtatattaataacaaattatgacaagttaagtttaaataagagttacattattgctctccctgtgtcatattttactaagattttgtgcctcatgtctactgctgaattgtttactaggaatgttaaaaggaattgataattcattttcattttacatttttatataatcaggtaacatgacatacaacttgatgtacaattttgcctgttacaaagggtgtgctaattatagtggtatatgcacagaacatgttggcatgacaacaggctgaataaatagctattttacttaaaaaaag

SEQ ID NO: 342591 - DNA, 2773 bp, Homo sapiens
taggcggagtggggaggcggcaagaggacctgcggcaggccctcttcggcagtctctccggcccggtttccctcggcgtgctactgtgcgctcgatccagcaccatggggaagcgggacaatcgggtggcctatatgaacccaatagcaatggcgagatcaaggggtccaatccagtcttcagggccaacaatacaggattatctgaatcgaccaaggcctacctgggaagaagtaaaagagcaactagaaaagaaaaagaaaggctccaaggctttggctgaatttgaagaaaaaatgaatgagaactggaagaaagaactggaaaaacacagggagaaattgttaagtggaagtgagagctcatccaaaaaaagacagagaaagaaaaaagaaaagaagaaatctggtagggtgagcaaaaattttccatttttctaaacgttacaattaagagccaacaaaaaaagtaagaataatttgtttaacctgtatgctaaaggtagcttaaactccagatgagtcaaggaacttagaggttctttgattgtgaagagtgattttgttctatcactgacataaaaaacggtgccaaccaccttataacgtagtacattttctgttgctatttaaagagaaagattggtgaccatggccacatatgttaacttgttgagcttttgtacagggaacaagtgtgacattttatattttcatatttatgacttatgaatatggcatctgtttctcagacactagattgatttcactaagtatttgagagactttgtaaaagaaaaacattctcgcatctcacaagctttaattgttttgtgcttggtcaagttattcatcttcttcttcatcaagctctgattcttccagcagttcttctgattctgaagatgaggataagaaacaaggaaaacggagaaagaaaaagaagaaccgttcacataaatcttctgaaagctccatgtcagaaactgaatcagacagtaaggatagtttaaaaaagaaaaagaagtcaaaagatggaactgagaaagaaaaggatattaaaggactcagcaaaaagagaaagatgtattctgaagataaacctttatcatctgagtccttgtcagaatcagagtatattgaggaggtgcgagcaaaaaagaagaaaagcagtgaagaacgagaaaaagcaacagaaaaaacaaaaaagaaaaagaagcataagaaacacagtaagaagaagaaaaagaaggctgctagttcaagtcctgactcaccataacattaagaaaaatcaggattcccttataaagaaagtgcaatgtctgaggaaatttcaactgtgaaaactacaacatatttactaaaatgcatgaattttcttgtttttggaattattcctggactattcagtagccactcagatgccactgtgtgaaagggccataaatgttgcctgctgcttgaacatctatttttttctcttccagtgcttgataactctgggagataatacactgcagtcgtactagtggttaagatatttgggaataaaattaatacttttgactagaagcgtctaaggataaaccaacagaaattgaatctggatacatctttaagatgtaatcagaaatgaccagatgactctagttagaatttttgaaggagggattacattaatatttcaaaacccttactctgtagataagtgtattttaattttttcccctcgtatacttttatttacctggggaaggagcttttagggttggggggtggtttgctatctctttagctagcagaatagtgtgcctttgatcctcacacatcctgtattatggacacagtagccatgcttcacggggaggtcagagctggctaccagcagtcttgccctttactgagcttagtgtcatctttggatgctgtcatatgctgctttgagtgaaccagagaaacagccatttgcagcatgagaaagccccaaaagctctgggatttacctccactttagtaataatgaatattttttagcattagaatgtgttatgtcatttgaattaattttgactacactttggcttgggagaggaattattttaaatagacattggtactttttgaacttgatagctaaagattctaaaatgcatgttttatactaagttttaaccagtcaggaaaattttatgtaactagtgatagtttatttttttgtatgaattttgtttaggctgcaatgtttagcttttgttaactcctcactcttgctgtcttaagttcattactatgtttaatggcctacttgccaagatatttagcatgtaaaaagcagggttttgattaaaaaaaaaaaacggcttcatattgaagctgagacttacaataacaagttgagtggcaagcctggtatgctgtgtcttattgccagaatcttagtaaatgtaatgttttaaaagtttgttgtctttgtatattaataacaaattatgacaagttaagtttaaataagagttacattattgctctccctgtgtcatattttactaagattttgtgcctcatgtctactgctgaattgtttactaggaatgttaaaaggaattgataattcattttcattttacatttttatataatcaggtaacatgacatacaacttgatgtacaattttgcctgttacaaagggtgtgctaattatagtggtatatgcacagaacatgttggcatgacaacaggctgaataaatagctattttacttaaaaaaag

SEQ ID NO: 342592 - DNA, 2095 bp, Homo sapiens
tgattttaatttaataatttaataattaatgacagcaacttcaagtagtgctgccagtctgagcagtacacaatgcctgtgtacctatttacttaaaactggcaaatttaatatctctgttctgtctgaaaactattttacaaaaacaattatgtttttatttggttactccattccagtaactgcaattactttacctttagaagttatatagcatgaaataatagtgattggtagcatgattcaattgaatttatttcctacaggaaattttgttagaagttatgttaatatgctaatgacttaagagtttctccctatctttttgaaaatcgacaagaactgttttagtcctcatatgatactggttgttgagactttttgaggaatgttttgagtagttttcttggttgtgtggattgtttggaattatgtggtagcttagaagcatggtaaagatgcttttaatttgcgtatttttatatagtaatgtctaacatggaattatctttacaggaaaaaacaaaaaagaaaaagaagcataagaaacacagtaagaagaagaaaaagaaggctgctagttcaagtcctgactcaccataacattaagaaaaatcaggattcccttataaagaaagtgcaatgtctgaggaaatttcaactgtgaaaactacaacatatttactaaaatgcatgaattttcttgtttttggaattattcctggactattcagtagccactcagatgccactgtgtgaaagggccataaatgttgcctgctgcttgaacatctatttttttctcttccagtgcttgataactctgggagataatacactgcagtcgtactagtggttaagatatttgggaataaaattaatacttttgactagaagcgtctaaggataaaccaacagaaattgaatctggatacatctttaagatgtaatcagaaatgaccagatgactctagttagaatttttgaaggagggattacattaatatttcaaaacccttactctgtagataagtgtattttaattttttcccctcgtatacttttatttacctggggaaggagcttttagggttggggggtggtttgctatctctttagctagcagaatagtgtgcctttgatcctcacacatcctgtattatggacacagtagccatgcttcacggggaggtcagagctggctaccagcagtcttgccctttactgagcttagtgtcatctttggatgctgtcatatgctgctttgagtgaaccagagaaacagccatttgcagcatgagaaagccccaaaagctctgggatttacctccactttagtaataatgaatattttttagcattagaatgtgttatgtcatttgaattaattttgactacactttggcttgggagaggaattattttaaatagacattggtactttttgaacttgatagctaaagattctaaaatgcatgttttatactaagttttaaccagtcaggaaaattttatgtaactagtgatagtttatttttttgtatgaattttgtttaggctgcaatgtttagcttttgttaactcctcactcttgctgtcttaagttcattactatgtttaatggcctacttgccaagatatttagcatgtaaaaagcagggttttgattaaaaaaaaaaaacggcttcatattgaagctgagacttacaataacaagttgagtggcaagcctggtatgctgtgtcttattgccagaatcttagtaaatgtaatgttttaaaagtttgttgtctttgtatattaataacaaattatgacaagttaagtttaaataagagttacattattgctctccctgtgtcatattttactaagattttgtgcctcatgtctactgctgaattgtttactaggaatgttaaaaggaattgataattcattttcattttacatttttatataatcaggtaacatgacatacaacttgatgtacaattttgcctgttacaaagggtgtgctaattatagtggtatatgcacagaacatgttggcatgacaacaggctgaataaatagctattttacttaaaaaaag

SEQ ID NO: 342593 - DNA, 2030 bp, Homo sapiens
gtagagatgggggagctctcactatgttgctcaggctggccttgaactcctgggctcaagcaagcctcctgccttggcctcccaaaatgctgagattacaggcaagagcaaccacactcggcctaaagctgatgtttttttccactgtaccacatttttttaggtgctgaaagggaatataagagaagctgtctagagattttacgtcttaattgtccttcctttatgttttttattgaaacctcattgagatataacaggagttattttaaatgtcctgtgattgtcaaaatgttttttacatttaaattttgaagatgcaagatagagaatgaaagaaaaatgccttgagtacaaattacatgtttgtcttctgttctccacaaaaatttaaactttctaggtgcgagcaaaaaagaagaaaagcagtgaagaacgagaaaaagcaacagaaaaaacaaaaaagaaaaagaagcataagaaacacagtaagaagaagaaaaagaaggctgctagttcaagtcctgactcaccataacattaagaaaaatcaggattcccttataaagaaagtgcaatgtctgaggaaatttcaactgtgaaaactacaacatatttactaaaatgcatgaattttcttgtttttggaattattcctggactattcagtagccactcagatgccactgtgtgaaagggccataaatgttgcctgctgcttgaacatctatttttttctcttccagtgcttgataactctgggagataatacactgcagtcgtactagtggttaagatatttgggaataaaattaatacttttgactagaagcgtctaaggataaaccaacagaaattgaatctggatacatctttaagatgtaatcagaaatgaccagatgactctagttagaatttttgaaggagggattacattaatatttcaaaacccttactctgtagataagtgtattttaattttttcccctcgtatacttttatttacctggggaaggagcttttagggttggggggtggtttgctatctctttagctagcagaatagtgtgcctttgatcctcacacatcctgtattatggacacagtagccatgcttcacggggaggtcagagctggctaccagcagtcttgccctttactgagcttagtgtcatctttggatgctgtcatatgctgctttgagtgaaccagagaaacagccatttgcagcatgagaaagccccaaaagctctgggatttacctccactttagtaataatgaatattttttagcattagaatgtgttatgtcatttgaattaattttgactacactttggcttgggagaggaattattttaaatagacattggtactttttgaacttgatagctaaagattctaaaatgcatgttttatactaagttttaaccagtcaggaaaattttatgtaactagtgatagtttatttttttgtatgaattttgtttaggctgcaatgtttagcttttgttaactcctcactcttgctgtcttaagttcattactatgtttaatggcctacttgccaagatatttagcatgtaaaaagcagggttttgattaaaaaaaaaaaacggcttcatattgaagctgagacttacaataacaagttgagtggcaagcctggtatgctgtgtcttattgccagaatcttagtaaatgtaatgttttaaaagtttgttgtctttgtatattaataacaaattatgacaagttaagtttaaataagagttacattattgctctccctgtgtcatattttactaagattttgtgcctcatgtctactgctgaattgtttactaggaatgttaaaaggaattgataattcattttcattttacatttttatataatcaggtaacatgacatacaacttgatgtacaattttgcctgttacaaagggtgtgctaattatagtggtatatgcacagaacatgttggcatgacaacaggctgaataaatagctattttacttaaaaaaag

SEQ ID NO: 342594 - DNA, 1326 bp, Homo sapiens
taggcggagtggggaggcggcaagaggacctgcggcaggccctcttcggcagtctctccggcccggtttccctcggcgtgctactgtgcgctcgatccagcaccatggggaagcgggacaatcgggtggcctatatgaacccaatagcaatggcgagatcaaggggtccaatccagtcttcagggccaacaatacaggattatctgaatcgaccaaggcctacctgggaagaagtaaaagagcaactagaaaagaaaaagaaaggctccaaggctttggctgaatttgaagaaaaaatgaatgagaactggaagaaagaactggaaaaacacagggagaaattgttaagtggaagtgagagctcatccaaaaaaagacagagaaagaaaaaagaaaagaagaaatctggtaggtattcatcttcttcttcatcaagctctgattcttccagcagttcttctgattctgaagatgaggataagaaacaaggaaaacggagaaagaaaaagaagaaccgttcacataaatcttctgaaagctccatgtcagaaactgaatcagacagtaaggatagtttaaaaaagaaaaagaagtcaaaagatggaactgagaaagaaaaggatattaaaggactcagcaaaaagagaaagatgtattctgaagataaacctttatcatctgagtccttgtcagaatcagagtatattgaggaggtaagtatatgatcaaatccattttctctattttaaaatgcttagttattgatttaataaatatgacttagaaaaagaaatacttcatatttaatttattcacctttctagtatgaaaaaacaaaatgaaagttatttcatttcagaatgagttttgcttttttccagaagataattatctattattttttataattaactgtatttccacatacctttctaatctgagatatttttagtcttctaatatttcctttttattgtgctaccattcttgttacatgaaagaagctgtgtaacatacagcatgttgaaaccaaacattctcttacattgttaaaatagaacattgcatatactatctcagtttagttgatatttagctgtgttttgagctacttttcggggagtatgaaaggtgatgaagtggagaagaaatgttggcaggaaacatatcatattacttcgttgtgagaactaaatgagatgataaattacgaaaggcattgcatcatacctgagacagagtaaatggtggctaaagctcggaatcatcgtggggtccccgaatattttataacccagttgtccccaaaaactttgttttataaaa

SEQ ID NO: 342595 - DNA, 1049 bp, Homo sapiens
gactagatgctaggcattacatgtgattcaaatcacttgatctttataacaggaaagtgatgtattaagtattaagaaaaaaatatagaaactgatccttttgtgaaattttgttcactgataaaagttttatattaataaatgtgtaaattagatttttgagacagaaagcaaatgtttctaaaaatattttatgtaggataagaaacaaggaaaacggagaaagaaaaagaagaaccgttcacataaatcttctgaaagctccatgtcagaaactgaatcagacagtaaggatagtttaaaaaagaaaaagaagtcaaaagatggaactgagaaagaaaaggatattaaaggactcagcaaaaagagaaagatgtattctgaagataaacctttatcatctgagtccttgtcagaatcagagtatattgaggaggtaagtatatgatcaaatccattttctctattttaaaatgcttagttattgatttaataaatatgacttagaaaaagaaatacttcatatttaatttattcacctttctagtatgaaaaaacaaaatgaaagttatttcatttcagaatgagttttgcttttttccagaagataattatctattattttttataattaactgtatttccacatacctttctaatctgagatatttttagtcttctaatatttcctttttattgtgctaccattcttgttacatgaaagaagctgtgtaacatacagcatgttgaaaccaaacattctcttacattgttaaaatagaacattgcatatactatctcagtttagttgatatttagctgtgttttgagctacttttcggggagtatgaaaggtgatgaagtggagaagaaatgttggcaggaaacatatcatattacttcgttgtgagaactaaatgagatgataaattacgaaaggcattgcatcatacctgagacagagtaaatggtggctaaagctcggaatcatcgtggggtccccgaatattttataacccagttgtccccaaaaactttgttttataaaa

SEQ ID NO: 342596 - DNA, 2340 bp, Homo sapiens
taggcggagtggggaggcggcaagaggacctgcggcaggccctcttcggcagtctctccggcccggtttccctcggcgtgctactgtgcgctcgatccagcaccatggggaagcgggacaatcgggtggcctatatgaacccaatagcaatggcgagatcaaggggtccaatccagtcttcagggccaacaatacaggattatctgaatcgaccaaggcctacctgggaagaagtaaaagagcaactagaaaagaaaaagaaaggctccaaggctttggctgaatttgaagaaaaaatgaatgagaactggaagaaagaactggaaaaacacagggagaaattgttaagtggaagtgagagctcatccaaaaaaagacagagaaagaaaaaagaaaagaagaaatctggtaggtattcatcttcttcttcatcaagctctgattcttccagcagttcttctgattctgaagatgaggataagaaacaaggaaaacggagaaagaaaaagaagaaccgttcacataaatcttctgaaagctccatgtcagaaactgaatcagacagtaaggatagtttaaaaaagaaaaagaagtcaaaagatggaactgagaaagaaaaggatattaaaggactcagcaaaaagagaaagatgtattctgaagataaacctttatcatctgagtccttgtcagaatcagagtatattgaggaggtgcgagcaaaaaagaagaaaagcagtgaagaacgagaaaaagcaacagaaaaaacaaaaaagaaaaagaagcataagaaacacagtaagaagaagaaaaagaaggctgctagttcaagtcctgactcaccataacattaagaaaaatcaggattcccttataaagaaagtgcaatgtctgaggaaatttcaactgtgaaaactacaacatatttactaaaatgcatgaattttcttgtttttggaattattcctggactattcagtagccactcagatgccactgtgtgaaagggccataaatgttgcctgctgcttgaacatctatttttttctcttccagtgcttgataactctgggagataatacactgcagtcgtactagtggttaagatatttgggaataaaattaatacttttgactagaagcgtctaaggataaaccaacagaaattgaatctggatacatctttaagatgtaatcagaaatgaccagatgactctagttagaatttttgaaggagggattacattaatatttcaaaacccttactctgtagataagtgtattttaattttttcccctcgtatacttttatttacctggggaaggagcttttagggttggggggtggtttgctatctctttagctagcagaatagtgtgcctttgatcctcacacatcctgtattatggacacagtagccatgcttcacggggaggtcagagctggctaccagcagtcttgccctttactgagcttagtgtcatctttggatgctgtcatatgctgctttgagtgaaccagagaaacagccatttgcagcatgagaaagccccaaaagctctgggatttacctccactttagtaataatgaatattttttagcattagaatgtgttatgtcatttgaattaattttgactacactttggcttgggagaggaattattttaaatagacattggtactttttgaacttgatagctaaagattctaaaatgcatgttttatactaagttttaaccagtcaggaaaattttatgtaactagtgatagtttatttttttgtatgaattttgtttaggctgcaatgtttagcttttgttaactcctcactcttgctgtcttaagttcattactatgtttaatggcctacttgccaagatatttagcatgtaaaaagcagggttttgattaaaaaaaaaaaacggcttcatattgaagctgagacttacaataacaagttgagtggcaagcctggtatgctgtgtcttattgccagaatcttagtaaatgtaatgttttaaaagtttgttgtctttgtatattaataacaaattatgacaagttaagtttaaataagagttacattattgctctccctgtgtcatattttactaagattttgtgcctcatgtctactgctgaattgtttactaggaatgttaaaaggaattgataattcattttcattttacatttttatataatcaggtaacatgacatacaacttgatgtacaattttgcctgttacaaagggtgtgctaattatagtggtatatgcacagaacatgttggcatgacaacaggctgaataaatagctattttacttaaaaaaag

SEQ ID NO: 342597 - DNA, 2415 bp, Homo sapiens
cacacacacacaattttctcccaaacttttaagacttaaaagaggattaaattaatttttttagaataaagagttggttagtcagattgcatatacttagctggatatattatgcatttatagtaaagattacttgatgagtaagtgaggttttgcatgtttaatgattgctttaatggattaattgttgttctttccccaaggcctatatgaacccaatagcaatggcgagatcaaggggtccaatccagtcttcagggccaacaatacaggattatctgaatcgaccaaggcctacctgggaagaagtaaaagagcaactagaaaagaaaaagaaaggctccaaggctttggctgaatttgaagaaaaaatgaatgagaactggaagaaagaactggaaaaacacagggagaaattgttaagtggaagtgagagctcatccaaaaaaagacagagaaagaaaaaagaaaagaagaaatctggtaggtattcatcttcttcttcatcaagctctgattcttccagcagttcttctgattctgaagatgaggataagaaacaaggaaaacggagaaagaaaaagaagaaccgttcacataaatcttctgaaagctccatgtcagaaactgaatcagacagtaaggatagtttaaaaaagaaaaagaagtcaaaagatggaactgagaaagaaaaggatattaaaggactcagcaaaaagagaaagatgtattctgaagataaacctttatcatctgagtccttgtcagaatcagagtatattgaggaggtgcgagcaaaaaagaagaaaagcagtgaagaacgagaaaaagcaacagaaaaaacaaaaaagaaaaagaagcataagaaacacagtaagaagaagaaaaagaaggctgctagttcaagtcctgactcaccataacattaagaaaaatcaggattcccttataaagaaagtgcaatgtctgaggaaatttcaactgtgaaaactacaacatatttactaaaatgcatgaattttcttgtttttggaattattcctggactattcagtagccactcagatgccactgtgtgaaagggccataaatgttgcctgctgcttgaacatctatttttttctcttccagtgcttgataactctgggagataatacactgcagtcgtactagtggttaagatatttgggaataaaattaatacttttgactagaagcgtctaaggataaaccaacagaaattgaatctggatacatctttaagatgtaatcagaaatgaccagatgactctagttagaatttttgaaggagggattacattaatatttcaaaacccttactctgtagataagtgtattttaattttttcccctcgtatacttttatttacctggggaaggagcttttagggttggggggtggtttgctatctctttagctagcagaatagtgtgcctttgatcctcacacatcctgtattatggacacagtagccatgcttcacggggaggtcagagctggctaccagcagtcttgccctttactgagcttagtgtcatctttggatgctgtcatatgctgctttgagtgaaccagagaaacagccatttgcagcatgagaaagccccaaaagctctgggatttacctccactttagtaataatgaatattttttagcattagaatgtgttatgtcatttgaattaattttgactacactttggcttgggagaggaattattttaaatagacattggtactttttgaacttgatagctaaagattctaaaatgcatgttttatactaagttttaaccagtcaggaaaattttatgtaactagtgatagtttatttttttgtatgaattttgtttaggctgcaatgtttagcttttgttaactcctcactcttgctgtcttaagttcattactatgtttaatggcctacttgccaagatatttagcatgtaaaaagcagggttttgattaaaaaaaaaaaacggcttcatattgaagctgagacttacaataacaagttgagtggcaagcctggtatgctgtgtcttattgccagaatcttagtaaatgtaatgttttaaaagtttgttgtctttgtatattaataacaaattatgacaagttaagtttaaataagagttacattattgctctccctgtgtcatattttactaagattttgtgcctcatgtctactgctgaattgtttactaggaatgttaaaaggaattgataattcattttcattttacatttttatataatcaggtaacatgacatacaacttgatgtacaattttgcctgttacaaagggtgtgctaattatagtggtatatgcacagaacatgttggcatgacaacaggctgaataaatagctattttacttaaaaaaag

SEQ ID NO: 342598 - DNA, 2286 bp, Homo sapiens
taggcggagtggggaggcggcaagaggacctgcggcaggccctcttcggcagtctctccggcccggtttccctcggcgtgctactgtgcgctcgatccagcaccatggggaagcgggacaatcgggtggcctatatgaacccaatagcaatggcgagatcaaggggtccaatccagtcttcagggccaacaatacaggattatctgaatcgaccaaggcctacctgggaagaagtaaaagagcaactagaaaagaaaaagaaaggctccaaggctttggctgaatttgaagaaaaaatgaatgagaactggaagaaagaactggaaaaacacagggagaaattgttaagtggaagtgagagctcatccaaaaaaagacagagaaagaaaaaagaaaagaagaaatctggtaggtattcatcttcttcttcatcaagctctgattcttccagcagttcttctgattctgaagatgaggataagaaacaaggaaaacggagaaagaaaaagaagaaccgttcacataaatcttctgaaagctccatgtcagaaactgaatcagacagtaaggatagtttaaaaaagaaaaagaagtcaaaagatggaactgagaaagaaaaggatattaaaggactcagcaaaaagagaaagatgtattctgaagataaacctttatcatctgagtccttgtcagaatcagagtatattgaggaggtgcgagcaaaaaagaagaaaagcagtgaagaacgagaaaaagcaacagaaaaaacaaaaaagaaaaagaagcataagaaacacagtaagaagaagaaaaagaaggctgctagttcaagtcctgactcaccataacattaagaaaaatcaggattcccttataaagaaagtgcaatgtctgaggaaatttcaactgtgaaaactacaacatatttactaaaatgcatgaattttcttgtttttggaattattcctggactattcagtagccactcagatgccactgtgtgaaagggccataaatgttgcctgctgcttgaacatctatttttttctcttccagtgcttgataactctgggagataatacactgcagtcgtactagtggttaagatatttgggaataaaattaatacttttgactagaagcgtctaaggataaaccaacagaaattgaatctggatacatctttaagatgtaatcagaaatgaccagatgactctagttagaatttttgaaggagggattacattaatatttcaaaacccttactctgtagataagtgtattttaattttttcccctcgtatacttttatttacctggggaaggagcttttagggttggggggtggtttgctatctctttagctagcagaatagtgtgcctttgatcctcacacatcctgtattatggacacagtagccatgcttcacggggaggtcagagctggctaccagcagtcttgccctttactgagcttagtgtcatctttggatgctgtcatatgctgctttgagtgaaccagagaaacagccatttgcagcatgagaaagccccaaatgtgttatgtcatttgaattaattttgactacactttggcttgggagaggaattattttaaatagacattggtactttttgaacttgatagctaaagattctaaaatgcatgttttatactaagttttaaccagtcaggaaaattttatgtaactagtgatagtttatttttttgtatgaattttgtttaggctgcaatgtttagcttttgttaactcctcactcttgctgtcttaagttcattactatgtttaatggcctacttgccaagatatttagcatgtaaaaagcagggttttgattaaaaaaaaaaaacggcttcatattgaagctgagacttacaataacaagttgagtggcaagcctggtatgctgtgtcttattgccagaatcttagtaaatgtaatgttttaaaagtttgttgtctttgtatattaataacaaattatgacaagttaagtttaaataagagttacattattgctctccctgtgtcatattttactaagattttgtgcctcatgtctactgctgaattgtttactaggaatgttaaaaggaattgataattcattttcattttacatttttatataatcaggtaacatgacatacaacttgatgtacaattttgcctgttacaaagggtgtgctaattatagtggtatatgcacagaacatgttggcatgacaacaggctgaataaatagctattttacttaaaaaaag

SEQ ID NO: 342599 - DNA, 1804 bp, Homo sapiens
atttaaaattgatacatatatttctttgtttaggatagtttaaaaaagaaaaagaagtcaaaagatggaactgagaaagaaaaggatattaaaggactcagcaaaaagagaaagatgtattctgaagataaacctttatcatctgagtccttgtcagaatcagagtatattgaggaggtgcgagcaaaaaagaagaaaagcagtgaagaacgagaaaaagcaacagaaaaaacaaaaaagaaaaagaagcataagaaacacagtaagaagaagaaaaagaaggctgctagttcaagtcctgactcaccataacattaagaaaaatcaggattcccttataaagaaagtgcaatgtctgaggaaatttcaactgtgaaaactacaacatatttactaaaatgcatgaattttcttgtttttggaattattcctggactattcagtagccactcagatgccactgtgtgaaagggccataaatgttgcctgctgcttgaacatctatttttttctcttccagtgcttgataactctgggagataatacactgcagtcgtactagtggttaagatatttgggaataaaattaatacttttgactagaagcgtctaaggataaaccaacagaaattgaatctggatacatctttaagatgtaatcagaaatgaccagatgactctagttagaatttttgaaggagggattacattaatatttcaaaacccttactctgtagataagtgtattttaattttttcccctcgtatacttttatttacctggggaaggagcttttagggttggggggtggtttgctatctctttagctagcagaatagtgtgcctttgatcctcacacatcctgtattatggacacagtagccatgcttcacggggaggtcagagctggctaccagcagtcttgccctttactgagcttagtgtcatctttggatgctgtcatatgctgctttgagtgaaccagagaaacagccatttgcagcatgagaaagccccaaaagctctgggatttacctccactttagtaataatgaatattttttagcattagaatgtgttatgtcatttgaattaattttgactacactttggcttgggagaggaattattttaaatagacattggtactttttgaacttgatagctaaagattctaaaatgcatgttttatactaagttttaaccagtcaggaaaattttatgtaactagtgatagtttatttttttgtatgaattttgtttaggctgcaatgtttagcttttgttaactcctcactcttgctgtcttaagttcattactatgtttaatggcctacttgccaagatatttagcatgtaaaaagcagggttttgattaaaaaaaaaaaacggcttcatattgaagctgagacttacaataacaagttgagtggcaagcctggtatgctgtgtcttattgccagaatcttagtaaatgtaatgttttaaaagtttgttgtctttgtatattaataacaaattatgacaagttaagtttaaataagagttacattattgctctccctgtgtcatattttactaagattttgtgcctcatgtctactgctgaattgtttactaggaatgttaaaaggaattgataattcattttcattttacatttttatataatcaggtaacatgacatacaacttgatgtacaattttgcctgttacaaagggtgtgctaattatagtggtatatgcacagaacatgttggcatgacaacaggctgaataaatagctattttacttaaaaaaag

SEQ ID NO: 342600 - DNA, 989 bp, Homo sapiens
taggcggagtggggaggcggcaagaggacctgcggcaggccctcttcggcagtctctccggcccggtttccctcggcgtgctactgtgcgctcgatccagcaccatggggaagcgggacaatcgggtggcctatatgaacccaatagcaatggcgagatcaaggggtccaatccagtcttcagggccaacaatacaggattatctgaatcgaccaaggcctacctgggaagaagtaaaagagcaactagaaaagaaaaagaaaggctccaaggctttggctgaatttgaagaaaaaatgaatgagaactggaagaaagaactggaaaaacacagggagaaattgttaagtggaagtgagagctcatccaaaaaaagacagagaaagaaaaaagaaaagaagaaatctggtagggtgagcaaaaattttccatttttctaaacgttacaattaagagccaacaaaaaaagtaagaataatttgtttaacctgtatgctaaaggtagcttaaactccagatgagtcaaggaacttagaggttctttgattgtgaagagtgattttgttctatcactgacataaaaaacggtgccaaccaccttataacgtagtacattttctgttgctatttaaagagaaagattggtgaccatggccacatatgttaacttgttgagcttttgtacagggaacaagtgtgacattttatattttcatatttatgacttatgaatatggcatctgtttctcagacactagattgatttcactaagtatttgagagactttgtaaaagatattcatcttcttcttcatcaagctctgattcttccagcagttcttctgattctgaagatgaggtaaggtttgcttataatggttcatgaaataatatctcttaatttctttaatgtcaagtggaaacccattgtgaaatatctgttagaaatgttgacttccaggttttgattaattatccataacttagag

SEQ ID NO: 342601 - DNA, 1501 bp, Homo sapiens
cgcagtgattctgagagtgtgagtgagaagctgcagggaggccgcagaggtctgtgcgggaatgcagccgtcagtcttctcagtcttcccgattttctcaccaaagcagtttgtgttgacaggtcacgtcaaagcaaaaagacttcctcagttttgatccccttctaattaattcctcatccatgtcactttacttctgccagcacttgctttctggtgacagcgcacgtgacatatctagaaggaacatgggttttaaaaacgtcaaggcttctgagctatttatgtgcatcaggtactaggacagtacatctaagtttagttggaagagagagaattttagttaggggtatgagctcccttagtgtgtgggcctctcctgttcatcttttcgttttaagcttttagttagagctatatgcatagagttgcagagaataaaatagtgcaggggaaaactcttcctagttccagtttacacggctcattctggtccttctgttacctccttactaataaataatgtacttggctatacctctatttcttgacttcatcattagatattatttgttgacttcgagctttaaaagatgagagttactcttctcttcctcttcccacactactgaggttgctattttatgtgctaccttgctccagtgaaacacttgcctccttagctcttttgttctgtctgctacagacagtatctcttgacccctcttttggcagtccatcttctccttacctctcccacccctgtcatagccaggcttcccacctgtcctgtgactttccccgttgtcaaggttgagaacatgtgcattctgtcctataactgcagttaagcctcactcttgtctgttggcttagtctaaaaagttgcagtgtgacaattctttcttgtatgattatgaccatatcattcatggcagagtcacatagtgtactgtgattatattccattcttttatagcctttttcctggagtttctattttttctcttgatcttactttcaattgttttcctatgaagcttctcacggtatcagctgtttacggagactcctttcatatcactgttttttgactctgatttcagaggtgatttgttggtgtgctaccatcgtagctgagaatttagcttacttgccacctcatctggagccccttccttagtcctcctcatcacgtgtgccttctccatcctctcctccctattctgttatcactgtgggcagttgatgagttattgccttaaattgtctggctttctcgggtgctgccttcaaccttagcacgtttctagtgcctgcctccgtttcccatggttgaattaggctattggcagagctagtggttgaaaatttgtggcttacaaaatgctgagttgcttttatgtcattgtataccttatttcctacctgtaatgctgtgctgtgtccagtgatgctgtttgtggtttgatatgcatttttaaagagacttagtctcctg

SEQ ID NO: 342602 - DNA, 328 bp, Homo sapiens
tcatctgtttctacatgggtttctacaaaaagtgagagattcactgttgttaaagttgaagtgttagattaacaggaagagtgtaccacaatggagaggagcatgagattcagaagccacccgtcaccaagaattaatttcctttaacccctctttgattgcaggcaacattaaaaagcacagactttgggtcaaggaagtggctcatgcctgtaatcccagcactctgggaggctgaagtgggaggatcacatgagcccaggagttcaagaccagcccaggcaacaaagcgcaagaccccatctctacaaaaaatgcaaaaattagc

SEQ ID NO: 342603 - DNA, 430 bp, Homo sapiens
ctgaaaccctcccctatttttaagcctggtttcttcctctttagtctttcatggacataaaaaattactcaccatctgctgaaaaaattcttcacctttgaaaatttggtctttataagggaaaaatgaagcaaaataaaaacaaaacaaaaagaaaatttggtcttttcctcagttgtttcaaagatagcaatgaaaataaaatttgcagcagaggagaggaaaaaagcaatgtgggccagagctgagtcatgatgaatgaatgggatttagataggagaacagaagaaaagggtagcattccaaacataggagagtggggagaatggaaggatatcatcaaaagtctgaaaataggagctaatgtgttttaggaaagtaagaaggtaactgtctataccttaaaagcagaggagtttcaatttgatag

SEQ ID NO: 342604 - DNA, 737 bp, Homo sapiens
ttctcctgcctcagcctccgaagtagctgggattacaggcatgcaccaccactcgtggctaattttgtatttttagtagagatggggtttctccatgttggtcaggctggtctcgaactcctgacctcaagtgatccacccgccttggcctcccaaagtgctgggattacaggcgtgagctaccacgcctggccaagaggcagtttttgaattccaaaattatggagtgatatctgggagtcagccttcatcagtgatgctgcttgtgctttctccagcttcttgggagactgggcaccaggagacttggaggttcttccctatcttacctactcccaagtatgcatgtttttgaaaaaaatatttaagatttctagagaagatcacaatcttctccagtgtctgtgtaatccattgtggagcagtttattacagctgacctactgtctcctgtctgttttaggagcggtgacttaggttatcaccccttagtgttttcctgtcatctgccttctcatctccacctaaaatttagtttttggtaaaagatcatgctatctaaccttgtcatcattgcaaaacaaacttatttatgtttatcatgatgctgacattagcaagctgactcatggtttaatgttagtgtttcttactactggtcactggctgacagtcggaaaagtgatgccctattttttttttttttttttgagatggaatcttgctctgttgcccag

SEQ ID NO: 342605 - DNA, 481 bp, Homo sapiens
ttaaaacttgatagtcaacaattcctttagttgtggtgaatctgctcttaaaccattcattatgttatatatttcaataattaaatttcatacctaagttgtctttggttctttttaatatctgccttttaacacatctctcatttcatgttcgttttaattcatacattatttaaacatataactgttattctacttctgctaattgcaatacctgaattccttgaatatctaaatctactgtttctcaatgcaaatggtgtgtttccttgcatgtttgattaatctagaagcattaattagggaggctttccttcggaggggattttcatccacttcttagagtaaccaccagagtccactgacttaggactactttaatgctttaaagcattcctggttttatgaaggaatcttaggttcactttctttactttgcctggagtccatggcttaagtctcagaggcacagttttcctgt

SEQ ID NO: 342606 - DNA, 506 bp, Homo sapiens
aaactttttcttcaaatgctacacagtaaataattttggctctgcgggcatttagtctctgtcaggaatgctcagctctgtggttctgacaggacagctgtccctccagacccttggaggattatttccaggaactcccgggatgccaaaattcccagatgctcaatcccagatataaaatggtgtagtattagcatacaacctacgtacatccttccatatgctttagtgagtcacctctagattacttataatactccataaaatgtaaatgctacataaacagctgttatactatagttttatttgtattattttatgttgtattgttttttccattattttccttcaaaaaaaatttttttttttaagacccagagtcttgctctgtcacccaggctggagtggagtggcgcggcacaatctcagctcactgcaacctctgcctctggggttcaagcaattctcctgctccgtttccgacctgggccggttcacccctcctt

SEQ ID NO: 342607 - DNA, 3056 bp, Homo sapiens
atggggctgcagcccctggagttcagcgactgctacctcgacagcccgtggttccgggagaggatccgcgctcacgaagcggaactcgagaggaccaacaagttcatcaaagagctcattaaggacgggaagaacctcatcgctgcgacgaaaagtctgtcagtggcccagcggaagtttgctcattcactcagagactttaagtttgagtttatcggtgatgctgtgacagatgatgaacgatgcatagatgcttccttacgtgaattttcaaattttttgaagaatctggaggaacagagagaaattatggcattaagtgtaactgaaaccctgattaaacccttggaaaaattcagaaaagagcaacttggagctgtaaaggaagaaaaaaagaagtttgacaaagagacagaaaagaattatagtctaattgataaacatttgaatttatcagcaaaaaagaaagactcacatttacaagaggcagatatccaagtagagcagaaccggcaacacttctatgaactgtctctcgagtatgtgtgtaagctgcaggaaatccaagaaagaaagaagtttgagtttgtggaacctatgctgtcattttttcaggggatgtttaccttctatcatcagggccatgaacttgccaaagacttcaatcactacaaaatggaactacagatcaacattcagaatacacggaatcgatttgaaggaacaaggtcagaagtggaagagctcatgaacaaaatcagacagaatcccaaggaccacaaacgagcaagtcagtttacagccgaaggctacctgtatgtccaggaaaaaaggcctgctccgtttggttccagttgggtcaaacactattgcatgtatcgaaaagcagcaaagaagttcaacatgatcccatttgagcacagatctggagggaaacttggggacggagaggtgttctttttgaaagaatgtaccaagaggcatactgactccattgacagaaggttttgttttgacatagaagctgctgatcggcctggcgtttccttgaccatgcaggcattttccgaagaggaaaggaagcagtggttggaagctctgggtggaaaggaagctctgtcccatagttttaatacagccatcatcccaagaccagaaggaaatgcacagttggataagatggggttcacaattatcagaaaatgcatcagtgccgttgaaacacgaggtataaatgaccaaggattgtacagagttgtgggggtgagttcaaaggtccagagacttctgagtatgttgatggatgtaaaaacatgcaatgaggtggacctggagaattctgcagattgggaagtgaagacaataacaagtgccttgaaacagtatttgaggagtcttccagagcctctcatgacctatgagttacatggagatttcattgttccagccaaaagcggcagcccagaatctcgtgttaatgcgatccatttcttggtacacaaactgccagagaagaataaagagatgttggatattttggtgaaacacttaacaaatgtttcaaatcactccaagcagaacctgatgactgtggcaaacttaggagtggtgtttggaccaactctgatgaggccacaggaagaaactgtcgctgccctcatggacttgaagtttcagaatattgttgtggaaatcttaattgaaaaccatgaaaagatttttcggacgccgcccgatactacattccctgagcccacctgcctgtcagcatcacccccaaatgcgccaccaaggcagtcgaagagacaaggccagagaaccaagaggcccgtggccgtctacaatctttgtctggagctggaagatggtgacaatccttacccttccaaggaggacacccctaccagcagtctggactcactttcctccccgtctcccgtgactacagctgtccctgggcctcctggaccagacaaaaaccaccttctggcagatggagggagctttggagactgggcatccactatcccaggccagacccgatcgtctatggtccagtggcttaacccacagtctccaaccacaacaagctccaactcagctgtgacacctctttcacccgggtcgtcccctttccccttttctcctcctgctactgtagcggacaagccacctgaaagcatccgcagtcggaaggctcgagccgtgtatccgtgtgaagcagaacacagctcggaattatcttttgaaataggagcaatttttgaggatgtacaaacctccagggaacctggctggctagaagggactctgaacggcaagagggggctgattccacagaactacgtcaagctgctgtagctcctggcctcagagcccctgctgaccctggcacccagggacctgcctgggggcagagagctgtcttcctcctccgaggctctgggctgcacccacaggtacctccacacttgggagttaccatcatcacagtcagccctgggggtggggggtggtgggcagggatgggacgcaccacacagaactgtgattgtggatcaggaggggaatgtcaggattcgcaaaatggacttttcatttgtcaagtattgggacttgtgatttttaattatccagcatatagaatgagagggagggcagccttctgccacctgtgtcgcctccactggcagtcacgccaccagagccaccctggctccctctcctccctgagcacctgctgctgcgattttaaagggaactgtactactcgcagtgataggtttgcagagtgtgtgcttggctgtggcagcctagcttggagaagctgctgttggtgcaagggagatggtctcaagtcagagggaagcagagacgcgcgtctcaagcctgcccttcctagacggccacctgcaggaccccacactcactgcactggcagcgtgcactggcgtatttgtaacaggcttctcggtgctcctcacccgtgtgctgttttccaaacaccacctttttgcctcaaggtctctgtaaatgaaataaactgtaatttacta

SEQ ID NO: 342608 - DNA, 3065 bp, Homo sapiens
atggggctgcagcccctggagttcagcgactgctacctcgacagcccgtggttccgggagaggatccgcgctcacgaagcggaactcgagaggaccaacaagttcatcaaagagctcattaaggacgggaagaacctcatcgctgcgacgaaaagtctgtcagtggcccagcggaagtttgctcattcactcagagactttaagtttgagtttatcggtgatgctgtgacagatgatgaacgatgcatagatgcttccttacgtgaattttcaaattttttgaagaatctggaggaacagagagaaattatggcattaagtgtaactgaaaccctgattaaacccttggaaaaattcagaaaagagcaacttggagctgtaaaggaagaaaaaaagaagtttgacaaagagacagaaaagaattatagtctaattgataaacatttgaatttatcagcaaaaaagaaagactcacatttacaagaggcagatatccaagtagagcagaaccggcaacacttctatgaactgtctctcgagtatgtgtgtaagctgcaggaaatccaagaaagaaagaagtttgagtttgtggaacctatgctgtcattttttcaggggatgtttaccttctatcatcagggccatgaacttgccaaagacttcaatcactacaaaatggaactacagatcaacattcagaatacacggaatcgatttgaaggaacaaggtcagaagtggaagagctcatgaacaaaatcagacagaatcccaaggaccacaaacgagcaagtcagtttacagccgaaggctacctgtatgtccaggaaaaaaggcctgctccgtttggttccagttgggtcaaacactattgcatgtatcgaaaagcagcaaagaagttcaacatgatcccatttgagcacagatctggagggaaacttggggacggagaggtgttctttttgaaagaatgtaccaagaggcatactgactccattgacagaaggttttgttttgacatagaagctgctgatcggcctggcgtttccttgaccatgcaggcattttccgaagaggaaaggaagcagtggttggaagctctgggtggaaaggaagctctgtcccatagttttaatacagccatcatcccaagaccagaaggaaatgcacagttggataagatggggttcacaattatcagaaaatgcatcagtgccgttgaaacacgaggtataaatgaccaaggattgtacagagttgtgggggtgagttcaaaggtccagagacttctgagtatgttgatggatgtaaaaacatgcaatgaggtggacctggagaattctgcagattgggaagtgaagacaataacaagtgccttgaaacagtatttgaggagtcttccagagcctctcatgacctatgagttacatggagatttcattgttccagccaaaagcggcagcccagaatctcgtgttaatgcgatccatttcttggtacacaaactgccagagaagaataaagagatgttggatattttggtgaaacacttaacaaatgtttcaaatcactccaagcagaacctgatgactgtggcaaacttaggagtggtgtttggaccaactctgatgaggccacaggaagaaactgtcgctgccctcatggacttgaagtttcagaatattgttgtggaaatcttaattgaaaaccatgaaaagatttttcggacgccgcccgatactacattccctgagcccacctgcctgtcagcatcacccccaaatgcgccaccaaggcagtcgaagagacaaggccagagaaccaagaggcccgtggccgtctacaatctttgtctggagctggaagatggtgacaatccttacccttccaaggaggacacccctaccagcagtctggactcactttcctccccgtctcccgtgactacagctgtccctgggcctcctggaccagacaaaaaccaccttctggcagatggagggagctttggagactgggcatccactatcccaggccagacccgatcgtctatggtccagtggcttaacccacagtctccaaccacaacaagctccaactcagctgtgacacctctttcacccgggtcgtcccctttccccttttctcctcctgctactgtagcggacaagccacctgaaagcatccgcagtcggaaggctcgagccgtgtatccgtgtgaagcagaacacagctcggaattatcttttgaaataggagcaatttttgaggatgtacaaacctccagggaacctggctggctagaagggactctgaacggcaagagggggctgattccacagaactacgtcaagctgctgtagctcctggcctcagagcccctgctgaccctggcacccagggacctgcctgggggcagagagctgtcttcctcctccgaggctctgggctgcacccacaggtacctccacacttgggagttaccatcatcacagtcagccctgggggtggggggtggtgggcagggatgggacgcaccacacagaactgtgattgtggatcaggaggggaatgtcaggattcgcaaaatggacttttcatttgtcaagtattgggacttgtgatttttaattatccagcatatagaatgagagggagggcagccttctgccacctgtgtcgcctccactggcagtcacgccaccagagccaccctggctccctctcctccctgagcacctgctgctgcgattttaaagggaactgtactactcgcagtgataggtttgcagagtgtgtgcttggctgtggcagcctagcttggagaagctgctgttggtgcaagggagatggtctcaagtcagagggaagcagagacgcgcgtctcaagcctgcccttcctagacggccacctgcaggaccccacactcactgcactggcagcgtgcactggcgtatttgtaacaggcttctcggtgctcctcacccgtgtgctgttttccaaacaccaacccaccctttgtaatttacaatcacacggtggctcctgtaaattaacctatatttt

SEQ ID NO: 342609 - DNA, 1922 bp, Homo sapiens
gcttcgtctgttaatcctgtccgcaggattaataagtctgcagcacggagtgagcagtcagcgatggtgctgttgtcgggagggcgagtctcccccttgatgctttggactggattaagcggctgcgttaggctcccagaccccaatgccaggggcctgttgttgatggctggaatgccactatgctcgcttcttgattactctctgacccatctcatcttgtgggtcttcgttcaggtcatctctctcctgacgggaagaagctagtgtcacttggacttaagaaatgtttctgatttgcacactttattttctttgttctcccagagttgctaaccaagtcctttaaatgcttcgggtttaccaactctgagtcaacagaggatactactgtccttaaaaatttttgatttctatttctcttaccatttttgtgctttacatttttgctgatttgaacagtgtgtgagtctccagattcgggtattgactttgcatattgaaacaagggtgtagcttttgaggatttaatattcatacacaagcatttaggagctatgcctggttaaatatttcaaaaagttctcttatggctcagtgtctttttttctcctgctcttgctttcttccctccccagtcctgctcattatgaaatgcattagttgctgtggaaaccgtgatgtcgtgtgtgggtggagctcctcagaagagttccagggaagcagtaggaaccttagctgcttggaatggaatggttgattatccagaatgtttgggatatgtggaatgtatcaacacgaggcacagtggtgtactgtcagtaatgcagcatttgctgacgattgttttttagaaagcaagttgcctcatttagaatagatttctatatgcgtgtgatatgtactcttcagagacagagactcctggtagtgtcagaaaacaaacaacaacaacaaaaccccacatggaacagaattagactttgtggagaaattttgttcttggaatagaagcaagatcattcctccatcaccataacatacatgcagttttgccaagagaatgtggaacgtagctgccctgccccaggcctgtctcatgttggcacaccatatggctgaaggggaggatgcgatgtacaaacctccagggaacctggctggctagaagggactctgaacggcaagagggggctgattccacagaactacgtcaagctgctgtagctcctggcctcagagcccctgctgaccctggcacccagggacctgcctgggggcagagagctgtcttcctcctccgaggctctgggctgcacccacaggtacctccacacttgggagttaccatcatcacagtcagccctgggggtggggggtggtgggcagggatgggacgcaccacacagaactgtgattgtggatcaggaggggaatgtcaggattcgcaaaatggacttttcatttgtcaagtattgggacttgtgatttttaattatccagcatatagaatgagagggagggcagccttctgccacctgtgtcgcctccactggcagtcacgccaccagagccaccctggctccctctcctccctgagcacctgctgctgcgattttaaagggaactgtactactcgcagtgataggtttgcagagtgtgtgcttggctgtggcagcctagcttggagaagctgctgttggtgcaagggagatggtctcaagtcagagggaagcagagacgcgcgtctcaagcctgcccttcctagacggccacctgcaggaccccacactcactgcactggcagcgtgcactggcgtatttgtaacaggcttctcggtgctcctcacccgtgtgctgttttccaaacaccacctttttgcctcaaggtctctgtaaatgaaataaactgtaatttacta

SEQ ID NO: 342610 - DNA, 320 bp, Homo sapiens
gtgagtattgccaagttgtttgctggtggatttttgcaatgtaagataagtatttattttcctagatctgatttatggtttatagttactagaggccatagtgcataaacatgaaagagacatattaaaaagggcagacacagatagccatgaagtcaaggaattgcctctaaatcagtggttctcagctgtatttgcactgataatacacgtaatattcccattgctacatgatctcaaggaaggcaaccatgtgcaatttctgccaccttagcctatagctctatcttttaaaaatttctctgaaataatttatacta

SEQ ID NO: 342611 - DNA, 670 bp, Homo sapiens
gatctgggccagtggtttctcacctgtggagtgtggctgtgccgcctccttctgccggctggccgtgtgtctccaggtgcgtgtgcttttcctaatagaccaactgaagtgcttggagataaacatgtcctgtggttctaacagtgctgaatggtaggaaagggcatcccaccaggtagggaggagaattaggtgaagtggttcagtgacagctcctcagagaggctccctgaggaaaggcttgaattggaaacccatcatttacttgaaaatcaagtactgttcttagcctgatgttcacttccacgttaatttctcttttgggaggagttgccctactggtgacatcagtgagatttggggaaggggggttggggggtgaagtttctctctgttttccacattttcattggtgtcttttgtattctctttcttttcagcatccgcagtcggaaggctcgagccgtgtatccgtgtgaagcagaacacagctcggaattatcttttgaaataggagcaatttttgaggatggtaagtgttagtgggagcttcgtctgttaatcctgtccgcaggattaataagtctgcagcacggagtgagcagtcagcgatggtgctgttgtcgggagggcgagtctcccccttgatgctttggactggattaagcgg

SEQ ID NO: 342612 - DNA, 457 bp, Homo sapiens
tggaatagaagcaagatcattcctccatcaccataacatacatgcagttttgccaagagaatgtggaacgtagctgccctgccccaggcctgtctcatgttggcacaccatatggctgaaggggaggatgcgatggtagtattgaaacgcactcatttgagaaatgtgatgaatttttattttgtgtgattggatttgtttagaagactctgaactccctcctgcagtatggtttgtgagatagttaccttggtagaaggtgtatctactaggataccttaggctgcaggtaacaaaaattgacacaactgtttgaatcaatcatgaagatggattaaagtcaggtgcagtggtgcacacctgttgtgccagctactgcagaggctgaggcaggaggatcacttgtgcccaggagttcgaggccagcctggataacacagtgagaccccatctcaaa

SEQ ID NO: 342613 - DNA, 2903 bp, Homo sapiens
atggggctgcagcccctggagttcagcgactgctacctcgacagcccgtggttccgggagaggatccgcgctcacgaagcggaactcgagaggaccaacaagttcatcaaagagctcattaaggacgggaagaacctcatcgctgcgacgaaaagtctgtcagtggcccagcggaagtttgctcattcactcagagactttaagtttgagtttatcggtgatgctgtgacagatgatgaacgatgcatagatgcttccttacgtgaattttcaaattttttgaagaatctggaggaacagagagaaattatggcattaagtgtaactgaaaccctgattaaacccttggaaaaattcagaaaagagcaacttggagctgtaaaggaagaaaaaaagaagtttgacaaagagacagaaaagaattatagtctaattgataaacatttgaatttatcagcaaaaaagaaagactcacatttacaagaggcagatatccaagtagagcagaaccggcaacacttctatgaactgtctctcgagtatgtgtgtaagctgcaggaaatccaagaaagaaagaagtttgagtttgtggaacctatgctgtcattttttcaggggatgtttaccttctatcatcagggccatgaacttgccaaagacttcaatcactacaaaatggaactacagatcaacattcagaatacacggaatcgatttgaaggaacaaggtcagaagtggaagagctcatgaacaaaatcagacagaatcccaaggaccacaaacgagcaagtcagtttacagccgaaggctacctgtatgtccaggaaaaaaggcctgctccgtttggttccagttgggtcaaacactattgcatgtatcgaaaagcagcaaagaagttcaacatgatcccatttgagcacagatctggagggaaacttggggacggagaggtgttctttttgaaagaatgtaccaagaggcatactgactccattgacagaaggttttgttttgacatagaagctgctgatcggcctggcgtttccttgaccatgcaggcattttccgaagaggaaaggaagcagtggttggaagctctgggtggaaaggaagctctgtcccatagttttaatacagccatcatcccaagaccagaaggaaatgcacagttggataagatggggttcacaattatcagaaaatgcatcagtgccgttgaaacacgaggtataaatgaccaaggattgtacagagttgtgggggtgagttcaaaggtccagagacttctgagtatgttgatggatgtaaaaacatgcaatgaggtggacctggagaattctgcagattgggaagtgaagacaataacaagtgccttgaaacagtatttgaggagtcttccagagcctctcatgacctatgagttacatggagatttcattgttccagccaaaagcggcagcccagaatctcgtgttaatgcgatccatttcttggtacacaaactgccagagaagaataaagagatgttggatattttggtgaaacacttaacaaatgtttcaaatcactccaagcagaacctgatgactgtggcaaacttaggagtggtgtttggaccaactctgatgaggccacaggaagaaactgtcgctgccctcatggacttgaagtttcagaatattgttgtggaaatcttaattgaaaaccatgaaaagatttttcggacgccgcccgatactacattccctgagcccacctgcctgtcagcatcacccccaaatgcgccaccaaggcagtcgaagagacaaggccagagaaccaagaggcccgtggccgtctacaatctttgtctggagctggaagatggtgacaatccttacccttccaaggaggacacccctaccagcagtctggactcactttcctccccgtctcccgtgactacagctgtccctgggcctcctggaccagacaaaaaccaccttctggcagatggagggagctttggagactgggcatccactatcatccgcagtcggaaggctcgagccgtgtatccgtgtgaagcagaacacagctcggaattatcttttgaaataggagcaatttttgaggatgtacaaacctccagggaacctggctggctagaagggactctgaacggcaagagggggctgattccacagaactacgtcaagctgctgtagctcctggcctcagagcccctgctgaccctggcacccagggacctgcctgggggcagagagctgtcttcctcctccgaggctctgggctgcacccacaggtacctccacacttgggagttaccatcatcacagtcagccctgggggtggggggtggtgggcagggatgggacgcaccacacagaactgtgattgtggatcaggaggggaatgtcaggattcgcaaaatggacttttcatttgtcaagtattgggacttgtgatttttaattatccagcatatagaatgagagggagggcagccttctgccacctgtgtcgcctccactggcagtcacgccaccagagccaccctggctccctctcctccctgagcacctgctgctgcgattttaaagggaactgtactactcgcagtgataggtttgcagagtgtgtgcttggctgtggcagcctagcttggagaagctgctgttggtgcaagggagatggtctcaagtcagagggaagcagagacgcgcgtctcaagcctgcccttcctagacggccacctgcaggaccccacactcactgcactggcagcgtgcactggcgtatttgtaacaggcttctcggtgctcctcacccgtgtgctgttttccaaacaccacctttttgcctcaaggtctctgtaaatgaaataaactgtaatttacta

SEQ ID NO: 342614 - DNA, 1496 bp, Homo sapiens
gggagatcgggagctcgagaccagcctgaccaatatgatgaaaccccgtctctactaaaaatacataaattagctgggcatggtggcatgcacctgtaatcccagctacttgggaggctgagacaggagaattgcttgaacccgggaggcagaggttgcagtgagccgagattgcgcaattgcatgccagcctgggtaacgagcaaaactccatcttaaaaaaacccacaaaaggtcctggcctgcagtcaatccctggaatcattgtaccttcccttgagacccgaagtggactattccaacagaaccccctcatccttgagtctatggcacaacccactggaatggcactacaggatcttttctgtgaatgtcctccaacccccctttccgtggtgggaaatttgatcctaactagggctaatccagcctgtccttcagcctcagccccctattttcctgtcctcagagtccctggagcttgtactgtgtggcatgtcctttcttgccttccccaccttgctcagtagcatttctcagggacccagtcgaatccaagcccatggattcaattgtcacatccttcatcttccatccgtgtctcctaatctgtgtgctcttgctttctttcctcggagctctggactgacccgacagcctgtcttcatgtagcagtaccctcctgcctccatagcccccggtcccacccccatcctaccaattaggccagcagttggccttaactgcttgattaatttccttggactgccataacagatcaccattgggtggtgaacttgatggcttaagtccaacaggaatttaattcacacagttctggagtccagaagtctgaaaccaaggtgctgacagggacacactccctcttccagctcctggtgattccaggccttccttggctctgcctgcagcttcacatggccttttccctcttctattttgtctcttacaagaacacctgtcattgcatttagggcccatcttaagttcaggatgatcccacctcaagacccttaattacatctgaaaaaacactttttccaaataaactgtcataagcacaggtcctgggggttagtatgtggacttgtctgttgggggcacaccattcaagccattcagcccactattcctcctcaccccaagagtacgctggcgtccaggtgcagtggctcacacctgtaatcccagcactttgggagaccaggcaggagggatctctttgagcccaggagctgaagaccagcctgggcaacatagtgagaccccatctctacaaaagtaaaataaaaaattagccaggtgcggtgatgcatgcctgtagtcccagctacttgggaggctgaggcaggaggatcacctgagccctggaggtcgaggctgcagcgagccgtgatcgcgccactacactccagcctggatgacagagtgagaccctttctcagaaaaaaagtaccctgggactcctgccaacc

SEQ ID NO: 342615 - DNA, 855 bp, Homo sapiens
gggagatcgggagctcgagaccagcctgaccaatatgatgaaaccccgtctctactaaaaatacataaattagctgggcatggtggcatgcacctgtaatcccagctacttgggaggctgagacaggagaattgcttgaacccgggaggcagaggttgcagtgagccgagattgcgcaattgcatgccagcctgggtaacgagcaaaactccatcttaaaaaaacccacaaaaggtcctggcctgcagtcaatccctggaatcattgtaccttcccttgagacccgaagtggactattccaacagaaccccctcatccttgagtctatggcacaacccactggaatggcactacaggatcttttctgtgaatgtcctccaacccccctttccgtggtgggaaatttgatcctaactagggctaatccagcctgtccttcagcctcagccccctattttcctgtcctcagagtccctggagcttgtactgtgtggcatgtcctttcttgccttccccaccttgctcagtagcatttctcagggacccagtcgaatccaagcccatggattcaattgtcacatccttcatcttccatccgtgtctcctaatctgtgtgctcttgctttctttcctcggagctctggactgacccgacagcctgtcttcatgtagcagtaccctcctgcctcacacctgcaatcccagcactttggaaggtcgaggtgggcgggtcatttgaagtcgggaggtcgggagatcgggagatcgagaccagcctggccaacatggcaaaaccccgtctctactaaaaatacaaaaattagccgggcatgttggcacattcctgaatcccag

SEQ ID NO: 342616 - DNA, 373 bp, Homo sapiens
tcaatttctgacaataatcacaataataatgaccctggacaagtaaccttaacctcttgcctcattttcttcataagaaaaaaaaaaggtactttcgctgcttatcttacagatttgttgtgacaatttaatgagagccaattagcatgctttaaaaaccatatggagctctatacaaatacaaagccttagttttgccgcatgttttggtgaaaagagaaagaagtgggaggagaagtgcttatcataagtaaggcctcttctctatcaaactaggaaactaatgcaggtgagggttgaacaagggcaagaggaatctgaaatggttacgtaggcatctaagcctattttcaatactttggtaatcccatgg

SEQ ID NO: 342617 - DNA, 307 bp, Homo sapiens
gtatgtgcaccttcatcctgagccccagagcttagttaaatccacccccagtatcctcaggccccactggcagccttccctgcccccaccaccagtgagccacttaatgatttgtgacatcccaaagtcccgaactgtcttgtcaccccagtcactggttcaggcccttccttgcccctccttctagagaaagagccctccagctcacctcagagaagatacaagatccctacagacaccattgtagggaccagccccacagggtcggtgggtctctacctgtgtgagacgacgagagagtgtagaa

SEQ ID NO: 342618 - DNA, 1160 bp, Homo sapiens
ggctgccactctcactgccagaccatgccatcaactgcgtgcgcatgggcctggacatgtgccgggccatcaggaaactgcgggcagccactggcgtggacatcaacatgcgtgtgggcgtgcactcaggcagcgtactgtgtggagtcatcgggctgcagaagtggcagtacgacgtttggtcacatgatgtcacactggctaaccacatggaggcaggcggtgtaccagggtgagacctagggccctaggcagctacagcagaaggccaaccaggcctaccacaggctgccatcctttcattagttccttaagataagcacaagatgagtaccttaagataagtcccatatggggcttgggagatcctagggtgcagggaggggagctgggaggcacctcctgtaacacaggctctttcttgaagtcagacatccaggaacgatctttaaaagacatgagatgtttgtcagttctaggagccatgggggtgatggggcaggaaataggagatttgaaggccctccctgctgacccctactgcctccctccttccaggcgagtgcacatcacaggggctaccctggccctgctggcaggggcttatgctgtggaggacgcaggcatggagcatcgggacccctaccttcgggagctaggggagcctacctatctggtcatcgatccacgggcagaggaggaggatgagaagggcactgcaggaggcttgctgtcctcgcttgagggcctcaagatgcgtccatcactgctgatgacccgttacctggagtcctggggcgcagccaagccttttgcccacctgagccacggagacagccctgtgtccacctccacccctctcccggagaagaccctggcttccttcagcacccagtggagcctggatcggagccgtaccccccggggactagatgatgaactggacaccggggatgccaagttcttccaggtcattgagcagctcaactcgcagaaacagtggaagcagtcgaaggacttcaacccactgacactgtacttcagagagaaggagatggagaaagagtaccgactctctgcaatccccgccttcaaatactatgaagcctgcaccttcctggtttttctctccaacttcatcatccagatgctagtgacaa

SEQ ID NO: 342619 - DNA, 1134 bp, Homo sapiens
ggctgccactctcactgccagaccatgccatcaactgcgtgcgcatgggcctggacatgtgccgggccatcaggaaactgcgggcagccactggcgtggacatcaacatgcgtgtgggcgtgcactcaggcagcgtactgtgtggagtcatcgggctgcagaagtggcagtacgacgtttggtcacatgatgtcacactggctaaccacatggaggcaggcggtgtaccagggtgagacctagggccctaggcagctacagcagaaggccaaccaggcctaccacaggctgccatcctttcattagttccttaagataagcacaagatgagtaccttaagataagtcccatatggggcttgggagatcctagggtgcagggaggggagctgggaggcacctcctgtaacacaggctctttcttgaagtcagacatccaggaacgatctttaaaagacatgagatgtttgtcagttctaggagccatgggggtgatggggcaggaaataggagatttgaaggccctccctgctgacccctactgcctccctccttccaggcgagtgcacatcacaggggctaccctggccctgctggcaggggcttatgctgtggaggacgcaggcatggagcatcgggacccctaccttcgggagctaggggagcctacctatctggtcatcgatccacgggcagaggaggaggatgagaagggcactgcaggaggcttgctgtcctcgcttgagggcctcaagatgcgtccatcactgctgatgacccgttacctggagtcctggggcgcagccaagccttttgcccacctgagccacggagacagccctgtgtccacctccacccctctcccggagaagaccctggcttccttcagcacccagtggagcctggatcggagccgtaccccccggggactagatgatgaactggacaccggggatgccaagttcttccagacagtggaagcagtcgaaggacttcaacccactgacactgtacttcagagagaaggagatggagaaagagtaccgactctctgcaatccccgccttcaaatactatgaagcctgcaccttcctggtttttctctccaacttcatcatccagatgctagtgacaa

SEQ ID NO: 342620 - DNA, 541 bp, Homo sapiens
agcccagcaacctgcttagactccagggatgcctccaagcaaccaattcttggattccccccaacctctcaatcctgagaccactaccacgtactcaactctgggtacccccttcaacatgccaaaagtggaaagagccacagccatccagcccttggggaaactcttctgagaaagagatctgtatgaaagacagttagccccatatcaagtgaaaggagtccctagatctgatctagacactaccccaccttggaagttcttcaggaataccccgctcgctgcccacttttcccaactccctcctacccttctgacctctaaccaggttcctctgcacacccacatacacactcccaggagcatgaatgcatgcggatcaagatcctgggggactgttactactgtgtctctgggctgccactctcactgccagaccatgccatcaactgcgtgcgcatgggcctggacatgtgccgggccatcaggtcagctcaggcggtggtcaagaggaatgctgagggtggatgtggggggcagc

SEQ ID NO: 342621 - DNA, 834 bp, Homo sapiens
ggctgccactctcactgccagaccatgccatcaactgcgtgcgcatgggcctggacatgtgccgggccatcaggaaactgcgggcagccactggcgtggacatcaacatgcgtgtgggcgtgcactcaggcagcgtactgtgtggagtcatcgggctgcagaagtggcagtacgacgtttggtcacatgatgtcacactggctaaccacatggaggcaggcggtgtaccagggcgagtgcacatcacaggggctaccctggccctgctggcaggggcttatgctgtggaggacgcaggcatggagcatcgggacccctaccttcgggagctaggggagcctacctatctggtcatcgatccacgggcagaggaggaggatgagaagggcactgcaggaggcttgctgtcctcgcttgagggcctcaagatgcgtccatcactgctgatgacccgttacctggagtcctggggcgcagccaagccttttgcccacctgagccacggagacagccctgtgtccacctccacccctctcccggagaagaccctggcttccttcagcacccagtggagcctggatcggagccgtaccccccggggactagatgatgaactggacaccggggatgccaagttcttccaggtcattgagcagctcaactcgcagaaacagtggaagcagtcgaaggacttcaacccactgacactgtacttcagagagaaggagatggagaaagagtaccgactctctgcaatccccgccttcaaatactatgaagcctgcaccttcctggtttttctctccaacttcatcatccagatgctagtgacaa

SEQ ID NO: 342622 - DNA, 1240 bp, Homo sapiens
ggctgccactctcactgccagaccatgccatcaactgcgtgcgcatgggcctggacatgtgccgggccatcaggaaactgcgggcagccactggcgtggacatcaacatgcgtgtgggcgtgcactcaggcagcgtactgtgtggagtcatcgggctgcagaagtggcagtacgacgtttggtcacatgatgtcacactggctaaccacatggaggcaggcggtgtaccagggtgagacctagggccctaggcagctacagcagaaggccaaccaggcctaccacaggctgccatcctttcattagttccttaagataagcacaagatgagtaccttaagataagtcccatatggggcttgggagatcctagggtgcagggaggggagctgggaggcacctcctgtaacacaggctctttcttgaagtcagacatccaggaacgatctttaaaagacatgagatgtttgtcagttctaggagccatgggggtgatggggcaggaaataggagatttgaaggccctccctgctgacccctactgcctccctccttccaggcgagtgcacatcacaggggctaccctggccctgctggcaggggcttatgctgtggaggacgcaggcatggagcatcgggacccctaccttcgggagctaggggagcctacctatctggtcatcgatccacgggcagaggaggaggatgagaagggcactgcaggaggcttgctgtcctcgcttgagggcctcaagatgcgtccatcactgctgatgacccgttacctggagtcctggggcgcagccaagccttttgcccacctgagccacggagacagccctgtgtccacctccacccctctcccgagaaagagccctccagctcacctcagagaagatacaagatccctacagacaccattgtagggaccagccccacagggtcggagaagaccctggcttccttcagcacccagtggagcctggatcggagccgtaccccccggggactagatgatgaactggacaccggggatgccaagttcttccaggtcattgagcagctcaactcgcagaaacagtggaagcagtcgaaggacttcaacccactgacactgtacttcagagagaaggagatggagaaagagtaccgactctctgcaatccccgccttcaaatactatgaagcctgcaccttcctggtttttctctccaacttcatcatccagatgctagtgacaa

SEQ ID NO: 342623 - DNA, 277 bp, Homo sapiens
gataaagatctctaaattagaggagagaaaaagaattttagattgcaagttttagattacattcctatgttcatggagtaatgtctagtagaactttgagatgtgactggcattacagaaataggtcagaaatggagaacagtttaggaatattccaaatagtagtgacaccatgtcatcagagttgatgagttctcaggcaacgcagccacctaaagtgaagaacagagacctgaggacgaaatccttggaaaagactcccactaagcaagcctga

SEQ ID NO: 342624 - DNA, 4039 bp, Homo sapiens
  misc_feature (2568)..(2568): n is a, c, g, or t
taggggcaagattagaagctgggagaccatggatattaggcaagaaattatgagtatttgttggcaagatacagtgctattaattggaaagagttatttaggagattagcaaataattacatattgggtgacatggttgggagacagctcagtgcagagataagagaaagaagttttggtgaattgcatggttttgccccaggcaactgggtggacggtggaactgtaaattgagaatgattacaataatgctaacatttaaggggtatttagtatgttccaagcactgtgctgtatgctttacacaaagtaacttattcctcataataacctgtgaagtcggtaaactattacccccattttatagatggggaagctgagacctggagacaaaacggaagtcccacttagctaagattctaaaccagacattctgactccagaacccagcgcatagactctatattacggcaatattatagcccataccattgtcaataatagtatgaaatttgacatctcctaatcaactttatatctcacacatatggagtgatgacaaataatgccttaggtcaccacattagttggagaaatgtagcattaaattaccgtctcttatagtaaattaccatcaaataatgaatttgtgccaagtacaagagcactgaatttcccaacaatagatttataaataacaattggaggaaagtttagaagtaggcagtattttgaaaatttggcagttgctttttatattgcttgttttacatttttaatacaaatgtagggggaattctcagcatcttagtacttctcttcacatagctaacctagtgtcttacagtggaaacgcatgtattccgttggaaacaggaagacaggaagtagaggcagtggataaagacaaccctttgaagaatttttttctttctttttttaatgggagcagtgcacaagtgcagggacttgagatgggagtactggcagcggagcggtgggagcggtagggaagctcagtacgtgaggggtgcagctgcagagagttgatcagtgtggtgttggagcgtgtgcttccgtattttcaaggaaataaaagaaatgaggttatgaggccttcccttccactagtcctttgggaccgttcttgtcaagaaccctggtgatgcccatactgctagactcccggtcagttcaccattctcctcctcctccatttgacagttcgtgattccctcctcttttctgaaatgctttcttcacttgctggtgaccattctcttttcccttctgcctcaccgccacttcttctcagcctcatttgcctcttgcctctttatcttctggacttcaaggtccagtgcacagtagatggactgcctttttctctgtttgcagccgctccccaggggacctcatgaagcccggtgattctgaatgccgtggatctgccgaggattcccagatgcgtatttctcctccgtacttccccacaggacagcaggcttgaatagctgattgcctatgcaggacaacaggcttgaatagctgactgcctatgcattctctttgcttgccagttttttggacatcaaacttgacagatccaagattattactttgatcttccccacacccctcccacccccgagtctactatggtcccatcatagtattctgaaaatcagtgaatggccactctaccagttatttctaccagtttttaggttctaaacctcaggcattctggactcttctgttcattatcatattttgaaggcattatcttcaaaatctatctagactctgaccctttctcccatctccaccattactgccgtggctcttctgctggtcggctctctcctggtggatcgtaataacctgcagtcagctatcctggtccagagggagcccgttaaaccctgtggaatcttatcacgcttctgctcagaacgagccagtgtctttctgtctcactcagagtgtaagctacagtccttattgtggccatcaggtgctgtgtgttctccagccccctccccaccaccgcagtcctgccggtgatcttagctgctctcccctcggcaccccctgcggccccctctgccgcagcactcgtggcctgctgttccttgaacatgcttggtgttttctctcctcaaaggcttctttctgtttacctgaaatgtactttcctagggaatctatctggctcactcgcttactttttccacatctttgcttaagtattgccttattggagaggcaccctaccataaactagaatcccttgccccagctgctctttgtcctccgtattgggctttgtttttgttcttaccagttagaaccacttgacacacgatacatgtgtttgttacccttttctaccactagaacagacgctccatggtggtatagacttatttccgcaaaccaccccccccaactttttttacacaatggttaaataacacacatatttttaatgcaatgcctgatatcacaaagcctaaaataacaatgtttggcacattatagctgtttagtaaaaggttattaaangaattgactatatgaatgaatgcttagtaaatagcttttccatttatctgtagttgctctataaatcagtattgatgtaattgagtgtttttcttcctccacagtacaatggtcagttccgttcaaggaaacacatatcccagccaggcgccagtatatagtcctcctcctgccgctactgctgctgctgcaactgccgatgtcactctgtaccagaatgcaggacctaatatgccccaggtgccaaactataacttaacatcatcaactctgcctcagcccggaggcagccaacagccacctcagccacagcaaccatattctcagaaggctctgctataggacccggtgttcctcttggtggcagatacctgctaaatgccactgacaatgttatgagattcattactatcttaagatgtgtttatcctcagcttataggaatctctccaggtcaacaggttcaaatattcaagaaggtagaactctcctcaatttacactgactttttagaggttcttccccccccgcccctgcagaggaatgaaactacttacaacatttaattcctttcataatatgaaagaattgatacaaggctatttgtctcgtaaacctggtctgcagaaagtcaaacttacaaaaactgttgtgacaaatgttatgtacatatattgatatgtaactgcattagtggccattttgaatcacagtggtgatcgtgtgaatatatttaacactgtgttaaattaatttacgttgctattttattttaatcataaacaactaccatgtttcttaatgttttgtgtaaatttaaggtaattatactatccttttaaacttcaagaaaacaaagttgttagcgtatttacatgaaggcgcattatgttgtcgtgtgtttcagtttcacattaaactgaaccttttactaattgtgagctaaagagatatatatatatatgtgtgtgtatatatatatatctacatgtctttctgtagcctctgcatactactggctgtcatcacaccagcgtacagtagctaaatttttggtgcaattatagcaaatgataatgttcccttttgaacttttacattttggcatgacatttcagagtattgtgggaccatgagacaaaattaagtacgatcacattctttatttctcattttaaagaaatgatgttggtttaccttttcctagttgaagatagtaattaggtttctaagctgtatactgtgtttattggtggcagtgacaccaaagatagaggcaatggatagaaatttttaaactggaaagaaaacctgaattacactacattttcgaagtctcttgtaattatttgggatatcaacaaaatttgattcgtctgtctaatcccttgctagtattttaaatatgtctttaacacattgtatcctttaattcttcattaaaatggaaataagtagatgtttcaaagta

SEQ ID NO: 342625 - DNA, 518 bp, Homo sapiens
  misc_feature (147)..(147): n is a, c, g, or t
  misc_feature (166)..(167): n is a, c, g, or t
  misc_feature (170)..(170): n is a, c, g, or t
gaacagagtgacatcgccagttcagcaagcacagtatgcggcagcagcaggcttatatactggcgcctggctataatatgtgtttctttgaacggaactgcccattgtttttgggtgagcggcctgagtctgctgactaggaagggntgggttggcggatggtggnnccnctgcctggcatgagacaaaattaagtacgatcacattctttatttctcattttaaagaaatgatgttggtttaccttttcctagttgaagatagtaattaggtttctaagctgtatactgtgtttattggtggcagtgacaccaaagatagaggcaatggatagaaatttttaaactggaaagaaaacctgaattacactacattttcgaagtctcttgtaattatttgggatatcaacaaaatttgattcgtctgtctaatcccttgctagtattttaaatatgtctttaacacattgtatcctttaattcttcattaaaatggaaataagtagatgtttcaaagta

SEQ ID NO: 342626 - DNA, 776 bp, Homo sapiens
  misc_feature (736)..(736): n is a, c, g, or t
  misc_feature (772)..(772): n is a, c, g, or t
taggggcaagattagaagctgggagaccatggatattaggcaagaaattatgagtatttgttggcaagatacagtgctattaattggaaagagttatttaggagattagcaaataattacatattgggtgacatggttgggagacagctcagtgcagagataagagaaagaagttttggtgaattgcatggttttgccccaggcaactgggtggacggtggaactgtaaattgagaatgattacaataatgctaacatttaaggggtatttagtatgttccaagcactgtgctgtatgctttacacaaagtaacttattcctcataataacctgtgaagtcggtaaactattacccccattttatagatggggaagctgagacctggagacaaaacggaagtcccacttagctaagattctaaaccagacattctgactccagaacccagcgcatagactctatattacggcaatattatagcccataccattgtcaataatagtatgaaatttgacatctcctaatcaactttatatctcacacatatggagtgatgacaaataatgccttaggtcaccacattagttggagaaatgtagcattaaattaccgtctcttatagtaaattaccatcaaataatgaatttgtgccaagtacaagagcactgaatttcccaacaatagatttataaataacaattggagaagttaaatagcagatttgaattgcagtntttaatgtgttctttatcaatgagggatctacttancttt

SEQ ID NO: 342627 - DNA, 569 bp, Homo sapiens
ctaaaatgcaggatatttttgttataagtgaaatttttaataatgtctactagtactactttttgccatttttgatattttgatgtatcattatttagagcattatatcattttagtaacagctatgcttcaaattattgtgtcatgtttcagaaaacattcagaactctcagaacttaatgtgaaagtgatggaggccctttccttatataccaagttaatgaacgaagatccgatgtattccatgtatgcaaagttacagaatcagccatattatatgcagtcatctggtgtttctggttctcaggtgtatgcagggcctcctccaagtggtgcctacctggttgcagggaacgcgcagatgagccacctccagagctacagtcttcccccggagcagctgtcttctctcagccaggcagtggtcccaccatccgcaaacccagcccttcctagtcagcagactcaggccgcttacccaaagtaattttactgttgattcttgtttggagttagtgctgttacagctgtttaagtgcccccagttatctataactataaaatctggc

SEQ ID NO: 342628 - DNA, 2598 bp, Homo sapiens
tacctgccacaattgagcccctttaacttctgattttgtgcttttagcttctaggagcatgtgtatcaaactgtggcaaaatttttcatttagaagtatgttcaagagattttgctagtgaagtaagcaacgtattaaataagggtcatcctaaagtatgtgaaaaattaaaggctcttatggttgaatggacagatgaatttaagaatgatccacagcttagtctaatatcagcaatgattaagaaccttaaggaacaaggagttacgttcccagctattggctctcaggctgcagaacaagcaaaagcaagcccagctcttgtagccaaggatcctggtactgtggctaacaaaaaagaagaagaagatttagcaaaagccattgagttgtctctcaaggaacaaaggcagcagtcaaccaccctttccactttgtatccaagcacatccagtctcttaactaaccaccaacatgaaggccgaaaagttcgtgctatatatgactttgaagctgctgaagacaatgaacttacttttaaagctggagaaattattacagttcttgatgacagtgatcctaactggtggaaaggtgaaacccatcaaggcatagggttatttccttctaattttgtgactgcagatctcactgctgaaccagaaatgattaaaacagagaagaagacggtacaatttagtgatgatgttcaggtagagacaatagaaccagagccggaaccagcctttattgatgaagataaaatggaccagttgctacagatgctgcaaagtacagaccccagtgatgatcagccagacctaccagagctgcttcatcttgaagcaatgtgtcaccagatgggacctctcattgatgaaaagctggaagatattgatagaaaacattcagaactctcagaacttaatgtgaaagtgatggaggccctttccttatataccaagttaatgaacgaagatccgatgtattccatgtatgcaaagttacagaatcagccatattatatgcagtcatctggtgtttctggttctcaggtgtatgcagggcctcctccaagtggtgcctacctggttgcagggaacgcgcagatgagccacctccagagctacagtcttcccccggagcagctgtcttctctcagccaggcagtggtcccaccatccgcaaacccagcccttcctagtcagcagactcaggccgcttacccaaatacaatggtcagttccgttcaaggaaacacatatcccagccaggcgccagtatatagtcctcctcctgccgctactgctgctgctgcaactgccgatgtcactctgtaccagaatgcaggacctaatatgccccaggtgccaaactataacttaacatcatcaactctgcctcagcccggaggcagccaacagccacctcagccacagcaaccatattctcagaaggctctgctataggacccggtgttcctcttggtggcagatacctgctaaatgccactgacaatgttatgagattcattactatcttaagatgtgtttatcctcagcttataggaatctctccaggtcaacaggttcaaatattcaagaaggtagaactctcctcaatttacactgactttttagaggttcttccccccccgcccctgcagaggaatgaaactacttacaacatttaattcctttcataatatgaaagaattgatacaaggctatttgtctcgtaaacctggtctgcagaaagtcaaacttacaaaaactgttgtgacaaatgttatgtacatatattgatatgtaactgcattagtggccattttgaatcacagtggtgatcgtgtgaatatatttaacactgtgttaaattaatttacgttgctattttattttaatcataaacaactaccatgtttcttaatgttttgtgtaaatttaaggtaattatactatccttttaaacttcaagaaaacaaagttgttagcgtatttacatgaaggcgcattatgttgtcgtgtgtttcagtttcacattaaactgaaccttttactaattgtgagctaaagagatatatatatatatgtgtgtgtatatatatatatctacatgtctttctgtagcctctgcatactactggctgtcatcacaccagcgtacagtagctaaatttttggtgcaattatagcaaatgataatgttcccttttgaacttttacattttggcatgacatttcagagtattgtgggaccatgagacaaaattaagtacgatcacattctttatttctcattttaaagaaatgatgttggtttaccttttcctagttgaagatagtaattaggtttctaagctgtatactgtgtttattggtggcagtgacaccaaagatagaggcaatggatagaaatttttaaactggaaagaaaacctgaattacactacattttcgaagtctcttgtaattatttgggatatcaacaaaatttgattcgtctgtctaatcccttgctagtattttaaatatgtctttaacacattgtatcctttaattcttcattaaaatggaaataagtagatgtttcaaagta

SEQ ID NO: 342629 - DNA, 2796 bp, Homo sapiens
aagctccgcgcgggggcttcctcggctccttgctgttgccgccgccgcagctgctgccgcggttggtggggttgggtgagaggaggagctgtcgcggaccctgtagagtcggtctctgttgctctttttgcctgaggagtcttccatcctacgtcgagctctgactcccgtgctgtcgagagggagtccccggggacacctcggcacgcagcggagatgcctctttttgccaccaatcccttcgatcaggatgttgagaaagcaaccagcgagatgaatactgctgaggactggggcctcattttggatatctgtgataaagttggtcagtctcgcactggggtcatcctaaagtatgtgaaaaattaaaggctcttatggttgaatggacagatgaatttaagaatgatccacagcttagtctaatatcagcaatgattaagaaccttaaggaacaaggagttacgttcccagctattggctctcaggctgcagaacaagcaaaagcaagcccagctcttgtagccaaggatcctggtactgtggctaacaaaaaagaagaagaagatttagcaaaagccattgagttgtctctcaaggaacaaaggcagcagtcaaccaccctttccactttgtatccaagcacatccagtctcttaactaaccaccaacatgaaggccgaaaagttcgtgctatatatgactttgaagctgctgaagacaatgaacttacttttaaagctggagaaattattacagttcttgatgacagtgatcctaactggtggaaaggtgaaacccatcaaggcatagggttatttccttctaattttgtgactgcagatctcactgctgaaccagaaatgattaaaacagagaagaagacggtacaatttagtgatgatgttcaggtagagacaatagaaccagagccggaaccagcctttattgatgaagataaaatggaccagttgctacagatgctgcaaagtacagaccccagtgatgatcagccagacctaccagagctgcttcatcttgaagcaatgtgtcaccagatgggacctctcattgatgaaaagctggaagatattgatagaaaacattcagaactctcagaacttaatgtgaaagtgatggaggccctttccttatataccaagttaatgaacgaagatccgatgtattccatgtatgcaaagttacagaatcagccatattatatgcagtcatctggtgtttctggttctcaggtgtatgcagggcctcctccaagtggtgcctacctggttgcagggaacgcgcagatgagccacctccagagctacagtcttcccccggagcagctgtcttctctcagccaggcagtggtcccaccatccgcaaacccagcccttcctagtcagcagactcaggccgcttacccaaatacaatggtcagttccgttcaaggaaacacatatcccagccaggcgccagtatatagtcctcctcctgccgctactgctgctgctgcaactgccgatgtcactctgtaccagaatgcaggacctaatatgccccaggtgccaaactataacttaacatcatcaactctgcctcagcccggaggcagccaacagccacctcagccacagcaaccatattctcagaaggctctgctataggacccggtgttcctcttggtggcagatacctgctaaatgccactgacaatgttatgagattcattactatcttaagatgtgtttatcctcagcttataggaatctctccaggtcaacaggttcaaatattcaagaaggtagaactctcctcaatttacactgactttttagaggttcttccccccccgcccctgcagaggaatgaaactacttacaacatttaattcctttcataatatgaaagaattgatacaaggctatttgtctcgtaaacctggtctgcagaaagtcaaacttacaaaaactgttgtgacaaatgttatgtacatatattgatatgtaactgcattagtggccattttgaatcacagtggtgatcgtgtgaatatatttaacactgtgttaaattaatttacgttgctattttattttaatcataaacaactaccatgtttcttaatgttttgtgtaaatttaaggtaattatactatccttttaaacttcaagaaaacaaagttgttagcgtatttacatgaaggcgcattatgttgtcgtgtgtttcagtttcacattaaactgaaccttttactaattgtgagctaaagagatatatatatatatgtgtgtgtatatatatatatctacatgtctttctgtagcctctgcatactactggctgtcatcacaccagcgtacagtagctaaatttttggtgcaattatagcaaatgataatgttcccttttgaacttttacattttggcatgacatttcagagtattgtgggaccatgagacaaaattaagtacgatcacattctttatttctcattttaaagaaatgatgttggtttaccttttcctagttgaagatagtaattaggtttctaagctgtatactgtgtttattggtggcagtgacaccaaagatagaggcaatggatagaaatttttaaactggaaagaaaacctgaattacactacattttcgaagtctcttgtaattatttgggatatcaacaaaatttgattcgtctgtctaatcccttgctagtattttaaatatgtctttaacacattgtatcctttaattcttcattaaaatggaaataagtagatgtttcaaagta

SEQ ID NO: 342630 - DNA, 3006 bp, Homo sapiens
aagctccgcgcgggggcttcctcggctccttgctgttgccgccgccgcagctgctgccgcggttggtggggttgggtgagaggaggagctgtcgcggaccctgtagagtcggtctctgttgctctttttgcctgaggagtcttccatcctacgtcgagctctgactcccgtgctgtcgagagggagtccccggggacacctcggcacgcagcggagatgcctctttttgccaccaatcccttcgatcaggatgttgagaaagcaaccagcgagatgaatactgctgaggactggggcctcattttggatatctgtgataaagttggtcagtctcgcactggacctaaggattgtcttcggtctattatgagaagagtgaaccacaaagatcctcacgttgctatgcaggctttgactcttctaggagcatgtgtatcaaactgtggcaaaatttttcatttagaagtatgttcaagagattttgctagtgaagtaagcaacgtattaaataagggtcatcctaaagtatgtgaaaaattaaaggctcttatggttgaatggacagatgaatttaagaatgatccacagcttagtctaatatcagcaatgattaagaaccttaaggaacaaggagttacgttcccagctattggctctcaggctgcagaacaagcaaaagcaagcccagctcttgtagccaaggatcctggtactgtggctaacaaaaaagaagaagaagatttagcaaaagccattgagttgtctctcaaggaacaaaggcagcagtcaaccaccctttccactttgtatccaagcacatccagtctcttaactaaccaccaacatgaaggccgaaaagttcgtgctatatatgactttgaagctgctgaagacaatgaacttacttttaaagctggagaaattattacagttcttgatgacagtgatcctaactggtggaaaggtgaaacccatcaaggcatagggttatttccttctaattttgtgactgcagatctcactgctgaaccagaaatgattaaaacagagaagaagacggtacaatttagtgatgatgttcaggtagagacaatagaaccagagccggaaccagcctttattgatgaagataaaatggaccagttgctacagatgctgcaaagtacagaccccagtgatgatcagccagacctaccagagctgcttcatcttgaagcaatgtgtcaccagatgggacctctcattgatgaaaagctggaagatattgatagaaaacattcagaactctcagaacttaatgtgaaagtgatggaggccctttccttatataccaagttaatgaacgaagatccgatgtattccatgtatgcaaagttacagaatcagccatattatatgcagtcatctggtgtttctggttctcaggtgtatgcagggcctcctccaagtggtgcctacctggttgcagggaacgcgcagatgagccacctccagagctacagtcttcccccggagcagctgtcttctctcagccaggcagtggtcccaccatccgcaaacccagcccttcctagtcagcagactcaggccgcttacccaaatacaatggtcagttccgttcaaggaaacacatatcccagccaggcgccagtatatagtcctcctcctgccgctactgctgctgctgcaactgccgatgtcactctgtaccagaatgcaggacctaatatgccccaggtgccaaactataacttaacatcatcaactctgcctcagcccggaggcagccaacagccacctcagccacagcaaccatattctcagaaggctctgctataggacccggtgttcctcttggtggcagatacctgctaaatgccactgacaatgttatgagattcattactatcttaagatgtgtttatcctcagcttataggaatctctccaggtcaacaggttcaaatattcaagaaggtagaactctcctcaatttacactgactttttagaggttcttccccccccgcccctgcagaggaatgaaactacttacaacatttaattcctttcataatatgaaagaattgatacaaggctatttgtctcgtaaacctggtctgcagaaagtcaaacttacaaaaactgttgtgacaaatgttatgtacatatattgatatgtaactgcattagtggccattttgaatcacagtggtgatcgtgtgaatatatttaacactgtgttaaattaatttacgttgctattttattttaatcataaacaactaccatgtttcttaatgttttgtgtaaatttaaggtaattatactatccttttaaacttcaagaaaacaaagttgttagcgtatttacatgaaggcgcattatgttgtcgtgtgtttcagtttcacattaaactgaaccttttactaattgtgagctaaagagatatatatatatatgtgtgtgtatatatatatatctacatgtctttctgtagcctctgcatactactggctgtcatcacaccagcgtacagtagctaaatttttggtgcaattatagcaaatgataatgttcccttttgaacttttacattttggcatgacatttcagagtattgtgggaccatgagacaaaattaagtacgatcacattctttatttctcattttaaagaaatgatgttggtttaccttttcctagttgaagatagtaattaggtttctaagctgtatactgtgtttattggtggcagtgacaccaaagatagaggcaatggatagaaatttttaaactggaaagaaaacctgaattacactacattttcgaagtctcttgtaattatttgggatatcaacaaaatttgattcgtctgtctaatcccttgctagtattttaaatatgtctttaacacattgtatcctttaattcttcattaaaatggaaataagtagatgtttcaaagtaatctacattcctggctttgcttaacgtttatataggta

SEQ ID NO: 342631 - DNA, 2399 bp, Homo sapiens
ggcgtatgttggctagattaggattgtaaaccctgtaccaaaagtgcttgcctagacaaataaatgttgagcgtctggaactggcagaatgttttagagaaagcaaccagcgagatgaatactgctgaggactggggcctcattttggatatctgtgataaagttggtcagtctcgcactggccattgagttgtctctcaaggaacaaaggcagcagtcaaccaccctttccactttgtatccaagcacatccagtctcttaactaaccaccaacatgaaggccgaaaagttcgtgctatatatgactttgaagctgctgaagacaatgaacttacttttaaagctggagaaattattacagttcttgatgacagtgatcctaactggtggaaaggtgaaacccatcaaggcatagggttatttccttctaattttgtgactgcagatctcactgctgaaccagaaatgattaaaacagagaagaagacggtacaatttagtgatgatgttcaggtagagacaatagaaccagagccggaaccagcctttattgatgaagataaaatggaccagttgctacagatgctgcaaagtacagaccccagtgatgatcagccagacctaccagagctgcttcatcttgaagcaatgtgtcaccagatgggacctctcattgatgaaaagctggaagatattgatagaaaacattcagaactctcagaacttaatgtgaaagtgatggaggccctttccttatataccaagttaatgaacgaagatccgatgtattccatgtatgcaaagttacagaatcagccatattatatgcagtcatctggtgtttctggttctcaggtgtatgcagggcctcctccaagtggtgcctacctggttgcagggaacgcgcagatgagccacctccagagctacagtcttcccccggagcagctgtcttctctcagccaggcagtggtcccaccatccgcaaacccagcccttcctagtcagcagactcaggccgcttacccaaatacaatggtcagttccgttcaaggaaacacatatcccagccaggcgccagtatatagtcctcctcctgccgctactgctgctgctgcaactgccgatgtcactctgtaccagaatgcaggacctaatatgccccaggtgccaaactataacttaacatcatcaactctgcctcagcccggaggcagccaacagccacctcagccacagcaaccatattctcagaaggctctgctataggacccggtgttcctcttggtggcagatacctgctaaatgccactgacaatgttatgagattcattactatcttaagatgtgtttatcctcagcttataggaatctctccaggtcaacaggttcaaatattcaagaaggtagaactctcctcaatttacactgactttttagaggttcttccccccccgcccctgcagaggaatgaaactacttacaacatttaattcctttcataatatgaaagaattgatacaaggctatttgtctcgtaaacctggtctgcagaaagtcaaacttacaaaaactgttgtgacaaatgttatgtacatatattgatatgtaactgcattagtggccattttgaatcacagtggtgatcgtgtgaatatatttaacactgtgttaaattaatttacgttgctattttattttaatcataaacaactaccatgtttcttaatgttttgtgtaaatttaaggtaattatactatccttttaaacttcaagaaaacaaagttgttagcgtatttacatgaaggcgcattatgttgtcgtgtgtttcagtttcacattaaactgaaccttttactaattgtgagctaaagagatatatatatatatgtgtgtgtatatatatatatctacatgtctttctgtagcctctgcatactactggctgtcatcacaccagcgtacagtagctaaatttttggtgcaattatagcaaatgataatgttcccttttgaacttttacattttggcatgacatttcagagtattgtgggaccatgagacaaaattaagtacgatcacattctttatttctcattttaaagaaatgatgttggtttaccttttcctagttgaagatagtaattaggtttctaagctgtatactgtgtttattggtggcagtgacaccaaagatagaggcaatggatagaaatttttaaactggaaagaaaacctgaattacactacattttcgaagtctcttgtaattatttgggatatcaacaaaatttgattcgtctgtctaatcccttgctagtattttaaatatgtctttaacacattgtatcctttaattcttcattaaaatggaaataagtagatgtttcaaagta

SEQ ID NO: 342632 - DNA, 2493 bp, Homo sapiens
aagctccgcgcgggggcttcctcggctccttgctgttgccgccgccgcagctgctgccgcggttggtggggttgggtgagaggaggagctgtcgcggaccctgtagagtcggtctctgttgctctttttgcctgaggagtcttccatcctacgtcgagctctgactcccgtgctgtcgagagggagtccccggggacacctcggcacgcagcggagatgcctctttttgccaccaatcccttcgatcaggatgttgagaaagcaaccagcgagatgaatactgctgaggactggggcctcattttggatatctgtgataaagttggtcagtctcgcactggacctaaggattgtcttcggtctattatgagaagagtgaaccacaaagatcctcacgttgctatgcaggctttgactcttctaggagcatgtgtatcaaactgtggcaaaatttttcatttagaagtatgttcaagagattttgctagtgaagtaagcaacgtattaaataagggtcatcctaaagtatgtgaaaaattaaaggctcttatggttgaatggacagatgaatttaagaatgatccacagcttagtctaatatcagcaatgattaagaaccttaaggaacaaggagttacgttcccagctattggctctcaggctgcagaacaagcaaaagcaagcccagctcttgtagccaaggatcctggtactgtggctaacaaaaaagaagaagaagatttagcaaaagccattgagttgtctctcaaggaacaaaggcagcagtcaaccaccctttccactttgtatccaagcacatccagtctcttaactaaccaccaacatgaaggccgaaaagttcgtgctatatatgactttgaagctgctgaagacaatgaacttacttttaaagctggagaaattattacagttcttgatgacagtgatcctaactggtggaaaggtgaaacccatcaaggcatagggttatttccttctaattttgtgactgcagatctcactgctgaaccagaaatgattaaaacagagaagaagacggtacaatttagtgatgatgttcaggtagagacaatagaaccagagccggaaccagcctttattgatgaagataaaatggaccagttgctacagatgctgcaaagtacagaccccagtgatgatcagccagacctaccagagctgcttcatcttgaagcaatgtgtcaccagatgggacctctcattgatgaaaagctggaagatattgatagaaaacattcagaactctcagaacttaatgtgaaagtgatggaggccctttccttatataccaagttaatgaacgaagatccgatgtattccatgtatgcaaagttacagaatcagccatattatatgcagtcatctggtgtttctggttctcaggtgtatgcagggcctcctccaagtggtgcctacctggttgcagggaacgcgcagatgagccacctccagagctacagtcttcccccggagcagctgtcttctctcagccaggcagtggtcccaccatccgcaaacccagcccttcctagtcagcagactcaggccgcttacccaaatacaatggtcagttccgttcaaggaaacacatatcccagccaggcgccagtatatagtcctcctcctgccgctactgctgctgctgcaactgccgatgtcactctgtaccagaatgcaggacctaatatgccccaggtgccaaactataacttaacatcatcaactctgcctcagcccggaggcagccaacagccacctcagccacagcaaccatattctcagaaggctctgctataggacccggtgttcctcttggtggcagatacctgctaaatgccactgacaatgttatgagattcattactatcttaagatgtgtttatcctcagcttataggaatctctccaggtcaacaggttcaaatattcaagaaggtagaactctcctcaatttacactgactttttagaggttcttccccccccgcccctgcagaggaatgaaactacttacaacatttaattcctttcataatatgaaagaattgatacaaggctatttgtctcgtaaacctggtctgcagaaagtcaaacttacaaaaactgttgtgacaaatgttatgtacatatattgatatgtaactgcattagtggccattttgaatcacagtggtgatcgtgtgaatatatttaacactgtgttaaattaatttacgttgctattttattttaatcataaacaactaccatgtttcttaatgttttgtgtaaatttttaaactggaaagaaaacctgaattacactacattttcgaagtctcttgtaattatttgggatatcaacaaaatttgattcgtctgtctaatcccttgctagtattttaaatatgtctttaacacattgtatcctttaattcttcattaaaatggaaataagtagatgtttcaaagta

SEQ ID NO: 342633 - DNA, 780 bp, Homo sapiens
aagctccgcgcgggggcttcctcggctccttgctgttgccgccgccgcagctgctgccgcggttggtggggttgggtgagaggaggagctgtcgcggaccctgtagagtcggtctctgttgctctttttgcctgaggagtcttccatcctacgtcgagctctgactcccgtgctgtcgagagggagtccccggggacacctcggcacgcagcggagatgcctctttttgccaccaatcccttcgatcaggatgttgagaaagcaaccagcgagatgaatactgctgaggactggggcctcattttggatatctgtgataaagttggtcagtctcgcactggacctaaggattgtcttcggtctattatgagaagagtgaaccacaaagatcctcacgttgctatgcaggctttgactcttctaggagcatgtgtatcaaactgtggcaaaatttttcatttagaagtatgttcaagagattttgctagtgaagtaagcaacgtattaaataagtgtctctctttgtcacccaggctggagtacagtggcgtgatctcagctgactatagcctctgcctcccgggttcaagtgattctcctgcctcagcctcctgagtagctgggattaccggcatgcgccaccacgcctggctggtttttgtagtgttagcagagatggggtttcaccatggggatggtcaggccagtctcgaactcctgaccttgtgattgcccacctcggccttccaaagtgctgggattacaggcatgagccaccgc

SEQ ID NO: 342634 - DNA, 2968 bp, Homo sapiens
aagctccgcgcgggggcttcctcggctccttgctgttgccgccgccgcagctgctgccgcggttggtggggttgggtgagaggaggagctgtcgcggaccctgtagagtcggtctctgttgctctttttgcctgaggagtcttccatcctacgtcgagctctgactcccgtgctgtcgagagggagtccccggggacacctcggcacgcagcggagatgcctctttttgccaccaatcccttcgatcaggatgttgagaaagcaaccagcgagatgaatactgctgaggactggggcctcattttggatatctgtgataaagttggtcagtctcgcactggacctaaggattgtcttcggtctattatgagaagagtgaaccacaaagatcctcacgttgctatgcaggctttgactcttctaggagcatgtgtatcaaactgtggcaaaatttttcatttagaagtatgttcaagagattttgctagtgaagtaagcaacgtattaaataagggtcatcctaaagtatgtgaaaaattaaaggctcttatggttgaatggacagatgaatttaagaatgatccacagcttagtctaatatcagcaatgattaagaaccttaaggaacaaggagttacgttcccagctattggctctcaggctgcagaacaagcaaaagcaagcccagctcttgtagccaaggatcctggtactgtggctaacaaaaaagaagaagaagatttagcaaaagccattgagttgtctctcaaggaacaaaggcagcagtcaaccaccctttccactttgtatccaagcacatccagtctcttaactaaccaccaacatgaaggccgaaaagttcgtgctatatatgactttgaagctgctgaagacaatgaacttacttttaaagctggagaaattattacagttcttgatgacagtgatcctaactggtggaaaggtgaaacccatcaaggcatagggttatttccttctaattttgtgactgcagatctcactgctgaaccagaaatgattaaaacagagaagaagacggtacaatttagtgatgatgttcaggtagagacaatagaaccagagccggaaccagcctttattgatgaagataaaatggaccagttgctacagatgctgcaaagtacagaccccagtgatgatcagccagacctaccagagctgcttcatcttgaagcaatgtgtcaccagatgggacctctcattgatgaaaagctggaagatattgatagaaaacattcagaactctcagaacttaatgtgaaagtgatggaggccctttccttatataccaagttaatgaacgaagatccgatgtattccatgtatgcaaagttacagaatcagccatattatatgcagtcatctggtgtttctggttctcaggtgtatgcagggcctcctccaagtggtgcctacctggttgcagggaacgcgcagatgagccacctccagagctacagtcttcccccggagcagctgtcttctctcagccaggcagtggtcccaccatccgcaaacccagcccttcctagtcagcagactcaggccgcttacccaaatacaatggtcagttccgttcaaggaaacacatatcccagccaggcgccagtatatagtcctcctcctgccgctactgctgctgctgcaactgccgatgtcactctgtaccagaatgcaggacctaatatgccccaggtgccaaactataacttaacatcatcaactctgcctcagcccggaggcagccaacagccacctcagccacagcaaccatattctcagaaggctctgctataggacccggtgttcctcttggtggcagatacctgctaaatgccactgacaatgttatgagattcattactatcttaagatgtgtttatcctcagcttataggaatctctccaggtcaacaggttcaaatattcaagaaggtagaactctcctcaatttacactgactttttagaggttcttccccccccgcccctgcagaggaatgaaactacttacaacatttaattcctttcataatatgaaagaattgatacaaggctatttgtctcgtaaacctggtctgcagaaagtcaaacttacaaaaactgttgtgacaaatgttatgtacatatattgatatgtaactgcattagtggccattttgaatcacagtggtgatcgtgtgaatatatttaacactgtgttaaattaatttacgttgctattttattttaatcataaacaactaccatgtttcttaatgttttgtgtaaatttaaggtaattatactatccttttaaacttcaagaaaacaaagttgttagcgtatttacatgaaggcgcattatgttgtcgtgtgtttcagtttcacattaaactgaaccttttactaattgtgagctaaagagatatatatatatatgtgtgtgtatatatatatatctacatgtctttctgtagcctctgcatactactggctgtcatcacaccagcgtacagtagctaaatttttggtgcaattatagcaaatgataatgttcccttttgaacttttacattttggcatgacatttcagagtattgtgggaccatgagacaaaattaagtacgatcacattctttatttctcattttaaagaaatgatgttggtttaccttttcctagttgaagatagtaattaggtttctaagctgtatactgtgtttattggtggcagtgacaccaaagatagaggcaatggatagaaatttttaaactggaaagaaaacctgaattacactacattttcgaagtctcttgtaattatttgggatatcaacaaaatttgattcgtctgtctaatcccttgctagtattttaaatatgtctttaacacattgtatcctttaattcttcattaaaatggaaataagtagatgtttcaaagta

SEQ ID NO: 342635 - DNA, 3072 bp, Homo sapiens
aagctccgcgcgggggcttcctcggctccttgctgttgccgccgccgcagctgctgccgcggttggtggggttgggtgagaggaggagctgtcgcggaccctgtagagtcggtctctgttgctctttttgcctgaggagtcttccatcctacgtcgagctctgactcccgtgctgtcgagagggagtccccggggacacctcggcacgcagcggagatgcctctttttgccaccaatcccttcgatcaggatgttgagaaagcaaccagcgagatgaatactgctgaggactggggcctcattttggatatctgtgataaagttggtcagtctcgcactggataaggaaaagagaggatgtgtcttacaaaaagttttaaaataccaaaatggggttttaagaagctttttgagagagatgaggatttgcccaccctttaaacagacctaaggattgtcttcggtctattatgagaagagtgaaccacaaagatcctcacgttgctatgcaggctttgactcttctaggagcatgtgtatcaaactgtggcaaaatttttcatttagaagtatgttcaagagattttgctagtgaagtaagcaacgtattaaataagggtcatcctaaagtatgtgaaaaattaaaggctcttatggttgaatggacagatgaatttaagaatgatccacagcttagtctaatatcagcaatgattaagaaccttaaggaacaaggagttacgttcccagctattggctctcaggctgcagaacaagcaaaagcaagcccagctcttgtagccaaggatcctggtactgtggctaacaaaaaagaagaagaagatttagcaaaagccattgagttgtctctcaaggaacaaaggcagcagtcaaccaccctttccactttgtatccaagcacatccagtctcttaactaaccaccaacatgaaggccgaaaagttcgtgctatatatgactttgaagctgctgaagacaatgaacttacttttaaagctggagaaattattacagttcttgatgacagtgatcctaactggtggaaaggtgaaacccatcaaggcatagggttatttccttctaattttgtgactgcagatctcactgctgaaccagaaatgattaaaacagagaagaagacggtacaatttagtgatgatgttcaggtagagacaatagaaccagagccggaaccagcctttattgatgaagataaaatggaccagttgctacagatgctgcaaagtacagaccccagtgatgatcagccagacctaccagagctgcttcatcttgaagcaatgtgtcaccagatgggacctctcattgatgaaaagctggaagatattgatagaaaacattcagaactctcagaacttaatgtgaaagtgatggaggccctttccttatataccaagttaatgaacgaagatccgatgtattccatgtatgcaaagttacagaatcagccatattatatgcagtcatctggtgtttctggttctcaggtgtatgcagggcctcctccaagtggtgcctacctggttgcagggaacgcgcagatgagccacctccagagctacagtcttcccccggagcagctgtcttctctcagccaggcagtggtcccaccatccgcaaacccagcccttcctagtcagcagactcaggccgcttacccaaatacaatggtcagttccgttcaaggaaacacatatcccagccaggcgccagtatatagtcctcctcctgccgctactgctgctgctgcaactgccgatgtcactctgtaccagaatgcaggacctaatatgccccaggtgccaaactataacttaacatcatcaactctgcctcagcccggaggcagccaacagccacctcagccacagcaaccatattctcagaaggctctgctataggacccggtgttcctcttggtggcagatacctgctaaatgccactgacaatgttatgagattcattactatcttaagatgtgtttatcctcagcttataggaatctctccaggtcaacaggttcaaatattcaagaaggtagaactctcctcaatttacactgactttttagaggttcttccccccccgcccctgcagaggaatgaaactacttacaacatttaattcctttcataatatgaaagaattgatacaaggctatttgtctcgtaaacctggtctgcagaaagtcaaacttacaaaaactgttgtgacaaatgttatgtacatatattgatatgtaactgcattagtggccattttgaatcacagtggtgatcgtgtgaatatatttaacactgtgttaaattaatttacgttgctattttattttaatcataaacaactaccatgtttcttaatgttttgtgtaaatttaaggtaattatactatccttttaaacttcaagaaaacaaagttgttagcgtatttacatgaaggcgcattatgttgtcgtgtgtttcagtttcacattaaactgaaccttttactaattgtgagctaaagagatatatatatatatgtgtgtgtatatatatatatctacatgtctttctgtagcctctgcatactactggctgtcatcacaccagcgtacagtagctaaatttttggtgcaattatagcaaatgataatgttcccttttgaacttttacattttggcatgacatttcagagtattgtgggaccatgagacaaaattaagtacgatcacattctttatttctcattttaaagaaatgatgttggtttaccttttcctagttgaagatagtaattaggtttctaagctgtatactgtgtttattggtggcagtgacaccaaagatagaggcaatggatagaaatttttaaactggaaagaaaacctgaattacactacattttcgaagtctcttgtaattatttgggatatcaacaaaatttgattcgtctgtctaatcccttgctagtattttaaatatgtctttaacacattgtatcctttaattcttcattaaaatggaaataagtagatgtttcaaagta

SEQ ID NO: 342636 - DNA, 2883 bp, Homo sapiens
aagctccgcgcgggggcttcctcggctccttgctgttgccgccgccgcagctgctgccgcggttggtggggttgggtgagaggaggagctgtcgcggaccctgtagagtcggtctctgttgctctttttgcctgaggagtcttccatcctacgtcgagctctgactcccgtgctgtcgagagggagtccccggggacacctcggcacgcagcggagatgcctctttttgccaccaatcccttcgatcaggatgttgacctaaggattgtcttcggtctattatgagaagagtgaaccacaaagatcctcacgttgctatgcaggctttgactcttctaggagcatgtgtatcaaactgtggcaaaatttttcatttagaagtatgttcaagagattttgctagtgaagtaagcaacgtattaaataagggtcatcctaaagtatgtgaaaaattaaaggctcttatggttgaatggacagatgaatttaagaatgatccacagcttagtctaatatcagcaatgattaagaaccttaaggaacaaggagttacgttcccagctattggctctcaggctgcagaacaagcaaaagcaagcccagctcttgtagccaaggatcctggtactgtggctaacaaaaaagaagaagaagatttagcaaaagccattgagttgtctctcaaggaacaaaggcagcagtcaaccaccctttccactttgtatccaagcacatccagtctcttaactaaccaccaacatgaaggccgaaaagttcgtgctatatatgactttgaagctgctgaagacaatgaacttacttttaaagctggagaaattattacagttcttgatgacagtgatcctaactggtggaaaggtgaaacccatcaaggcatagggttatttccttctaattttgtgactgcagatctcactgctgaaccagaaatgattaaaacagagaagaagacggtacaatttagtgatgatgttcaggtagagacaatagaaccagagccggaaccagcctttattgatgaagataaaatggaccagttgctacagatgctgcaaagtacagaccccagtgatgatcagccagacctaccagagctgcttcatcttgaagcaatgtgtcaccagatgggacctctcattgatgaaaagctggaagatattgatagaaaacattcagaactctcagaacttaatgtgaaagtgatggaggccctttccttatataccaagttaatgaacgaagatccgatgtattccatgtatgcaaagttacagaatcagccatattatatgcagtcatctggtgtttctggttctcaggtgtatgcagggcctcctccaagtggtgcctacctggttgcagggaacgcgcagatgagccacctccagagctacagtcttcccccggagcagctgtcttctctcagccaggcagtggtcccaccatccgcaaacccagcccttcctagtcagcagactcaggccgcttacccaaatacaatggtcagttccgttcaaggaaacacatatcccagccaggcgccagtatatagtcctcctcctgccgctactgctgctgctgcaactgccgatgtcactctgtaccagaatgcaggacctaatatgccccaggtgccaaactataacttaacatcatcaactctgcctcagcccggaggcagccaacagccacctcagccacagcaaccatattctcagaaggctctgctataggacccggtgttcctcttggtggcagatacctgctaaatgccactgacaatgttatgagattcattactatcttaagatgtgtttatcctcagcttataggaatctctccaggtcaacaggttcaaatattcaagaaggtagaactctcctcaatttacactgactttttagaggttcttccccccccgcccctgcagaggaatgaaactacttacaacatttaattcctttcataatatgaaagaattgatacaaggctatttgtctcgtaaacctggtctgcagaaagtcaaacttacaaaaactgttgtgacaaatgttatgtacatatattgatatgtaactgcattagtggccattttgaatcacagtggtgatcgtgtgaatatatttaacactgtgttaaattaatttacgttgctattttattttaatcataaacaactaccatgtttcttaatgttttgtgtaaatttaaggtaattatactatccttttaaacttcaagaaaacaaagttgttagcgtatttacatgaaggcgcattatgttgtcgtgtgtttcagtttcacattaaactgaaccttttactaattgtgagctaaagagatatatatatatatgtgtgtgtatatatatatatctacatgtctttctgtagcctctgcatactactggctgtcatcacaccagcgtacagtagctaaatttttggtgcaattatagcaaatgataatgttcccttttgaacttttacattttggcatgacatttcagagtattgtgggaccatgagacaaaattaagtacgatcacattctttatttctcattttaaagaaatgatgttggtttaccttttcctagttgaagatagtaattaggtttctaagctgtatactgtgtttattggtggcagtgacaccaaagatagaggcaatggatagaaatttttaaactggaaagaaaacctgaattacactacattttcgaagtctcttgtaattatttgggatatcaacaaaatttgattcgtctgtctaatcccttgctagtattttaaatatgtctttaacacattgtatcctttaattcttcattaaaatggaaataagtagatgtttcaaagta

SEQ ID NO: 342637 - DNA, 2711 bp, Homo sapiens
aagctccgcgcgggggcttcctcggctccttgctgttgccgccgccgcagctgctgccgcggttggtggggttgggtgagaggaggagctgtcgcggaccctgtagagtcggtctctgttgctctttttgcctgaggagtcttccatcctacgtcgagctctgactcccgtgctgtcgagagggagtccccggggacacctcggcacgcagcggagatgcctctttttgccaccaatcccttcgatcaggatgttgggtcatcctaaagtatgtgaaaaattaaaggctcttatggttgaatggacagatgaatttaagaatgatccacagcttagtctaatatcagcaatgattaagaaccttaaggaacaaggagttacgttcccagctattggctctcaggctgcagaacaagcaaaagcaagcccagctcttgtagccaaggatcctggtactgtggctaacaaaaaagaagaagaagatttagcaaaagccattgagttgtctctcaaggaacaaaggcagcagtcaaccaccctttccactttgtatccaagcacatccagtctcttaactaaccaccaacatgaaggccgaaaagttcgtgctatatatgactttgaagctgctgaagacaatgaacttacttttaaagctggagaaattattacagttcttgatgacagtgatcctaactggtggaaaggtgaaacccatcaaggcatagggttatttccttctaattttgtgactgcagatctcactgctgaaccagaaatgattaaaacagagaagaagacggtacaatttagtgatgatgttcaggtagagacaatagaaccagagccggaaccagcctttattgatgaagataaaatggaccagttgctacagatgctgcaaagtacagaccccagtgatgatcagccagacctaccagagctgcttcatcttgaagcaatgtgtcaccagatgggacctctcattgatgaaaagctggaagatattgatagaaaacattcagaactctcagaacttaatgtgaaagtgatggaggccctttccttatataccaagttaatgaacgaagatccgatgtattccatgtatgcaaagttacagaatcagccatattatatgcagtcatctggtgtttctggttctcaggtgtatgcagggcctcctccaagtggtgcctacctggttgcagggaacgcgcagatgagccacctccagagctacagtcttcccccggagcagctgtcttctctcagccaggcagtggtcccaccatccgcaaacccagcccttcctagtcagcagactcaggccgcttacccaaatacaatggtcagttccgttcaaggaaacacatatcccagccaggcgccagtatatagtcctcctcctgccgctactgctgctgctgcaactgccgatgtcactctgtaccagaatgcaggacctaatatgccccaggtgccaaactataacttaacatcatcaactctgcctcagcccggaggcagccaacagccacctcagccacagcaaccatattctcagaaggctctgctataggacccggtgttcctcttggtggcagatacctgctaaatgccactgacaatgttatgagattcattactatcttaagatgtgtttatcctcagcttataggaatctctccaggtcaacaggttcaaatattcaagaaggtagaactctcctcaatttacactgactttttagaggttcttccccccccgcccctgcagaggaatgaaactacttacaacatttaattcctttcataatatgaaagaattgatacaaggctatttgtctcgtaaacctggtctgcagaaagtcaaacttacaaaaactgttgtgacaaatgttatgtacatatattgatatgtaactgcattagtggccattttgaatcacagtggtgatcgtgtgaatatatttaacactgtgttaaattaatttacgttgctattttattttaatcataaacaactaccatgtttcttaatgttttgtgtaaatttaaggtaattatactatccttttaaacttcaagaaaacaaagttgttagcgtatttacatgaaggcgcattatgttgtcgtgtgtttcagtttcacattaaactgaaccttttactaattgtgagctaaagagatatatatatatatgtgtgtgtatatatatatatctacatgtctttctgtagcctctgcatactactggctgtcatcacaccagcgtacagtagctaaatttttggtgcaattatagcaaatgataatgttcccttttgaacttttacattttggcatgacatttcagagtattgtgggaccatgagacaaaattaagtacgatcacattctttatttctcattttaaagaaatgatgttggtttaccttttcctagttgaagatagtaattaggtttctaagctgtatactgtgtttattggtggcagtgacaccaaagatagaggcaatggatagaaatttttaaactggaaagaaaacctgaattacactacattttcgaagtctcttgtaattatttgggatatcaacaaaatttgattcgtctgtctaatcccttgctagtattttaaatatgtctttaacacattgtatcctttaattcttcattaaaatggaaataagtagatgtttcaaagta

SEQ ID NO: 342638 - DNA, 2890 bp, Homo sapiens
actcttgcctctacaatcagttctcatttacaaagagaaagcaaccagcgagatgaatactgctgaggactggggcctcattttggatatctgtgataaagttggtcagtctcgcactggacctaaggattgtcttcggtctattatgagaagagtgaaccacaaagatcctcacgttgctatgcaggctttgactcttctaggagcatgtgtatcaaactgtggcaaaatttttcatttagaagtatgttcaagagattttgctagtgaagtaagcaacgtattaaataagggtcatcctaaagtatgtgaaaaattaaaggctcttatggttgaatggacagatgaatttaagaatgatccacagcttagtctaatatcagcaatgattaagaaccttaaggaacaaggagttacgttcccagctattggctctcagatgaggaaactgagactcagaatggttaagtgacttgcccagggacacagctcatagttgacagctggaactagaacacaggcatgctgattctcagtccagtgttcttttcgctgcccgagtctgccttctttgttagagaggctgcagaacaagcaaaagcaagcccagctcttgtagccaaggatcctggtactgtggctaacaaaaaagaagaagaagatttagcaaaagccattgagttgtctctcaaggaacaaaggcagcagtcaaccaccctttccactttgtatccaagcacatccagtctcttaactaaccaccaacatgaaggccgaaaagttcgtgctatatatgactttgaagctgctgaagacaatgaacttacttttaaagctggagaaattattacagttcttgatgacagtgatcctaactggtggaaaggtgaaacccatcaaggcatagggttatttccttctaattttgtgactgcagatctcactgctgaaccagaaatgattaaaacagagaagaagacggtacaatttagtgatgatgttcaggtagagacaatagaaccagagccggaaccagcctttattgatgaagataaaatggaccagttgctacagatgctgcaaagtacagaccccagtgatgatcagccagacctaccagagctgcttcatcttgaagcaatgtgtcaccagatgggacctctcattgatgaaaagctggaagatattgatagaaaacattcagaactctcagaacttaatgtgaaagtgatggaggccctttccttatataccaagttaatgaacgaagatccgatgtattccatgtatgcaaagttacagaatcagccatattatatgcagtcatctggtgtttctggttctcaggtgtatgcagggcctcctccaagtggtgcctacctggttgcagggaacgcgcagatgagccacctccagagctacagtcttcccccggagcagctgtcttctctcagccaggcagtggtcccaccatccgcaaacccagcccttcctagtcagcagactcaggccgcttacccaaatacaatggtcagttccgttcaaggaaacacatatcccagccaggcgccagtatatagtcctcctcctgccgctactgctgctgctgcaactgccgatgtcactctgtaccagaatgcaggacctaatatgccccaggtgccaaactataacttaacatcatcaactctgcctcagcccggaggcagccaacagccacctcagccacagcaaccatattctcagaaggctctgctataggacccggtgttcctcttggtggcagatacctgctaaatgccactgacaatgttatgagattcattactatcttaagatgtgtttatcctcagcttataggaatctctccaggtcaacaggttcaaatattcaagaaggtagaactctcctcaatttacactgactttttagaggttcttccccccccgcccctgcagaggaatgaaactacttacaacatttaattcctttcataatatgaaagaattgatacaaggctatttgtctcgtaaacctggtctgcagaaagtcaaacttacaaaaactgttgtgacaaatgttatgtacatatattgatatgtaactgcattagtggccattttgaatcacagtggtgatcgtgtgaatatatttaacactgtgttaaattaatttacgttgctattttattttaatcataaacaactaccatgtttcttaatgttttgtgtaaatttaaggtaattatactatccttttaaacttcaagaaaacaaagttgttagcgtatttacatgaaggcgcattatgttgtcgtgtgtttcagtttcacattaaactgaaccttttactaattgtgagctaaagagatatatatatatatgtgtgtgtatatatatatatctacatgtctttctgtagcctctgcatactactggctgtcatcacaccagcgtacagtagctaaatttttggtgcaattatagcaaatgataatgttcccttttgaacttttacattttggcatgacatttcagagtattgtgggaccatgagacaaaattaagtacgatcacattctttatttctcattttaaagaaatgatgttggtttaccttttcctagttgaagatagtaattaggtttctaagctgtatactgtgtttattggtggcagtgacaccaaagatagaggcaatggatagaaatttttaaactggaaagaaaacctgaattacactacattttcgaagtctcttgtaattatttgggatatcaacaaaatttgattcgtctgtctaatcccttgctagtattttaaatatgtctttaacacattgtatcctttaattcttcattaaaatggaaataagtagatgtttcaaagta

SEQ ID NO: 342639 - DNA, 2605 bp, Homo sapiens
aagctccgcgcgggggcttcctcggctccttgctgttgccgccgccgcagctgctgccgcggttggtggggttgggtgagaggaggagctgtcgcggaccctgtagagtcggtctctgttgctctttttgcctgaggagtcttccatcctacgtcgagctctgactcccgtgctgtcgagagggagtccccggggacacctcggcacgcagcggagatgcctctttttgccaccaatcccttcgatcaggatgttgagaaagcaaccagcgagatgaatactgctgaggactggggcctcattttggatatctgtgataaagttggtcagtctcgcactggacctaaggattgtcttcggtctattatgagaagagtgaaccacaaagatcctcacgttgctatgcaggctttgactcttctaggagcatgtgtatcaaactgtggcaaaatttttcatttagaagtatgttcaagagattttgctagtgaagtaagcaacgtattaaataagggtcatcctaaagtatgtgaaaaattaaaggctcttatggttgaatggacagatgaatttaagaatgatccacagcttagtctaatatcagcaatgattaagaaccttaaggaacaaggagttacgttcccagctattggctctcaggctgcagaacaagcaaaagcaagcccagctcttgtagccaaggatcctggtactgtggctaacaaaaaagaagaagaagatttagcaaaagccattgagttgtctctcaaggaacaaaggcagcagtcaaccaccctttccactttgtatccaagcacatccagtctcttaactaaccaccaacatgaaggccgaaaagttcgtgctatatatgactttgaagctgctgaagacaatgaacttacttttaaagctggagaaattattacagttcttgatgacagtgatcctaactggtggaaaggtgaaacccatcaaggcatagggttatttccttctaattttgtgactgcagatctcactgctgaaccagaaatgattaaaacagagaagaagacggtacaatttagtgatgatgttcaggtagagacaatagaaccagagccggaaccagcctttattgatgaagataaaatggaccagttgctacagatgctgcaaagtacagaccccagtgatgatcagccagacctaccagagctgcttcatcttgaagcaatgtgtcaccagatgggacctctcattgatgaaaagctggaagatattgatagaaaacattcagaactctcagaacttaatgtgaaagtgatggaggccctttccttatataccaagttaatgaacgaagatccgatgtattccatgtatgcaaagttacagaatcagccatattatatgcagtcatctggtgtttctggttctcaggtgtatgcagggcctcctccaagtggtgcctacctggttgcagggaacgcgcagatgagccacctccagagctacagtcttcccccggagcagctgtcttctctcagccaggcagtggtcccaccatccgcaaacccagcccttcctagtcagcagactcaggccgcttacccaaatacaatggtcagttccgttcaaggaaacacatatcccagccaggcgccagtatatagtcctcctcctgccgctactgctgctgctgcaactgccgatgtcactctgtaccagaatgcaggacctaatatgccccaggtgccaaactataacttaacatcatcaactctgcctcagcccggaggcagccaacagccacctcagccacagcaaccatattctcagaaggctctgctataggacccggtgttcctcttggtggcagatacctgctaaatgccactgacaatgttatgagattcattactatcttaagatgtgtttatcctcagcttataggaatctctccaggtcaacaggttcaaatattcaagaaggtagaactctcctcaatttacactgactttttagaggttcttccccccccgcccctgcagaggaatgaaactacttacaacatttaattcctttcataatatgaaagaattgatacaaggctatttgtctcgtaaacctggtctgcagaaagtcaaacttacaaaaactgttgtgacaaatgttatgtacatatattgatatgtaactgcattagtggccattttgaatcacagtggtgatcgtgtgaatatatttaacactgtgttaaattaatttacgttgctattttattttaatcataaacaactaccatgtttcttaatgttttgtgtaaatttaaggtaattatactatccttttaaacttcaagaaaacaaagttgttagcgtatttacatgaaggcgcattatgttgtcgtgtgtttcagtttcacattaaactgaaccttactaatggagcctagacagaaatcataaaccggggactcacttcgacggcctcggaacccgcaaacgggggccccccgcagcccacatagggggcaaacaataagtcctgaacaccgggggcccgccgggccaaaagaacccccccgaagaggccccacacgacgcgcggcgaccggccc

SEQ ID NO: 342640 - DNA, 1298 bp, Homo sapiens
  misc_feature (1239)..(1239): n is a, c, g, or t
  misc_feature (1249)..(1249): n is a, c, g, or t
  misc_feature (1269)..(1269): n is a, c, g, or t
  misc_feature (1274)..(1274): n is a, c, g, or t
aagctccgcgcgggggcttcctcggctccttgctgttgccgccgccgcagctgctgccgcggttggtggggttgggtgagaggaggagctgtcgcggaccctgtagagtcggtctctgttgctctttttgcctgaggagtcttccatcctacgtcgagctctgactcccgtgctgtcgagagggagtccccggggacacctcggcacgcagcggagatgcctctttttgccaccaatcccttcgatcaggatgttgagaaagcaaccagcgagatgaatactgctgaggactggggcctcattttggatatctgtgataaagttggtcagtctcgcactggacctaaggattgtcttcggtctattatgagaagagtgaaccacaaagatcctcacgttgctatgcaggctttgactcttctaggagcatgtgtatcaaactgtggcaaaatttttcatttagaagtatgttcaagagattttgctagtgaagtaagcaacgtattaaataagggtcatcctaaagtatgtgaaaaattaaaggctcttatggttgaatggacagatgaatttaagaatgatccacagcttagtctaatatcagcaatgattaagaaccttaaggaacaaggagttacgttcccagctattggctctcaggctgcagaacaagcaaaagcaagcccagctcttgtagccaaggatcctggtactgtggctaacaaaaaagaagaagaagatttagcaaaagccattgagttgtctctcaaggaacaaaggcagcagtcaaccaccctttccactttgtatccaagcacatccagtctcttaactaaccaccaacatgaaggccgaaaagttcgtgctatatatgactttgaagctgctgaagacaatgaacttacttttaaagctggagaaattattacagttcttgatgacagtgatcctaactggtggaaaggtgaaacccatcaaggcatagggttatttccttctaattttgtgactgcagatctcactgctgaaccagaaatgattaaaacagagaagaagacggtacaatttagtgatgatgttcaggtagagacaatagaaccagagccggaaccagcctttattgatgaagataaaatggaccagttgctacagatgctgcaaagtacagaccccagtgatgatcagccagacctaccagagctgcttcatcttgaaggcaatgtgttcaccaggtggggncctctccttngatggaaaagctgggaggtntttgnttgggaaactttcaggactcttcc

SEQ ID NO: 342641 - DNA, 494 bp, Homo sapiens
cttctgaagaggttgtgtaaggcgctgggttcggaatcacggaaggcccaggtgcaaacctcagcagtcccgggtaccagctgtgcagcgcagagcatccaggatgtgaggagtgatgacgaggattatgaagaggaagaggaagaggaagaagaagaggctaccaaaggcaaagagatggattgtttaaagaacggcctcggggctgagaggcacctcattcccaatggccagcatggccattagctggaagcctacaggactcccatggcacagcatgctgcaagtactgttggcagcctggcttccaggccccacaccgaccccacattctgcccttccctctttctcaccaccgccttccctcccacctaagatgtgtttaccaaaatgttgttaacttgtgttaaaatgttaaatataagcatgcccatggatttttactgcagttaggactcagactggtcaaagatttcaaagatttctccacagaa

SEQ ID NO: 342642 - DNA, 2049 bp, Homo sapiens
cgagagagggcccgtgtccccgcggaggtcaaggccgagagagggcccgtgtccccgcgcaggtcaaggcccagagtccccgtgctcgcacagatggtgtcctggggcccagtcgcgctccccgctcgcggcagcccccgtgtactgggccttgcaaagtccgttaggagcgctccagggcgacagtgcccagcggttaacaagtttgtaattactttcgtgggtttctacgttgcaaattgagaagagggttgctgggttgggcccccctcctctggacgctaaccccacccaggtggtgaaacaggaagcaacatcccatcaggaagaacctgagggtgccatccagtagcttcgcctcacgtcactgactgccctcagtcagaaatcttgactcgcaactttggagggtgggtctctgaaggaatttcaggtcttacacagagatgagttgtgctgctctctgaggagaacgaagctggttggaacgttggaagctgctctctgactacacttcacaagcaaggggcaccttttgtggactgacatttcagaaagggatgttgtgaaacaaaagctgacatttatatatatatacatatatacagtatttgagttcctcagtagaaagctatcatatatactcagaatgttttggacgtttaaagaatggttctggttggaaagattctggcttcctccaacaataaagtggtcagatcttgaggatcacgatggactcgtctttgtaaaaccttctcatttatacgtgacaattccatatgcttttctcttgctgattatcaggcgtgtatttgaaaaatttgttgcttcacctctagcaaaatcatttggcattaaagagacagttcgaaaggttacaccaaatactgtcttagagaattttttcaaacattccacaaggcaaccattgcaaactgatatttatggactggcaaagaagtgtaacttgacggagcgccaggtggaaagatggtttaggagtcggcggaatcaagagaggccttccaggctgaagaaattccaggaagcttgctggagatttgcattttacttaatgatcactgttgctggaattgcgtttctttatgataaaccttggctatatgacttatgggaggtttggaatggctatcccaaacagcccctgctgccatcccagtactggtactacattttagaaatgagtttttattggtctctgttatttagacttggctttgatgtcaagagaaaggattttctagctcatatcatccaccacctggctgctattagtctgatgagcttctcttggtgtgctaattatattcgcagtgggaccctcgtgatgattgtacacgatgtggctgacatttggctggagtctgctaagatgttttcttatgctggatggacgcagacctgtaacaccctgtttttcatcttctccaccatatttttcatcagccgcctcattgtttttcctttctggattttatattgcacgctgatcttgcctatgtatcacctcgagcctttcttttcatacatcttcctcaacctacagctcatgatcttgcaggtccttcacctttactggggttattacatcttgaagatgctcaacagatgtatattcatgaagagcatccaggatgtgaggagtgatgacgaggattatgaagaggaagaggaagaggaagaagaagaggctaccaaaggcaaagagatggattgtttaaagaacggcctcggggctgagaggcacctcattcccaatggccagcatggccattagctggaagcctacaggactcccatggcacagcatgctgcaagtactgttggcagcctggcttccaggccccacaccgaccccacattctgcccttccctctttctcaccaccgccttccctcccacctaagatgtgtttaccaaaatgttgttaacttgtgttaaaatgttaaatataagcatgcccatggatttttactgcagttaggactcagactggtcaaagatttcaaagatttctccacagaa

SEQ ID NO: 342643 - DNA, 1826 bp, Homo sapiens
cccgggatgcaccgctgcggggaccccccgcccggcctcgcggacccgcctcggcccaggacggaggaggaggtggtgaaacaggaagcaacatcccatcaggaagaacctgagggtgccatccagtagcttcgcctcacgtcactgactgccctcagtcagaaatcttgactcgcaactttggagggtgggtctctgaaggaatttcaggtcttacacagagatgagttgtgctgctctctgaggagaacgaagctggttggaacgttggaagctgctctctgactacacttcacaagcaaggggcaccttttgtggactgacatttcagaaagggatgttgtgaaacaaaagctgacatttatatatatatacatatatacagtatttgagttcctcagtagaaagctatcatatatactcagaatgttttggacgtttaaagaatggttctggttggaaagattctggcttcctccaacaataaagtggtcagatcttgaggatcacgatggactcgtctttgtaaaaccttctcatttatacgtgacaattccatatgcttttctcttgctgattatcaggcgtgtatttgaaaaatttgttgcttcacctctagcaaaatcatttggcattaaagagacagttcgaaaggttacaccaaatactgtcttagagaattttttcaaacattccacaaggcaaccattgcaaactgatatttatggactggcaaagaagtgtaacttgacggagcgccaggtggaaagatggtttaggagtcggcggaatcaagagaggccttccaggctgaagaaattccaggaagcttgctggagatttgcattttacttaatgatcactgttgctggaattgcgtttctttatgataaaccttggctatatgacttatgggaggtttggaatggctatcccaaacagcccctgctgccatcccagtactggtactacattttagaaatgagtttttattggtctctgttatttagacttggctttgatgtcaagagaaaggattttctagctcatatcatccaccacctggctgctattagtctgatgagcttctcttggtgtgctaattatattcgcagtgggaccctcgtgatgattgtacacgatgtggctgacatttggctggagtctgctaagatgttttcttatgctggatggacgcagacctgtaacaccctgtttttcatcttctccaccatatttttcatcagccgcctcattgtttttcctttctggattttatattgcacgctgatcttgcctatgtatcacctcgagcctttcttttcatacatcttcctcaacctacagctcatgatcttgcaggtccttcacctttactggggttattacatcttgaagatgctcaacagatgtatattcatgaagagcatccaggatgtgaggagtgatgacgaggattatgaagaggaagaggaagaggaagaagaagaggctaccaaaggcaaagagatggattgtttaaagaacggcctcggggctgagaggcacctcattcccaatggccagcatggccattagctggaagcctacaggactcccatggcacagcatgctgcaagtactgttggcagcctggcttccaggccccacaccgaccccacattctgcccttccctctttctcaccaccgccttccctcccacctaagatgtgtttaccaaaatgttgttaacttgtgttaaaatgttaaatataagcatgcccatggatttttactgcagttaggactcagactggtcaaagatttcaaagatttctccacagaa

SEQ ID NO: 342644 - DNA, 1514 bp, Homo sapiens
cgagagagggcccgtgtccccgcggaggtcaaggccgagagagggcccgtgtccccgcgcaggtcaaggcccagagtccccgtgctcgcacagatggtgtcctggggcccagtcgcgctccccgctcgcggcagcccccgtgtactgggccttgcaaagtccgttaggagcgctccagggcgacagtgcccagcggttaacaagtttgtaattactttcgtgggtttctacgttgcaaattgagaagagggttgctgggttgggcccccctcctctggacgctaaccccacccaggtggtgaaacaggaagcaacatcccatcaggaagaacctgagggtgccatccagtagcttcgcctcacgtcactgactgccctcagtcagaaatcttgactcgcaactttggagggtgggtctctgaaggaatttcaggtcttacacagagatgagttgtgctgctctctgaggagaacgaagctggttggaacgttggaagctgctctctgactacacttcacaagcaaggggcaccttttgtggactgacatttcagaaagggatgttgtgaaacaaaagctgacatttatatatatatacatatatacagtatttgagttcctcagtagaaagctatcatatatactcagaatgttttggacgtttaaagaatggttctggttggaaagattctggcttcctccaacaataaagtggtcagatcttgaggatcacgatggactcgtctttgtaaaaccttctcatttatacgtgacaattccatatgcttttctcttgctgattatcaggcgtgtatttgaaaaatttgttgcttcacctctagcaaaatcatttggcattaaagagacagttcgaaaggttacaccaaatactgtcttagagaattttttcaaacattccacaaggcaaccattgcaaactgatatttatggactggcaaagaagtgtaacttgacggagcgccaggtggaaagatggtttaggagtcggcggaatcaagagaggccttccaggctgaagaaattccaggaagcttgctggagatttgcattttacttaatgatcactgttgctggaattgcgtttctttatgataaaccttggctatatgacttatgggaggtttggaatggctatcccaaacagcccctgctgccatcccagtactggtactacattttagaaatgagtttttattggtctctgttatttagacttggctttgatgtcaagagaaaggtaagtgtcttatttacaaagcttctttatcaatttcttcaaaaattgccatctccctgccccaaattctaatctttaagttgtatttttctgtgtttttgggtccagttcattgcttttgtgtgctttatagtacataaaatattgctaattatactcatgctttggtgccttggtaaacatttgtagtgaaacattataaaaactttaactttgaagctccacctctgttcaataagaaaaaaaacatttcctt

SEQ ID NO: 342645 - DNA, 2097 bp, Homo sapiens
cgagagagggcccgtgtccccgcggaggtcaaggccgagagagggcccgtgtccccgcgcaggtcaaggcccagagtccccgtgctcgcacagatggtgtcctggggcccagtcgcgctccccgctcgcggcagcccccgtgtactgggccttgcaaagtccgttaggagcgctccagggcgacagtgcccagcggttaacaagtggtgaaacaggaagcaacatcccatcaggaagaacctgagggtgccatccagtagcttcgcctcacgtcactgactgccctcagtcagaaatcttgactcgcaactttggagggtgggtctctgaaggaatttcaggtcttacacagagatgagttgtgctgctctctgaggagaacgaagctggttggaacgttggaagctgctctctgactacacttcacaagcaaggggcaccttttgtggactgacatttcagaaagggatgttgtgaaacaaaagctgacatttatatatatatacatatatacagtatttgagttcctcagtagaaagctatcatatatactcagatggcgttattccctctggtccccactgctctggccaaaccttctctctgctgactgcatctattgctgtgagctgattgtcctctagtttctccatctcctgaggcatgcttcacaccactgccagaaagagctgccagaatgttttggacgtttaaagaatggttctggttggaaagattctggcttcctccaacaataaagtggtcagatcttgaggatcacgatggactcgtctttgtaaaaccttctcatttatacgtgacaattccatatgcttttctcttgctgattatcaggcgtgtatttgaaaaatttgttgcttcacctctagcaaaatcatttggcattaaagagacagttcgaaaggttacaccaaatactgtcttagagaattttttcaaacattccacaaggcaaccattgcaaactgatatttatggactggcaaagaagtgtaacttgacggagcgccaggtggaaagatggtttaggagtcggcggaatcaagagaggccttccaggctgaagaaattccaggaagcttgctggagatttgcattttacttaatgatcactgttgctggaattgcgtttctttatgataaaccttggctatatgacttatgggaggtttggaatggctatcccaaacagcccctgctgccatcccagtactggtactacattttagaaatgagtttttattggtctctgttatttagacttggctttgatgtcaagagaaaggattttctagctcatatcatccaccacctggctgctattagtctgatgagcttctcttggtgtgctaattatattcgcagtgggaccctcgtgatgattgtacacgatgtggctgacatttggctggagtctgctaagatgttttcttatgctggatggacgcagacctgtaacaccctgtttttcatcttctccaccatatttttcatcagccgcctcattgtttttcctttctggattttatattgcacgctgatcttgcctatgtatcacctcgagcctttcttttcatacatcttcctcaacctacagctcatgatcttgcaggtccttcacctttactggggttattacatcttgaagatgctcaacagatgtatattcatgaagagcatccaggatgtgaggagtgatgacgaggattatgaagaggaagaggaagaggaagaagaagaggctaccaaaggcaaagagatggattgtttaaagaacggcctcggggctgagaggcacctcattcccaatggccagcatggccattagctggaagcctacaggactcccatggcacagcatgctgcaagtactgttggcagcctggcttccaggccccacaccgaccccacattctgcccttccctctttctcaccaccgccttccctcccacctaagatgtgtttaccaaaatgttgttaacttgtgttaaaatgttaaatataagcatgcccatggatttttactgcagttaggactcagactggtcaaagatttcaaagatttctccacagaa

SEQ ID NO: 342646 - DNA, 1957 bp, Homo sapiens
cgagagagggcccgtgtccccgcggaggtcaaggccgagagagggcccgtgtccccgcgcaggtcaaggcccagagtccccgtgctcgcacagatggtgtcctggggcccagtcgcgctccccgctcgcggcagcccccgtgtactgggccttgcaaagtccgttaggagcgctccagggcgacagtgcccagcggttaacaagtggtgaaacaggaagcaacatcccatcaggaagaacctgagggtgccatccagtagcttcgcctcacgtcactgactgccctcagtcagaaatcttgactcgcaactttggagggtgggtctctgaaggaatttcaggtcttacacagagatgagttgtgctgctctctgaggagaacgaagctggttggaacgttggaagctgctctctgactacacttcacaagcaaggggcaccttttgtggactgacatttcagaaagggatgttgtgaaacaaaagctgacatttatatatatatacatatatacagtatttgagttcctcagtagaaagctatcatatatactcagaatgttttggacgtttaaagaatggttctggttggaaagattctggcttcctccaacaataaagtggtcagatcttgaggatcacgatggactcgtctttgtaaaaccttctcatttatacgtgacaattccatatgcttttctcttgctgattatcaggcgtgtatttgaaaaatttgttgcttcacctctagcaaaatcatttggcattaaagagacagttcgaaaggttacaccaaatactgtcttagagaattttttcaaacattccacaaggcaaccattgcaaactgatatttatggactggcaaagaagtgtaacttgacggagcgccaggtggaaagatggtttaggagtcggcggaatcaagagaggccttccaggctgaagaaattccaggaagcttgctggagatttgcattttacttaatgatcactgttgctggaattgcgtttctttatgataaaccttggctatatgacttatgggaggtttggaatggctatcccaaacagcccctgctgccatcccagtactggtactacattttagaaatgagtttttattggtctctgttatttagacttggctttgatgtcaagagaaaggattttctagctcatatcatccaccacctggctgctattagtctgatgagcttctcttggtgtgctaattatattcgcagtgggaccctcgtgatgattgtacacgatgtggctgacatttggctggagtctgctaagatgttttcttatgctggatggacgcagacctgtaacaccctgtttttcatcttctccaccatatttttcatcagccgcctcattgtttttcctttctggattttatattgcacgctgatcttgcctatgtatcacctcgagcctttcttttcatacatcttcctcaacctacagctcatgatcttgcaggtccttcacctttactggggttattacatcttgaagatgctcaacagatgtatattcatgaagagcatccaggatgtgaggagtgatgacgaggattatgaagaggaagaggaagaggaagaagaagaggctaccaaaggcaaagagatggattgtttaaagaacggcctcggggctgagaggcacctcattcccaatggccagcatggccattagctggaagcctacaggactcccatggcacagcatgctgcaagtactgttggcagcctggcttccaggccccacaccgaccccacattctgcccttccctctttctcaccaccgccttccctcccacctaagatgtgtttaccaaaatgttgttaacttgtgttaaaatgttaaatataagcatgcccatggatttttactgcagttaggactcagactggtcaaagatttcaaagatttctccacagaa

SEQ ID NO: 342647 - DNA, 306 bp, Homo sapiens
ttcctttctttctctctttctttctctttctttctttctttctttctttctttctttctttctttctttctttctttctttctttctttctttctttctttcctctctctctctctctcttccttccttccttcctctctttctctctttctatctgtctgtctatctgtctttccttccttccttcctccttttctctctttctttctttttttttttttcctggatggaattccactctgtcacccacgctggagtgcagcaccacacatcggggcccatggcaacagggtccctcaggggatc

SEQ ID NO: 342648 - DNA, 379 bp, Homo sapiens
  misc_feature (56)..(56): n is a, c, g, or t
cactccagcttgggtgacagaccaagaccctgtctcaaaaaaaaaaaaaaaaaaangaaaagaaaaagaaaatgaggagggattagagtgggagaaatgggtccattaatagctcttttgtttcagagttgtaaaatcctattgtagtacacttcattcactctaggttttcctgttagtgtattagaatttctttctattgaaaattactggccgggcacggtggctcatgcttgtaatcatcactttgggaggctgaggtgggtggattacttgaggtcgggagtttgagaccagcctggccagcatggtgaaactctgtctttactatacgcaggagtcgcttgaaccagtgcagtgagctgagattgtgccactt

SEQ ID NO: 342649 - DNA, 533 bp, Homo sapiens
ggaattcaataactatcatacaaataataagtgagtaatatttttataggtaacttggaaatgaaatgttccattcctgatacaagtttccagctaatttttatccgcacaccagatgataatgtatcaccctttcctttcctcagatcctcaaaagaaaagcatagtcttagcttcaatagatgttcacttatggtaaaattcaagcaccacagtagaatgtttgtcaaccttgaaaagccaaacatcataaatgagaattggttttcatagctgtaatacaaaccactgtgcaactaactgttttgattcatcacattttggtacagcttgcttctgggaaagttgagtcataccatatctggcttggcaatttgagcataaacttgcagtgtgcatacagctttttatatgttatcctgagaaacctgaaacagctgcactgctggcaggaaaacagaggaccaccagtaaaatattcaaaacagttgcatcttttaatttatggccatgtttccataaagagtatataa

SEQ ID NO: 342650 - DNA, 1900 bp, Homo sapiens
  misc_feature (3)..(4): n is a, c, g, or t
gannagagaaagcgagtgtccctctcgcgccccaggccggtgtacccccgcactccgcgccccggcctagaagctctctctccccgctccccggcccggcccccgccccgccccgccccagcccgctgggccgccatggagcgctggccttggccgtcgggcggcgcctggctgctcgtggctgcccgcgcgctgctgcagctgctgcgctcagacctgcgtctgggccgcccgctgctggcggcgctggcgctgctggccgcgctcgactggctgtgccagcgcctgctgcccccgccggccgcactcgccgtgctggccgccgccggctggatcgcgttgtcccgcctggcgcgcccgcagcgcctgccggtggccactcgcgcggtgctcatcaccggctgtgactctggttttggcaaggagacggccaagaaactggactccatgggcttcacggtgctggccaccgtattggagttgaacagccccggtgccatcgagctgcgtacctgctgctcccctcgcctaaggctgctgcagatggacctgaccaaaccaggagacattagccgcgtgctagagttcaccaaggcccacaccaccagcaccggcctgtggggcctcgtcaacaacgcaggccacaatgaagtagttgctgatgcggagctgtctccagtggccactttccgtagctgcatggaggtgaatttctttggcgcgctcgagctgaccaagggcctcctgcccctgctgcgcagctcaaggggccgcatcgtgactgtggggagcccagcgggggacatgccatatccgtgcttgggggcctatggaacctccaaagcggccgtggcgctactcatggacacattcagctgtgaactccttccctggggggtcaaggtcagcatcatccagcctggctgcttcaagacagagtcagtgagaaacgtgggtcagtgggaaaagcgcaagcaattgctgctggccaacctgcctcaagagctgctgcaggcctacggcaaggactacatcgagcacttgcatgggcagttcctgcactcgctacgcctggccatgtccgacctcaccccagttgtagatgccatcacagatgcgctgctggcagctcggccccgccgccgctattaccccggccagggcctggggctcatgtacttcatccactactacctgcctgaaggcctgcggcgccgcttcctgcaggccttcttcatcagtcactgtctgcctcgagcactgcagcctggccagcctggcactaccccaccacaggacgcagcccaggacccaaacctgagccccggcccttccccagcagtggctcggtgagccatgtgcacctatggcccagccactgcagcacaggaggctccgtgagcccttggttcctccccgaaaacccccagcattacgatcccccaagtgtcctggaccctggcctaaagaatcccacccccacttcatgcccactgccgatgcccaatccaggcccggtgaggccaaggtttcccagtgagcctctgcgcctctccactgtttcatgagcccaaacaccctcctggcacaacgctctaccctgcagcttggagaactccgctggatggggagtctcatgcaagacttcactgcagcctttcacaggactctgcagatagtgcctctgcaaactaaggagtgactaggtgggttggggaccccctcaggattgtttctcggcaccagtgcctcagtgctgcaattgagggctaaatcccaagtgtctcttgactggctcaagaattagggccccaactacacacccccaagccacagggaagcatgtactgtacttcccaattgccacattttaaataaagacaaatttttatttcttcta

SEQ ID NO: 342651 - DNA, 382 bp, Homo sapiens
aaggatgctttctctaacttgggctcctccaatctctggttgcaaagctggggttgggggagagaggaccacccaacctaccctgcagcttggagaactccgctggatggggagtctcatgcaagacttcactgcagcctttcacaggactctgcagatagtgcctctgcaaactaaggagtgactaggtgggttggggaccccctcaggattgtttctcggcaccagtgcctcagtgctgcaattgagggctaaatcccaagtgtctcttgactggctcaagaattagggccccaactacacacccccaagccacagggaagcatgtactgtacttcccaattgccacattttaaataaagacaaatttttatttcttcta

SEQ ID NO: 342652 - DNA, 1125 bp, Homo sapiens
gccccactcccaatccatccgcaggggacatgccatatccgtgcttgggggcctatggaacctccaaagcggccgtggcgctactcatggacacattcagctgtgaactccttccctggggggtcaaggtcagcatcatccagcctggctgcttcaagacagagtcagtgagaaacgtgggtcagtgggaaaagcgcaagcaattgctgctggccaacctgcctcaagagctgctgcaggcctacggcaaggactacatcgagcacttgcatgggcagttcctgcactcgctacgcctggccatgtccgacctcaccccagttgtagatgccatcacagatgcgctgctggcagctcggccccgccgccgctattaccccggccagggcctggggctcatgtacttcatccactactacctgcctgaaggcctgcggcgccgcttcctgcaggccttcttcatcagtcactgtctgcctcgagcactgcagcctggccagcctggcactaccccaccacaggacgcagcccaggacccaaacctgagccccggcccttccccagcagtggctcggtgagccatgtgcacctatggcccagccactgcagcacaggaggctccgtgagcccttggttcctccccgaaaacccccagcattacgatcccccaagtgtcctggaccctggcctaaagaatcccacccccacttcatgcccactgccgatgcccaatccaggcccggtgaggccaaggtttcccagtgagcctctgcgcctctccactgtttcatgagcccaaacaccctcctggcacaacgctctaccctgcagcttggagaactccgctggatggggagtctcatgcaagacttcactgcagcctttcacaggactctgcagatagtgcctctgcaaactaaggagtgactaggtgggttggggaccccctcaggattgtttctcggcaccagtgcctcagtgctgcaattgagggctaaatcccaagtgtctcttgactggctcaagaattagggccccaactacacacccccaagccacagggaagcatgtactgtacttcccaattgccacattttaaataaagacaaatttttatttcttcta

SEQ ID NO: 342653 - DNA, 1042 bp, Homo sapiens
ccgagtagatctagaggatcccgaggctctctctgatggggtccgtcagcatcatccagccgggtctgcttcaagacagagtcagtgagaaacgtgggtcagtgggaaaagcgcaagcaattgctgctggccaacctgcctcaagagctgctgcaggcctacggcaaggactacatcgagcacttgcatgggcagttcctgcactcgctacgcctggccatgtccgacctcaccccagttgtagatgccatcacagatgcgctgctggcagctcggccccgccgccgctattaccccggccagggcctggggctcatgtacttcatccactactacctgcctgaaggcctgcggcgccgcttcctgcaggccttcttcatcagtcactgtctgcctcgagcactgcagcctggccagcctggcactaccccaccacaggacgcagcccaggacccaaacctgagccccggcccttccccagcagtggctcggtgagccatgtgcacctatggcccagccactgcagcacaggaggctccgtgagcccttggttcctccccgaaaacccccagcattacgatcccccaagtgtcctggaccctggcctaaagaatcccacccccacttcatgcccactgccgatgcccaatccaggcccggtgaggccaaggtttcccagtgagcctctgcgcctctccactgtttcatgagcccaaacaccctcctggcacaacgctctaccctgcagcttggagaactccgctggatggggagtctcatgcaagacttcactgcagcctttcacaggactctgcagatagtgcctctgcaaactaaggagtgactaggtgggttggggaccccctcaggattgtttctcggcaccagtgcctcagtgctgcaattgagggctaaatcccaagtgtctcttgactggctcaagaattagggccccaactacacacccccaagccacagggaagcatgtactgtacttcccaattgccacattttaaataaagacaaatttttatttcttcta

SEQ ID NO: 342654 - DNA, 1992 bp, Homo sapiens
  misc_feature (3)..(4): n is a, c, g, or t
gannagagaaagcgagtgtccctctcgcgccccaggccggtgtacccccgcactccgcgccccggcctagaagctctctctccccgctccccggcccggcccccgccccgccccgccccagcccgctgggccgccatggagcgctggccttggccgtcgggcggcgcctggctgctcgtggctgcccgcgcgctgctgcagctgctgcgctcagacctgcgtctgggccgcccgctgctggcggcgctggcgctgctggccgcgctcgactggctgtgccagcgcctgctgcccccgccggccgcactcgccgtgctggccgccgccggctggatcgcgttgtcccgcctggcgcgcccgcagcgcctgccggtggccactcgcgcggtgctcatcaccggctgtgactctggttttggcaaggagacggccaagaaactggactccatgggcttcacggtgctggccaccgtattggagttgaacagccccggtgccatcgagctgcgtacctgctgctcccctcgcctaaggctgctgcagatggacctgaccaaaccaggagacattagccgcgtgctagagttcaccaaggcccacaccaccagcaccggcctgtggggcctcgtcaacaacgcaggccacaatgaagtagttgctgatgcggagctgtctccagtggccactttccgtagctgcatggaggtgaatttctttggcgcgctcgagctgaccaagggcctcctgcccctgctgcgcagctcaaggggccgcatcgtgactgtggggagcccagcgggggacatgccatatccgtgcttgggggcctatggaacctccaaagcggccgtggcgctactcatggacacattcagctgtgaactccttccctggggggtcaaggtcagcatcatccagcctggctgcttcaagacagagtcagtgagaaacgtgggtcagtgggaaaagcgcaagcaattgctgctggccaacctgcctcaagagctgctgcaggcctacggcaaggactacatcgagcacttgcatgggcagttcctgcactcgctacgcctggccatgtccgacctcaccccagttgtagatgccatcacagatgcgctgctggcagctcggccccgccgccgctattaccccggccagggcctggggctcatgtacttcatccactactacctgcctgaaggcctgcggcgccgcttcctgcaggccttcttcatcagtcactgtctgcctcgagcactgcagcctggccagcctggcactaccccaccacaggacgcagcccaggacccaaacctgagccccggcccttccccagcagtggctcggtgagccatgtgcacctatggcccagccactgcagcacaggaggctccgtgagcccttggttcctccccgaaaacccccagcattacgatcccccaagtgtcctggaccctggcctaaagaatcccacccccacttcatgcccactgccgatgcccaatccaggcccggtgaggccaaggtttcccagtgagcctctgcgcctctccactgtttcatgagcccaaacaccctcctggcacaacgctctaccctgcagcttggagaactccgctggatggggagtctcatgcaagacttcactgcagcctttcacaggactctgcagatagtgcctctgcaaactaaggagtgactaggtgggttggggaccccctcaggattgtttctcggcaccagtgcctcagtgctgcaattgagggctaaatcccaagtgtctcttgactggctcaagaattagggccccaactacacacccccaagccacagggaagcatgtactgtacttcccaattgccacattttaaataaagacaaatttttatttcttctaaaatgcggcaggtgctgtttggagggggtcactgactggctggctgagtgacacagtgtggccgtgtgacagggtggcaactcctggggctc

SEQ ID NO: 342655 - DNA, 342 bp, Homo sapiens
aagtaggggccaggttgtgggctctgcctctggggacagggcagatcccttcctgctttatttgtgagccacctcaacaggacccaggccatctgcaggtactagtggcctagctgggtagtctttcctgaggtctcacctcaggcctttgtgctgctgctgttgcttctggccttgagcctgagagagaggtgagaggaaggatgctttctctaacttgggctcctccaatctctggttgcaaagctggggttgggggagagaggaccacccaacctgccctgtacaagcatcagtaagactccaagtttcccagggcccgaacacttgggggttgtctct

SEQ ID NO: 342656 - DNA, 1628 bp, Homo sapiens
cagcggagaccgggtgagcaccggctggttcctcgcggtgttcctgcaggcttggcggccgcggtggtgcgatcagcaaagggcaccgggatgccggttgtgcgtgtcctcaggtgtcccgaacaagcgctgtgactctggttttggcaaggagacggccaagaaactggactccatgggcttcacggtgctggccaccgtattggagttgaacagccccggtgccatcgagctgcgtacctgctgctcccctcgcctaaggctgctgcagatggacctgaccaaaccaggagacattagccgcgtgctagagttcaccaaggcccacaccaccagcaccggcctgtggggcctcgtcaacaacgcaggccacaatgaagtagttgctgatgcggagctgtctccagtggccactttccgtagctgcatggaggtgaatttctttggcgcgctcgagctgaccaagggcctcctgcccctgctgcgcagctcaaggggccgcatcgtgactgtggggagcccagcgggggacatgccatatccgtgcttgggggcctatggaacctccaaagcggccgtggcgctactcatggacacattcagctgtgaactccttccctggggggtcaaggtcagcatcatccagcctggctgcttcaagacagagtcagtgagaaacgtgggtcagtgggaaaagcgcaagcaattgctgctggccaacctgcctcaagagctgctgcaggcctacggcaaggactacatcgagcacttgcatgggcagttcctgcactcgctacgcctggccatgtccgacctcaccccagttgtagatgccatcacagatgcgctgctggcagctcggccccgccgccgctattaccccggccagggcctggggctcatgtacttcatccactactacctgcctgaaggcctgcggcgccgcttcctgcaggccttcttcatcagtcactgtctgcctcgagcactgcagcctggccagcctggcactaccccaccacaggacgcagcccaggacccaaacctgagccccggcccttccccagcagtggctcggtgagccatgtgcacctatggcccagccactgcagcacaggaggctccgtgagcccttggttcctccccgaaaacccccagcattacgatcccccaagtgtcctggaccctggcctaaagaatcccacccccacttcatgcccactgccgatgcccaatccaggcccggtgaggccaaggtttcccagtgagcctctgcgcctctccactgtttcatgagcccaaacaccctcctggcacaacgctctaccctgcagcttggagaactccgctggatggggagtctcatgcaagacttcactgcagcctttcacaggactctgcagatagtgcctctgcaaactaaggagtgactaggtgggttggggaccccctcaggattgtttctcggcaccagtgcctcagtgctgcaattgagggctaaatcccaagtgtctcttgactggctcaagaattagggccccaactacacacccccaagccacagggaagcatgtactgtacttcccaattgccacattttaaataaagacaaatttttatttcttcta

SEQ ID NO: 342657 - DNA, 1135 bp, Homo sapiens
ggtggggaatggggctgggaatggtcttatgggggcaggtcaggtttgatgaatggtcatggttttggttgggggtgtagttttggctgcagacctggcgcgggttaaacagtcctaattggctttggctcccctagctgatcccactctgaccttgccactccttccccagagtcagtgagaaacgtgggtcagtgggaaaagcgcaagcaattgctgctggccaacctgcctcaagagctgctgcaggcctacggcaaggactacatcgagcacttgcatgggcagttcctgcactcgctacgcctggccatgtccgacctcaccccagttgtagatgccatcacagatgcgctgctggcagctcggccccgccgccgctattaccccggccagggcctggggctcatgtacttcatccactactacctgcctgaaggcctgcggcgccgcttcctgcaggccttcttcatcagtcactgtctgcctcgagcactgcagcctggccagcctggcactaccccaccacaggacgcagcccaggacccaaacctgagccccggcccttccccagcagtggctcggtgagccatgtgcacctatggcccagccactgcagcacaggaggctccgtgagcccttggttcctccccgaaaacccccagcattacgatcccccaagtgtcctggaccctggcctaaagaatcccacccccacttcatgcccactgccgatgcccaatccaggcccggtgaggccaaggtttcccagtgagcctctgcgcctctccactgtttcatgagcccaaacaccctcctggcacaacgctctaccctgcagcttggagaactccgctggatggggagtctcatgcaagacttcactgcagcctttcacaggactctgcagatagtgcctctgcaaactaaggagtgactaggtgggttggggaccccctcaggattgtttctcggcaccagtgcctcagtgctgcaattgagggctaaatcccaagtgtctcttgactggctcaagaattagggccccaactacacacccccaagccacagggaagcatgtactgtacttcccaattgccacattttaaataaagacaaatttttatttcttcta

SEQ ID NO: 342658 - DNA, 120 bp, Homo sapiens
acctactgtgtgcaaaatacagattttagtattgtgggtgcacaattgacaagatctggttcctgctcttgcattactcccaatctatataaaaatgattaaagaaattatctcagttca

SEQ ID NO: 342659 - DNA, 455 bp, Homo sapiens
ggactatgaaaaatcaatataagagtgagaaaaattcaaaaatgtgatgattggaaaaaataagatgtttaaaagtgaggttacagaactcaggagggaattagaataaatgaaaagttatttcagaaatgaagtctattctagaagtttcactagcaaaaatgacaatggataatatcttcagacaaatagaagattaaatggaggtgatctgccctctttggcctcccaaaatgttgggattgcaggtgtgagccaccgcaccagccatggaggattttaaaaaaatatatttttaaagaagaaagagataaaaaaggatttgggagaaagtgatcaaaaaacaaaacaaaaaacaagataggcagaagatctaacatatgtatgacaggatttcctgaagaggaaagggaaagcaacagaacagaacatacactaaaactatactttcatac

SEQ ID NO: 342660 - DNA, 181 bp, Homo sapiens
aaaacaaaaaaaacaaaaaaaggtccagccccacacggttagaaaaattctgttgatattaataaggtctggtaatacactttgaacaaattcttgatggctacagagagactaatcaaagtatgtgcttttgtgcatgtcaagtactgagctcccttctactcttctcacctgcttttca

SEQ ID NO: 342661 - DNA, 247 bp, Homo sapiens
cagcgtgagctgctacaacatcaactatggaattcgtaggtcctaacttccctcctgacacattaataaccaggctctgctgcctccacaaaaccaagtgtattctaccaaaggtcccataagcagaaaattgtactctgtttcaataaatggtatattttttaaagctgcctttagattacccccttagcaccttgaaactgtatttattatcatctgaagctggtgacatagataaataatgaat

SEQ ID NO: 342662 - DNA, 381 bp, Homo sapiens
tcccaaggtaaccctactgccagtcaaataactaatgccatctatcatcacaacatgcaccttttacatttctaaagatgtctttaatatttctccaggaacctataagcaattattaaccatattacccacaaacagcatcttctcctgtctcccactgcttctgatgagttgtttttttaatcccatggattcctgtcttacagtgatatactgtgttcttcagaggcccagctgaccccatttatgaccagggcacattttaagaatgacatgctacagcatctccctagaagcatcactgggccgtaaaagatacctataagctgttcatttcaattgctgtttgacttgggtggttgggtaaggagatatacagca

SEQ ID NO: 342663 - DNA, 116 bp, Homo sapiens
tgagcctctttgtgaagccacattagtcttcctttcccttgaccctggggaccccggggaccccgggaggacttaaagagttttaatgtgatttctggaatgtgcttgattttcag

SEQ ID NO: 342664 - DNA, 381 bp, Homo sapiens
aaaaaggctgggcacagtggctcaccatcaatcccagcactttgggaggtcaagtttcactcccagagtgctgggattacaagcgtgagccaccacgcccagtatgatttgtattttttataaatattttaatgttgtagaagaaaaaatattgccaagcatagcatttttctccccaccccttcttacctgtttaatgacacggcacaatattggccataggcaagaagggtgaggctgagctcacttgctgtttttttttttgaggaatgggtaccaaatttatttgttaatttcttgcatttgaagtacacagtcacatccttggcctgaaattctttgctgtagcccttcactgtgacacaactgcaaccaaccact

SEQ ID NO: 342665 - DNA, 309 bp, Homo sapiens
catgattatgatattaactatagtgtgttgggaaagctgtttgtaaatgtttactgtgcctttggttattgttattatctttgctctcttccaagacaactaatctgactgctggatggagccatagtgtaacccaaaccacaattcccaggggcccacacagcagaacggggctgcatcctctcatatttatccccacaacagccaaacacctcagtctgcaccttccaatggtgggcttcaggaatcttccatatgagcaaggaaaagtgacttttcctctcacacagctccccaggcagatggctg

SEQ ID NO: 342666 - DNA, 615 bp, Homo sapiens
  misc_feature (545)..(545): n is a, c, g, or t
agcgggtctcctctctgcctgcctggcaccagccagaccctgctctgcccggggggctctgagccccccaggcattcccttcactgcatccctctccattgggggggtgtctaaggaccctttccccttgggcatggcccagccaggggtctctgtcaagtccctggtgtcgtcttatgagacccgagtggtggggatggctccggggctgccccgaaaaaggggctgtgcctcttccccttgctctccccggggtgcatcccccatccgagggacatctgggcccccgccccaccggggcctgggaggccctgggcagcggccttcaacccgcagggggatggacaaaaccctcctctccctcattctctactgtcacagtggctccggaagcctggttggcattgacaacaaaatcgagcaagccatggactagtgttggctagtgtgataagcatcagagtctcaagagactctttggggaggggcacattattctcatttaacacagcactgtttgtggcagcatcctgaacattggcatntttatgacttaataagctatcttcttttgtaaccttatgcactgcttctacttgagccttcaaaatgtta

SEQ ID NO: 342667 - DNA, 2399 bp, Homo sapiens
agcctaagcagtggctgcagcaactgcaacagcagcggctgtggcaggcctggccccgggccagctggcgggaagccccaggagggagggagggaggaggaaggggaggaagaggggaaggaggaggaggaggaggagaggagcagtcagcaggcccgaggaggcaggacttcctggtgtgggggttgtcaacagcccagaaagagaaagacggagaggcagagacccaggggagccgaggagcggagacacggacccagcagggtcacgcgggaggagactcgggacacccactcgctggctgccaccgggagcagaggggggctcggccgccccctcccacatcagtctccagacccttggggcttcagaggccgctcctaggctcctcggaggaggcgcgggtttcttcttttccggagagcaaactttcctcggagatgcctggcaggatgagccgcggcccccggagaggacgggacagcctctgatcgccgcctgcgtgccccgccactgcccatggccaggaggccccagggaacggacagcccgacctcttaggcgccgggaccctcaggctcagatcagtggccgaggccccagagcaggcacccccggttcccgccaggccctcctgccatgtcggacccagacgtccccaggggctcggatgtccccgccatgtggcccccttgttccaggggtgcctgagccccttcaaggagccccaacccacccccaaccttggcccagccctgagccccagggaccatgagcgggggcaagaagaagagtagtttccaaatcaccagcgtcaccacggactatgagggccctgggagcccaggggcttcggatccccctaccccacagcccccaaccgggcccccgccccgcctgcccaatggggagcccagccccgatccggggggcaagggcaccccccggaatggctccccaccacctggggccccttcctcccgtttccgggtggtgaagctgccccacggcctgggagagccttatcgccgcggtcgctggacgtgtgtggatgtttatgagcgagacctggagccccacagcttcggcggactcctggagggaattcgaggggcctcagggggcgccgggggcagatctttggattccaggttggagctggccagcctcggcctgggcgcccccaccccaccgtcaggcctgtctcagggccccacctcctggctccgtccaccccccacctctcctggacctcaggcccgctccttcactgggggactgggccagctggtggtgcccagcaaagccaaggcagagaaacccccactgtcggcctcctcaccccagcagcgccccccagagcctgagaccggtgagagtgcgggcacatcccgggctgccacgcccctgccctctctgagggtggaagcggaggctgggggctcaggggccaggacccctccactgtcccggaggaaagctgtagacatgcggctgcggatggagttgggtgctccagaagagatggggcaggtgcccccacttgactctcgccccagctccccagccctctacttcacccacgatgccagcctggttcacaaatctccagaccccttcggagcagtagcagctcagaagttcagcctggcccactccatgttggccatcagtggtcacctagacagcgacgatgatagtggctccggaagcctggttggcattgacaacaaaatcgagcaagccatggacttggtgaagtcccacctcatgtttgcggtccgggaggaggtggaggtgctgaaggagcagatccgggaactggcggagcggaacgctgcgctggagcaggagaatgggctgctgcgcgccctggccagcccggagcagctggctcagctgccctcctcgggggtcccacggcttgggccccctgcgcccaatgggccctccgtctgagcctcccttcccttacaatgtgcctttggggctgcccggccttgcgtcagccgcctgccccctcttcctatgcagctttaatgtccccgtgtccccggggtgggagttcaaggctcagtaatggcctggtcccccggcccctgccccatctcctcatcatccccagccttgatggaggagggagggcttcaggacggggcgtcagagggagccccctctgggagggaaccaacccccaccctccctcctgggaccccccagcagtagacggcttgggggagtcggaggctccccggcagacaccccacccccatcttgttcccttgaggtgcctcctctcctctgcccaggggagggagtgtggacagtatctggaagttctgggattcaggttgttattaaaataataataataattaaaaactctgaagaaacttgaa

SEQ ID NO: 342668 - DNA, 1509 bp, Homo sapiens
  misc_feature (53)..(53): n is a, c, g, or t
taaacacatccaccaacaatacgacgcgcagattgtactatgaaccgtgttanagcaggtgtacggccggaattttgggatccaggggagccgaggagcggagacacggacccagcagggtcacgcgggaggagactcgggacacccactcgctggctgccaccgggagcagaggggggctcggccgccccctcccacatcagtctccagacccttggggcttcagaggccgctcctaggctcctcggaggaggcgcgggtttcttcttttccggagagcaaactttcctcggagatgcctggcaggatgagccgcggcccccggagaggacgggacagcctctgatcgccgcctgcgtgccccgccactgcccatggccaggaggccccagggaacggacagcccgacctcttaggcgccgggaccctcaggctcagatcagtggccgaggccccagagcgccccccagagcctgagaccggtgagagtgcgggcacatcccgggctgccacgcccctgccctctctgagggtggaagcggaggctgggggctcaggggccaggacccctccactgtcccggaggaaagctgtagacatgcggctgcggatggagttgggtgctccagaagagatggggcaggtgcccccacttgactctcgccccagctccccagccctctacttcacccacgatgccagcctggttcacaaatctccagaccccttcggagcagtagcagctcagaagttcagcctggcccactccatgttggccatcagtggtcacctagacagcgacgatgatagtggctccggaagcctggttggcattgacaacaaaatcgagcaagccatggacttggtgaagtcccacctcatgtttgcggtccgggaggaggtggaggtgctgaaggagcagatccgggaactggcggagcggaacgctgcgctggagcaggagaatgggctgctgcgcgccctggccagcccggagcagctggctcagctgccctcctcgggggtcccacggcttgggccccctgcgcccaatgggccctccgtctgagcctcccttcccttacaatgtgcctttggggctgcccggccttgcgtcagccgcctgccccctcttcctatgcagctttaatgtccccgtgtccccggggtgggagttcaaggctcagtaatggcctggtcccccggcccctgccccatctcctcatcatccccagccttgatggaggagggagggcttcaggacggggcgtcagagggagccccctctgggagggaaccaacccccaccctccctcctgggaccccccagcagtagacggcttgggggagtcggaggctccccggcagacaccccacccccatcttgttcccttgaggtgcctcctctcctctgcccaggggagggagtgtggacagtatctggaagttctgggattcaggttgttattaaaataataataataattaaaaactctgaagaaacttgaa

SEQ ID NO: 342669 - DNA, 1080 bp, Homo sapiens
agcgggtctcctctctgcctgcctggcaccagccagaccctgctctgcccggggggctctgagccccccaggcattcccttcactgcatccctctccattgggggggtgtctaaggaccctttccccttgggcatggcccagccaggggtctctgtcaagtccctggtgtcgtcttatgagacccgagtggtggggatggctccggggctgccccgaaaaaggggctgtgcctcttccccttgctctccccggggtgcatcccccatccgagggacatctgggcccccgccccaccggggcctgggaggccctgggcagcggccttcaacccgcagggggatggacaaaaccctcctctccctcattctctactgtcacagtggctccggaagcctggttggcattgacaacaaaatcgagcaagccatggacttggtgaagtcccacctcatgtttgcggtccgggaggaggtggaggtgctgaaggagcagatccgggaactggcggagcggaacgctgcgctggagcaggagaatgggctgctgcgcgccctggccagcccggagcagctggctcagctgccctcctcgggggtcccacggcttgggccccctgcgcccaatgggccctccgtctgagcctcccttcccttacaatgtgcctttggggctgcccggccttgcgtcagccgcctgccccctcttcctatgcagctttaatgtccccgtgtccccggggtgggagttcaaggctcagtaatggcctggtcccccggcccctgccccatctcctcatcatccccagccttgatggaggagggagggcttcaggacggggcgtcagagggagccccctctgggagggaaccaacccccaccctccctcctgggaccccccagcagtagacggcttgggggagtcggaggctccccggcagacaccccacccccatcttgttcccttgaggtgcctcctctcctctgcccaggggagggagtgtggacagtatctggaagttctgggattcaggttgttattaaaataataataataattaaaaactctgaagaaacttgaa

SEQ ID NO: 342670 - DNA, 1174 bp, Homo sapiens
agcgggtctcctctctgcctgcctggcaccagccagaccctgctctgcccggggggctctgagccccccaggcattcccttcactgcatccctctccattgggggggtgtctaaggaccctttccccttgggcatggcccagccaggggtctctgtcaagtccctggtgtcgtcttatgagacccgagtggtggggatggctccggggctgccccgaaaaaggggctgtgcctcttccccttgctctccccggggtgcatcccccatccgagggacatctgggcccccgccccaccggggcctgggaggccctgggcagcggccttcaacccgcagggggatggacaaaaccctcctctccctcattctctactgtcacaggtacaggggggtgtgggcgggaggctgtggtccaagaaaccagcacctgggaaggcttctcctctcctcccctcaccttcctgtgtctctccagtggctccggaagcctggttggcattgacaacaaaatcgagcaagccatggacttggtgaagtcccacctcatgtttgcggtccgggaggaggtggaggtgctgaaggagcagatccgggaactggcggagcggaacgctgcgctggagcaggagaatgggctgctgcgcgccctggccagcccggagcagctggctcagctgccctcctcgggggtcccacggcttgggccccctgcgcccaatgggccctccgtctgagcctcccttcccttacaatgtgcctttggggctgcccggccttgcgtcagccgcctgccccctcttcctatgcagctttaatgtccccgtgtccccggggtgggagttcaaggctcagtaatggcctggtcccccggcccctgccccatctcctcatcatccccagccttgatggaggagggagggcttcaggacggggcgtcagagggagccccctctgggagggaaccaacccccaccctccctcctgggaccccccagcagtagacggcttgggggagtcggaggctccccggcagacaccccacccccatcttgttcccttgaggtgcctcctctcctctgcccaggggagggagtgtggacagtatctggaagttctgggattcaggttgttattaaaataataataataattaaaaactctgaagaaacttgaa

SEQ ID NO: 342671 - DNA, 2264 bp, Homo sapiens
agcctaagcagtggctgcagcaactgcaacagcagcggctgtggcaggcctggccccgggccagctggcgggaagccccaggagggagggagggaggaggaaggggaggaagaggggaaggaggaggaggaggaggagaggagcagtcagcaggcccgaggaggcaggacttcctggtgtgggggttgtcaacagcccagaaagagaaagacggagaggcagagacccaggggagccgaggagcggagacacggacccagcagggtcacgcgggaggagactcgggacacccactcgctggctgccaccgggagcagaggggggctcggccgccccctcccacatcagtctccagacccttggggcttcagaggccgctcctaggctcctcggaggaggcgcgggtttcttcttttccggagagcaaactttcctcggagatgcctggcaggatgagccgcggcccccggagaggacgggacagcctctgatcgccgcctgcgtgccccgccactgcccatggccaggaggccccagggaacggacagcccgacctcttaggcgccgggaccctcaggctcagatcagtggccgaggccccagagtttgcaaactcagctctggagttcagcagcaacagcagcaggaaaaacctgcccctgctcccccctcccgccacctcccctctcctcttctcccctcacccagcaggcacccccggttcccgccaggccctcctgccatgtcggacccagacgtccccaggggctcggatgtccccgccatgtggcccccttgttccaggggtgcctgagccccttcaaggagccccaacccacccccaaccttggcccagccctgagccccagggaccatgagcgggggcaagaagaagagtagtttccaaatcaccagcgtcaccacggactatgagggccctgggagcccaggggcttcggatccccctaccccacagcccccaaccgggcccccgccccgcctgcccaatggggagcccagccccgatccggggggcaagggcaccccccggaatggctccccaccacctggggccccttcctcccgtttccgggtggtgaagctgccccacggcctgggagagccttatcgccgcggtcgctggacgtgtgtggatgtttatgagcgagacctggagccccacagcttcggcggactcctggagggaattcgaggggcctcagggggcgccgggggcagatctttggattccaggttggagctggccagcctcggcctgggcgcccccaccccaccgtcaggcctgtctcagggccccacctcctggctccgtccaccccccacctctcctggacctcaggcccgctccttcactgggggactgggccagctggtggtgcccagcaaagccaaggcagagaaacccccactgtcggcctcctcaccccagcagcgccccccagagcctgagaccggtgagagtgcgggcacatcccgggctgccacgcccctgccctctctgagggtggaagcggaggctgggggctcaggggccaggacccctccactgtcccggaggaaagctgtagacatgcggctgcggatggagttgggtgctccagaagagatggggcaggtgcccccacttgactctcgccccagctccccagccctctacttcacccacgatgccagcctggttcacaaatctccagaccccttcggagcagtagcagctcagaagttcagcctggcccactccatgttggccatcagtggtcacctagacagcgacgatgatagtggctccggaagcctggttggcattgacaacaaaatcgagcaagccatggacttggtgaagtcccacctcatgtttgcggtccgggaggaggtggaggtgctgaaggagcagatccgggaactggcggagcggaacgctgcgctggagcaggagaatgggctgctgcgcgccctggccagcccggagcagctggctcagctgccctcctcgggggtcccacggcttgggccccctgcgcccaatgggccctccgtctgagcctcccttcccttacaatgtgcctttggggctgcccggccttgcgtcagccgcctgccccctcttcctatgcagctttaatgtccccgtgtccccggggtgggagttcaaggctcagtaatggcctggtcccccggcccggtacatgcaagctcccatcagggctgaggaagaatatgaggctttcgagtgatgagcccac

SEQ ID NO: 342672 - DNA, 2291 bp, Homo sapiens
agcctaagcagtggctgcagcaactgcaacagcagcggctgtggcaggcctggccccgggccagctggcgggaagccccaggagggagggagggaggaggaaggggaggaagaggggaaggaggaggaggaggaggagaggagcagtcagcaggcccgaggaggcaggacttcctggtgtgggggttgtcaacagcccagaaagagaaagacggagaggcagagacccaggggagccgaggagcggagacacggacccagcagggtcacgcgggaggagactcgggacacccactcgctggctgccaccgggagcagaggggggctcggccgccccctcccacatcagtctccagacccttggggcttcagaggccgctcctaggctcctcggaggaggcgcgggtttcttcttttccggagagcaaactttcctcggagatgcctggcaggatgagccgcggcccccggagaggacgggacagcctctgatcgccgcctgcgtgccccgccactgcccatggccaggaggccccagggaacggacagcccgacctcttaggcgccgggaccctcaggctcagatcagtggccgaggccccagagtttgcaaactcagctctggagttcagcagcaacagcagcaggaaaaacctgcccctgctcccccctcccgccacctcccctctcctcttctcccctcacccagcaggcacccccggttcccgccaggccctcctgccatgtcggacccagacgtccccaggggctcggatgtccccgccatgtggcccccttgttccaggggtgcctgagccccttcaaggagccccaacccacccccaaccttggcccagccctgagccccagggaccatgagcgggggcaagaagaagagtagtttccaaatcaccagcgtcaccacggactatgagggccctgggagcccaggggcttcggatccccctaccccacagcccccaaccgggcccccgccccgcctgcccaatggggagcccagccccgatccggggggcaagggcaccccccggaatggctccccaccacctggggccccttcctcccgtttccgggtggtgaagctgccccacggcctgggagagccttatcgccgcggtcgctggacgtgtgtggatgtttatgagcgagacctggagccccacagcttcggcggactcctggagggaattcgaggggcctcagggggcgccgggggcagatctttggattccaggttggagctggccagcctcggcctgggcgcccccaccccaccgtcaggcctgtctcagggccccacctcctggctccgtccaccccccacctctcctggacctcaggcccgctccttcactgggggactgggccagctggtggtgcccagcaaagccaaggcagagaaacccccactgtcggcctcctcaccccagcagcgccccccagagcctgagaccggtgagagtgcgggcacatcccgggctgccacgcccctgccctctctgagggtggaagcggaggctgggggctcaggggccaggacccctccactgtcccggaggaaagctgtagacatgcggctgcggatggagttgggtgctccagaagagatggggcaggtgcccccacttgactctcgccccagctccccagccctctacttcacccacgatgccagcctggttcacaaatctccagaccccttcggagcagtagcagctcagaagttcagcctggcccactccatgttggccatcagtggtcacctagacagcgacgatgataggtaggtgggcttcgtggggtggtggggcgtggggttcaggttccccgcccagcacccggggtagctgtaagaaagtgcctggtaggcatccttcccccaggttgaacttggagaggacctcttagagaaacctggcctgggcatagccactgcacacagttgatttcggacccactccctctctgtggagagggctgggtgggactccctggctcagaactgtcaggtcacagacttttttagagtctgaagggagtcattgttgtcagattccagagctcttgcagatttagagatcatctggccaacccaggaacccactggcaaatgcatgctctagacagaatagcaaatcaggccggggcacagtggctcccgcctgtactcatagtgctttgggaggcccaggcaggaaaattgcttgaggccaggagttcaagaccaagccctggcaatgtagcgagacctcatctctaaaaagaaaaaga

SEQ ID NO: 342673 - DNA, 2078 bp, Homo sapiens
agcctaagcagtggctgcagcaactgcaacagcagcggctgtggcaggcctggccccgggccagctggcgggaagccccaggagggagggagggaggaggaaggggaggaagaggggaaggaggaggaggaggaggagaggagcagtcagcaggcccgaggaggcaggacttcctggtgtgggggttgtcaacagcccagaaagagaaagacggagaggcagagacccaggggagccgaggagcggagacacggacccagcagggtcacgcgggaggagactcgggacacccactcgctggctgccaccgggagcagaggggggctcggccgccccctcccacatcagtctccagacccttggggcttcagaggccgctcctaggctcctcggaggaggcgcgggtttcttcttttccggagagcaaactttcctcggagatgcctggcaggatgagccgcggcccccggagaggacgggacagcctctgatcgccgcctgcgtgccccgccactgcccatggccaggaggccccagggaacggacagcccgacctcttaggcgccgggaccctcaggctcagatcagtggccgaggccccagagtttgcaaactcagctctggagttcagcagcaacagcagcaggaaaaacctgcccctgctcccccctcccgccacctcccctctcctcttctcccctcacccagcaggcacccccggttcccgccaggccctcctgccatgtcggacccagacgtccccaggggctcggatgtccccgccatgtggcccccttgttccaggggtgcctgagccccttcaaggagccccaacccacccccaaccttggcccagccctgagccccagggaccatgagcgggggcaagaagaagagtagtttccaaatcaccagcgtcaccacggactatgagggccctgggagcccaggggcttcggatccccctaccccacagcccccaaccgggcccccgccccgcctgcccaatggggagcccagccccgatccggggggcaagggcaccccccggaatggctccccaccacctggggccccttcctcccgtttccgggtggtgaagctgccccacggcctgggagagccttatcgccgcggtcgctggacgtgtgtggatgtttatgagcgagacctggagccccacagcttcggcggactcctggagggaattcgaggggcctcagggggcgccgggggcagatctttggattccaggttggagctggccagcctcggcctgggcgcccccaccccaccgtcaggcctgtctcagggccccacctcctggctccgtccaccccccacctctcctggacctcaggcccgctccttcactgggggactgggccagctggtggtgcccagcaaagccaaggcagagaaacccccactgtcggcctcctcaccccagcagcgccccccagagcctgagaccggtgagagtgcgggcacatcccgggctgccacgcccctgccctctctgagggtggaagcggaggctgggggctcaggggccaggacccctccactgtcccggaggaaagctgtagacatgcggctgcggatggagttgggtgctccagaagagatggggcaggtgcccccacttgactctcgccccagctccccagccctctacttcacccacgatgccagcctggttcacaaatctccagaccccttcggagcagtagcagctcagaagttcagcctggcccactccatgttggccatcagtggtcacctagacagcgacgatgataggtaggtgggcttcgtggggtggtggggcgtggggttcaggttccccgcccagcacccggggtagctgtaagaaagtgcctggtaggcatccttcccccaggttgaacttggagaggacctcttagagaaacctggcctgggcatagccactgcacacagttgatttcggacccactccctctctgtggagagggctgggtgggactccctggctcagaactgtcaggaagagacccggagtcaggaagagacccgcagtcaggaagagacccgca

SEQ ID NO: 342674 - DNA, 1115 bp, Homo sapiens
  misc_feature (53)..(53): n is a, c, g, or t
taaacacatccaccaacaatacgacgcgcagattgtactatgaaccgtgttanagcaggtgtacggccggaattttgggatccaggggagccgaggagcggagacacggacccagcagggtcacgcgggaggagactcgggacacccactcgctggctgccaccgggagcagaggggggctcggccgccccctcccacatcagtctccagacccttggggcttcagaggccgctcctaggctcctcggaggaggcgcgggtttcttcttttccggagagcaaactttcctcggagatgcctggcaggatgagccgcggcccccggagaggacgggacagcctctgatcgccgcctgcgtgccccgccactgcccatggccaggaggccccagggaacggacagcccgacctcttaggcgccgggaccctcaggctcagatcagtggccgaggccccagaggtgcccccacttgactctcgccccagctccccagccctctacttcacccacgatgccagcctggttcacaaatctccagaccccttcggagcagtagcagctcagaagttcagcctggcccactccatgttggccatcagtggtcacctagacagcgacgatgataggtaggtgggcttcgtggggtggtggggcgtggggttcaggttccccgcccagcacccggggtagctgtaagaaagtgcctggtaggcatccttcccccaggttgaacttggagaggacctcttagagaaacctggcctgggcatagccactgcacacagttgatttcggacccactccctctctgtggagagggctgggtgggactccctggctcagaactgtcaggtcacagacttttttagagtctgaagggagtcattgttgtcagattccagagctcttgcagatttagagatcatctggccaacccaggaacccactggcaaatgcatgctctagacagaatagcaaatcaggccggggcacagtggctcccgcctgtactcatagtgctttgggaggcccaggcaggaaaattgcttgaggccaggagttcaagaccaagccctggcaatgtagcgagacctcatctctaaaaagaaaaaga

SEQ ID NO: 342675 - DNA, 2502 bp, Homo sapiens
agcctaagcagtggctgcagcaactgcaacagcagcggctgtggcaggcctggccccgggccagctggcgggaagccccaggagggagggagggaggaggaaggggaggaagaggggaaggaggaggaggaggaggagaggagcagtcagcaggcccgaggaggcaggacttcctggtgtgggggttgtcaacagcccagaaagagaaagacggagaggcagagacccaggggagccgaggagcggagacacggacccagcagggtcacgcgggaggagactcgggacacccactcgctggctgccaccgggagcagaggggggctcggccgccccctcccacatcagtctccagacccttggggcttcagaggccgctcctaggctcctcggaggaggcgcgggtttcttcttttccggagagcaaactttcctcggagatgcctggcaggatgagccgcggcccccggagaggacgggacagcctctgatcgccgcctgcgtgccccgccactgcccatggccaggaggccccagggaacggacagcccgacctcttaggcgccgggaccctcaggctcagatcagtggccgaggccccagagtttgcaaactcagctctggagttcagcagcaacagcagcaggaaaaacctgcccctgctcccccctcccgccacctcccctctcctcttctcccctcacccagcaggcacccccggttcccgccaggccctcctgccatgtcggacccagacgtccccaggggctcggatgtccccgccatgtggcccccttgttccaggggtgcctgagccccttcaaggagccccaacccacccccaaccttggcccagccctgagccccagggaccatgagcgggggcaagaagaagagtagtttccaaatcaccagcgtcaccacggactatgagggccctgggagcccaggggcttcggatccccctaccccacagcccccaaccgggcccccgccccgcctgcccaatggggagcccagccccgatccggggggcaagggcaccccccggaatggctccccaccacctggggccccttcctcccgtttccgggtggtgaagctgccccacggcctgggagagccttatcgccgcggtcgctggacgtgtgtggatgtttatgagcgagacctggagccccacagcttcggcggactcctggagggaattcgaggggcctcagggggcgccgggggcagatctttggattccaggttggagctggccagcctcggcctgggcgcccccaccccaccgtcaggcctgtctcagggccccacctcctggctccgtccaccccccacctctcctggacctcaggcccgctccttcactgggggactgggccagctggtggtgcccagcaaagccaaggcagagaaacccccactgtcggcctcctcaccccagcagcgccccccagagcctgagaccggtgagagtgcgggcacatcccgggctgccacgcccctgccctctctgagggtggaagcggaggctgggggctcaggggccaggacccctccactgtcccggaggaaagctgtagacatgcggctgcggatggagttgggtgctccagaagagatggggcaggtgcccccacttgactctcgccccagctccccagccctctacttcacccacgatgccagcctggttcacaaatctccagaccccttcggagcagtagcagctcagaagttcagcctggcccactccatgttggccatcagtggtcacctagacagcgacgatgatagtggctccggaagcctggttggcattgacaacaaaatcgagcaagccatggacttggtgaagtcccacctcatgtttgcggtccgggaggaggtggaggtgctgaaggagcagatccgggaactggcggagcggaacgctgcgctggagcaggagaatgggctgctgcgcgccctggccagcccggagcagctggctcagctgccctcctcgggggtcccacggcttgggccccctgcgcccaatgggccctccgtctgagcctcccttcccttacaatgtgcctttggggctgcccggccttgcgtcagccgcctgccccctcttcctatgcagctttaatgtccccgtgtccccggggtgggagttcaaggctcagtaatggcctggtcccccggcccctgccccatctcctcatcatccccagccttgatggaggagggagggcttcaggacggggcgtcagagggagccccctctgggagggaaccaacccccaccctccctcctgggaccccccagcagtagacggcttgggggagtcggaggctccccggcagacaccccacccccatcttgttcccttgaggtgcctcctctcctctgcccaggggagggagtgtggacagtatctggaagttctgggattcaggttgttattaaaataataataataattaaaaactctgaagaaacttgaa

SEQ ID NO: 342676 - DNA, 2357 bp, Homo sapiens
  misc_feature (53)..(53): n is a, c, g, or t
taaacacatccaccaacaatacgacgcgcagattgtactatgaaccgtgttanagcaggtgtacggccggaattttgggatccaggggagccgaggagcggagacacggacccagcagggtcacgcgggaggagactcgggacacccactcgctggctgccaccgggagcagaggggggctcggccgccccctcccacatcagtctccagacccttggggcttcagaggccgctcctaggctcctcggaggaggcgcgggtttcttcttttccggagagcaaactttcctcggagatgcctggcaggatgagccgcggcccccggagaggacgggacagcctctgatcgccgcctgcgtgccccgccactgcccatggccaggaggccccagggaacggacagcccgacctcttaggcgccgggaccctcaggctcagatcagtggccgaggccccagagtttgcaaactcagctctggagttcagcagcaacagcagcaggaaaaacctgcccctgctcccccctcccgccacctcccctctcctcttctcccctcacccagcaggcacccccggttcccgccaggccctcctgccatgtcggacccagacgtccccaggggctcggatgtccccgccatgtggcccccttgttccaggggtgcctgagccccttcaaggagccccaacccacccccaaccttggcccagccctgagccccagggaccatgagcgggggcaagaagaagagtagtttccaaatcaccagcgtcaccacggactatgagggccctgggagcccaggggcttcggatccccctaccccacagcccccaaccgggcccccgccccgcctgcccaatggggagcccagccccgatccggggggcaagggcaccccccggaatggctccccaccacctggggccccttcctcccgtttccgggtggtgaagctgccccacggcctgggagagccttatcgccgcggtcgctggacgtgtgtggatgtttatgagcgagacctggagccccacagcttcggcggactcctggagggaattcgaggggcctcagggggcgccgggggcagatctttggattccaggttggagctggccagcctcggcctgggcgcccccaccccaccgtcaggcctgtctcagggccccacctcctggctccgtccaccccccacctctcctggacctcaggcccgctccttcactgggggactgggccagctggtggtgcccagcaaagccaaggcagagaaacccccactgtcggcctcctcaccccagcagcgccccccagagcctgagaccggtgagagtgcgggcacatcccgggctgccacgcccctgccctctctgagggtggaagcggaggctgggggctcaggggccaggacccctccactgtcccggaggaaagctgtagacatgcggctgcggatggagttgggtgctccagaagagatggggcaggtgcccccacttgactctcgccccagctccccagccctctacttcacccacgatgccagcctggttcacaaatctccagaccccttcggagcagtagcagctcagaagttcagcctggcccactccatgttggccatcagtggtcacctagacagcgacgatgatagtggctccggaagcctggttggcattgacaacaaaatcgagcaagccatggacttggtgaagtcccacctcatgtttgcggtccgggaggaggtggaggtgctgaaggagcagatccgggaactggcggagcggaacgctgcgctggagcaggagaatgggctgctgcgcgccctggccagcccggagcagctggctcagctgccctcctcgggggtcccacggcttgggccccctgcgcccaatgggccctccgtctgagcctcccttcccttacaatgtgcctttggggctgcccggccttgcgtcagccgcctgccccctcttcctatgcagctttaatgtccccgtgtccccggggtgggagttcaaggctcagtaatggcctggtcccccggcccctgccccatctcctcatcatccccagccttgatggaggagggagggcttcaggacggggcgtcagagggagccccctctgggagggaaccaacccccaccctccctcctgggaccccccagcagtagacggcttgggggagtcggaggctccccggcagacaccccacccccatcttgttcccttgaggtgcctcctctcctctgcccaggggagggagtgtggacagtatctggaagttctgggattcaggttgttattaaaataataataataattaaaaactctgaagaaacttgaa

SEQ ID NO: 342677 - DNA, 2885 bp, Homo sapiens
agcctaagcagtggctgcagcaactgcaacagcagcggctgtggcaggcctggccccgggccagctggcgggaagccccaggagggagggagggaggaggaaggggaggaagaggggaaggaggaggaggaggaggagaggagcagtcagcaggcccgaggaggcaggacttcctggtgtgggggttgtcaacagcccagaaagagaaagacggagaggcagagacccaggggagccgaggagcggagacacggacccagcagggtcacgcgggaggagactcgggacacccactcgctggctgccaccgggagcagaggggggctcggccgccccctcccacatcagtctccagacccttggggcttcagaggccgctcctaggctcctcggaggaggcgcgggtttcttcttttccggagagcaaactttcctcggagatgcctggcaggatgagccgcggcccccggagaggacgggacagcctctgatcgccgcctgcgtgccccgccactgcccatggccaggaggccccagggaacggacagcccgacctcttaggcgccgggaccctcaggctcagatcagtggccgaggccccagagtttgcaaactcagctctggagttcagcagcaacagcagcaggaaaaacctgcccctgctcccccctcccgccacctcccctctcctcttctcccctcacccagcaggcacccccggttcccgccaggccctcctgccatgtcggacccagacgtccccaggggctcggatgtccccgccatgtggcccccttgttccaggggtgcctgagccccttcaaggagccccaacccacccccaaccttggcccagccctgagccccagggaccatgagcgggggcaagaagaagagtagtttccaaatcaccagcgtcaccacggactatgagggccctgggagcccaggggcttcggatccccctaccccacagcccccaaccgggcccccgccccgcctgcccaatggggagcccagccccgatccggggggcaagggcaccccccggaatggctccccaccacctggggccccttcctcccgtttccgggtggtgaagctgccccacggcctgggagagccttatcgccgcggtcgctggacgtgtgtggatgtttatgagcgagacctggagccccacagcttcggcggactcctggagggaattcgaggggcctcagggggcgccgggggcagatctttggattccaggttggagctggccagcctcggcctgggcgcccccaccccaccgtcaggcctgtctcagggccccacctcctggctccgtccaccccccacctctcctggacctcaggcccgctccttcactgggggactgggccagctggtggtgcccagcaaagccaaggcagagaaacccccactgtcggcctcctcaccccagcagcgccccccagagcctgagaccggtgagagtgcgggcacatcccgggctgccacgcccctgccctctctgagggtggaagcggaggctgggggctcaggggccaggacccctccactgtcccggaggaaagctgtagacatgcggctgcggatggagttgggtgctccagaagagatggggcaggtgcccccacttgactctcgccccagctccccagccctctacttcacccacgatgccagcctggttcacaaatctccagaccccttcggagcagtagcagctcagaagttcagcctggcccactccatgttggccatcagtggtcacctagacagcgacgatgatagtggctccggaagcctggttggcattgacaacaaaatcgagcaagccatggtaagagaagccatcttggtcccaggaggtcctggcccccttaagccatccctctgccccagccctgtcctcttccttaccagggaacaccaactcccagctcctccgtccctctccctgctgggctgctgggcatcctctgccccctcctgccaccacctccacccttgactttgcccagcctctagtctggctactggtccccatctctgtctttgagccctgactctgcctctgtccctcgtccttttcccctgtcccttccctgctttgtccctcatcctctggacactggggactgtctcccaccccagccctcaaggcactgggcaggggatgaggcacccaccccgttgacgctgtgcctgtcccggggcccccaggacttggtgaagtcccacctcatgtttgcggtccgggaggaggtggaggtgctgaaggagcagatccgggaactggcggagcggaacgctgcgctggagcaggagaatgggctgctgcgcgccctggccagcccggagcagctggctcagctgccctcctcgggggtcccacggcttgggccccctgcgcccaatgggccctccgtctgagcctcccttcccttacaatgtgcctttggggctgcccggccttgcgtcagccgcctgccccctcttcctatgcagctttaatgtccccgtgtccccggggtgggagttcaaggctcagtaatggcctggtcccccggcccctgccccatctcctcatcatccccagccttgatggaggagggagggcttcaggacggggcgtcagagggagccccctctgggagggaaccaacccccaccctccctcctgggaccccccagcagtagacggcttgggggagtcggaggctccccggcagacaccccacccccatcttgttcccttgaggtgcctcctctcctctgcccaggggagggagtgtggacagtatctggaagttctgggattcaggttgttattaaaataataataataattaaaaactctgaagaaacttgaa

SEQ ID NO: 342678 - DNA, 1326 bp, Homo sapiens
  misc_feature (53)..(53): n is a, c, g, or t
taaacacatccaccaacaatacgacgcgcagattgtactatgaaccgtgttanagcaggtgtacggccggaattttgggatccaggggagccgaggagcggagacacggacccagcagggtcacgcgggaggagactcgggacacccactcgctggctgccaccgggagcagaggggggctcggccgccccctcccacatcagtctccagacccttggggcttcagaggccgctcctaggctcctcggaggaggcgcgggtttcttcttttccggagagcaaactttcctcggagatgcctggcaggatgagccgcggcccccggagaggacgggacagcctctgatcgccgcctgcgtgccccgccactgcccatggccaggaggccccagggaacggacagcccgacctcttaggcgccgggaccctcaggctcagatcagtggccgaggccccagaggtgcccccacttgactctcgccccagctccccagccctctacttcacccacgatgccagcctggttcacaaatctccagaccccttcggagcagtagcagctcagaagttcagcctggcccactccatgttggccatcagtggtcacctagacagcgacgatgatagtggctccggaagcctggttggcattgacaacaaaatcgagcaagccatggacttggtgaagtcccacctcatgtttgcggtccgggaggaggtggaggtgctgaaggagcagatccgggaactggcggagcggaacgctgcgctggagcaggagaatgggctgctgcgcgccctggccagcccggagcagctggctcagctgccctcctcgggggtcccacggcttgggccccctgcgcccaatgggccctccgtctgagcctcccttcccttacaatgtgcctttggggctgcccggccttgcgtcagccgcctgccccctcttcctatgcagctttaatgtccccgtgtccccggggtgggagttcaaggctcagtaatggcctggtcccccggcccctgccccatctcctcatcatccccagccttgatggaggagggagggcttcaggacggggcgtcagagggagccccctctgggagggaaccaacccccaccctccctcctgggaccccccagcagtagacggcttgggggagtcggaggctccccggcagacaccccacccccatcttgttcccttgaggtgcctcctctcctctgcccaggggagggagtgtggacagtatctggaagttctgggattcaggttgttattaaaataataataataattaaaaactctgaagaaacttgaa

SEQ ID NO: 342679 - DNA, 1557 bp, Homo sapiens
agcgggtctcctctctgcctgcctggcaccagccagaccctgctctgcccggggggctctgagccccccaggcattcccttcactgcatccctctccattgggggggtgtctaaggaccctttccccttgggcatggcccagccaggggtctctgtcaagtccctggtgtcgtcttatgagacccgagtggtggggatggctccggggctgccccgaaaaaggggctgtgcctcttccccttgctctccccggggtgcatcccccatccgagggacatctgggcccccgccccaccggggcctgggaggccctgggcagcggccttcaacccgcagggggatggacaaaaccctcctctccctcattctctactgtcacaggtacaggggggtgtgggcgggaggctgtggtccaagaaaccagcacctgggaaggcttctcctctcctcccctcaccttcctgtgtctctccagtggctccggaagcctggttggcattgacaacaaaatcgagcaagccatggtaagagaagccatcttggtcccaggaggtcctggcccccttaagccatccctctgccccagccctgtcctcttccttaccagggaacaccaactcccagctcctccgtccctctccctgctgggctgctgggcatcctctgccccctcctgccaccacctccacccttgactttgcccagcctctagtctggctactggtccccatctctgtctttgagccctgactctgcctctgtccctcgtccttttcccctgtcccttccctgctttgtccctcatcctctggacactggggactgtctcccaccccagccctcaaggcactgggcaggggatgaggcacccaccccgttgacgctgtgcctgtcccggggcccccaggacttggtgaagtcccacctcatgtttgcggtccgggaggaggtggaggtgctgaaggagcagatccgggaactggcggagcggaacgctgcgctggagcaggagaatgggctgctgcgcgccctggccagcccggagcagctggctcagctgccctcctcgggggtcccacggcttgggccccctgcgcccaatgggccctccgtctgagcctcccttcccttacaatgtgcctttggggctgcccggccttgcgtcagccgcctgccccctcttcctatgcagctttaatgtccccgtgtccccggggtgggagttcaaggctcagtaatggcctggtcccccggcccctgccccatctcctcatcatccccagccttgatggaggagggagggcttcaggacggggcgtcagagggagccccctctgggagggaaccaacccccaccctccctcctgggaccccccagcagtagacggcttgggggagtcggaggctccccggcagacaccccacccccatcttgttcccttgaggtgcctcctctcctctgcccaggggagggagtgtggacagtatctggaagttctgggattcaggttgttattaaaataataataataattaaaaactctgaagaaacttgaa

SEQ ID NO: 342680 - DNA, 2237 bp, Homo sapiens
agcctaagcagtggctgcagcaactgcaacagcagcggctgtggcaggcctggccccgggccagctggcgggaagccccaggagggagggagggaggaggaaggggaggaagaggggaaggaggaggaggaggaggagaggagcagtcagcaggcccgaggaggcaggacttcctggtgtgggggttgtcaacagcccagaaagagaaagacggagaggcagagacccaggggagccgaggagcggagacacggacccagcagggtcacgcgggaggagactcgggacacccactcgctggctgccaccgggagcagaggggggctcggccgccccctcccacatcagtctccagacccttggggcttcagaggccgctcctaggctcctcggaggaggcgcgggtttcttcttttccggagagcaaactttcctcggagatgcctggcaggatgagccgcggcccccggagaggacgggacagcctctgatcgccgcctgcgtgccccgccactgcccatggccaggaggccccagggaacggacagcccgacctcttaggcgccgggaccctcaggctcagatcagtggccgaggccccagagtttgcaaactcagctctggagttcagcagcaacagcagcaggaaaaacctgcccctgctcccccctcccgccacctcccctctcctcttctcccctcacccagcaggcacccccggttcccgccaggccctcctgccatgtcggacccagacgtccccaggggctcggatgtccccgccatgtggcccccttgttccaggggtgcctgagccccttcaaggagccccaacccacccccaaccttggcccagccctgagccccagggaccatgagcgggggcaagaagaagagtagtttccaaatcaccagcgtcaccacggactatgagggccctgggagcccaggggcttcggatccccctaccccacagcccccaaccgggcccccgccccgcctgcccaatggggagcccagccccgatccggggggcaagggcaccccccggaatggctccccaccacctggggccccttcctcccgtttccgggtggtgaagctgccccacggcctgggagagccttatcgccgcggtcgctggacgtgtgtggatgtttatgagcgagacctggagccccacagcttcggcggactcctggagggaattcgaggggcctcagggggcgccgggggcagatctttggattccaggttggagctggccagcctcggcctgggcgcccccaccccaccgtcaggcctgtctcagggccccacctcctggctccgtccaccccccacctctcctggacctcaggcccgctccttcactgggggactgggccagctggtggtgcccagcaaagccaaggcagagaaacccccactgtcggcctcctcaccccagcagcgccccccagagcctgagaccggtgagagtgcgggcacatcccgggctgccacgcccctgccctctctgagggtggaagcggaggctgggggctcaggggccaggacccctccactgtcccggaggaaagctgtagacatgcggctgcggatggagttgggtgctccagaagagatggggcaggtgcccccacttgactctcgccccagctccccagccctctacttcacccacgatgccagcctggttcacaaatctccagaccccttcggagcagtagcagctcagaagttcagcctggcccactccatgttggccatcagtggtcacctagacagcgacgatgatagtggctccggaagcctggttggcattgacaacaaaatcgagcaagccatggacttggtgaagtcccacctcatgtttgcggtccgggaggaggtggaggtgctgaaggagcagatccgggaactggcggagcggaacgctgcgctggagcaggagaatgggctgctgcgcgccctggccagcccggagcagctggctcagctgccctcctcgggggtcccacggcttgggccccctgcgcccaatgggccctccgtctgagcctcccttcccttacaatgtgcctttggggctgcccggccttgcgtcagccgctggccttttctatggcagttatgtccgggtccgggggggagtcaggacagaatggctggtcccggcctgacaattctatatccagcttgtgggagggggcagagagggaaaggaccctggg

SEQ ID NO: 342681 - DNA, 1836 bp, Homo sapiens
agcctaagcagtggctgcagcaactgcaacagcagcggctgtggcaggcctggccccgggccagctggcgggaagccccaggagggagggagggaggaggaaggggaggaagaggggaaggaggaggaggaggaggagaggagcagtcagcaggcccgaggaggcaggacttcctggtgtgggggttgtcaacagcccagaaagagaaagacggagaggcagagacccaggggagccgaggagcggagacacggacccagcagggtcacgcgggaggagactcgggacacccactcgctggctgccaccgggagcagaggggggctcggccgccccctcccacatcagtctccagacccttggggcttcagaggccgctcctaggctcctcggaggaggcgcgggtttcttcttttccggagagcaaactttcctcggagatgcctggcaggatgagccgcggcccccggagaggacgggacagcctctgatcgccgcctgcgtgccccgccactgcccatggccaggaggccccagggaacggacagcccgacctcttaggcgccgggaccctcaggctcagatcagtggccgaggccccagagtttgcaaactcagctctggagttcagcagcaacagcagcaggaaaaacctgcccctgctcccccctcccgccacctcccctctcctcttctcccctcacccagcaggcacccccggttcccgccaggccctcctgccatgtcggacccagacgtccccaggggctcggatgtccccgccatgtggcccccttgttccaggggtgcctgagccccttcaaggagccccaacccacccccaaccttggcccagccctgagccccagggaccatgagcgggggcaagaagaagagtagtttccaaatcaccagcgtcaccacggactatgagggccctgggagcccaggggcttcggatccccctaccccacagcccccaaccgggcccccgccccgcctgcccaatggggagcccagccccgatccggggggcaagggcaccccccggaatggctccccaccacctggggccccttcctcccgtttccgggtggtgaagctgccccacggcctgggagagccttatcgccgcggtcgctggacgtgtgtggatgtttatgagcgagacctggagccccacagcttcggcggactcctggagggaattcgaggggcctcagggggcgccgggggcagatctttggattccaggttggagctggccagcctcggcctgggcgcccccaccccaccgtcaggcctgtctcagggccccacctcctggctccgtccaccccccacctctcctggacctcaggcccgctccttcactgggggactgggccagctggtggtgcccagcaaagccaaggcagagaaacccccactgtcggcctcctcaccccagcagcgccccccagagcctgagaccggtgagagtgcgggcacatcccgggctgccacgcccctgccctctctgagggtggaagcggaggctgggggctcaggggccaggacccctccactgtcccggaggaaagctgtagacatgcggctgcggatggagttgggtgctccagaagagatggggcaggtgcccccacttgactctcgccccagctccccagccctctacttcacccacgatgccagcctggttcacaaatctccagaccccttcggagcagtagcagctcagaagttcagcctggcccactccatgttggccatcagtggtcacctagacagcgacgatgatagtggctaccgttagtctaaactggggggatcctc

SEQ ID NO: 342682 - DNA, 806 bp, Homo sapiens
aatctatctattttcctacatctcatatcttttattttcttagttgagtgtacttaaacccacattgaccagagactttgcagccagctcacccctccaaatccccgccctggagtccctgacccaggaatttctgcatcaggctgctcaaacctgaatttgacaaaatttcaaagcgctgtatctttatgttgataagacaacggataaagtgccatacttggaacctagatcactcaatgttgcctgtagctgagtccacttctgtcactcaccctgcattgccctgccaggagcaagggagagaaagccagccagaaggcatgggcatgggctcaaatcggcttctcctgtggccactgtgaaagttgatcatacaaaggtcactgttgtcatagccaagcagagttatgagaccacaggaaaaagcacttggaccacgtaacattgctccaagagtataactgtctccaaccctggctgctggaacaagtgttgcaacctgaaaccggtttgatctaatagctacagaaacaacctgcggaaatctaagactagtttcacccactcaccaatcagagcttgccggatccccaaaacgttgctagtgctaatgaacttgctttcctaacaatccataacatttctcatttttatgaaacctacaaccttctctttgctctttggacatactgaagaccacccagtctgtgtgtatgccccaaactgaaattcttgctccccaaataaaacaagatgcggccaatgtcagtaccgacaaaaattaagaaataaaagacagacaa

SEQ ID NO: 342683 - DNA, 275 bp, Homo sapiens
atggaaaccaaatttttattgtatgctgtttcttaatgaagtgataactatagatacattaacatatatcattggcaaatctcaaaaatcgattattttacacattgttggtattgcactattagtagtaaataataccctttaagaaatagttaaaagtttcagaaaataggtgtatatttcaaaattacttatttgaaataattgcttacggataattgtggatagcccgcgggtacccgaggctcgaaattcgtaagtccactgggtcctag

SEQ ID NO: 342684 - DNA, 351 bp, Homo sapiens
aggagcactactgatgtagtgataaagtgtcaaggggatttcttctatattcctgtgtttaggtgtcagtattttagcaagctggagttatgcatacccctttctccttatcaaagactagagggaactggactgggtatttgccttcttccaggttggttaatccttgataaaatcccagcaagttaggctctggtgaaataatttcctttgagtgcaggacttgttaaggagaacacagagctcggaatttacttcaaaaatggttattttctcttgagaaaaagtacagatcacttttcccctagatttatgatgaagacccattagagtttctagggataaaactga

SEQ ID NO: 342685 - DNA, 388 bp, Homo sapiens
cctcccagaatcctgtagaggttaaacaaggtaatgtatttaaggtgcctagtacactgcctagcatatacaaatgcatactagacagccaaaatgaaaaaggaactaggcttgtttacactaagactggtgcatttaacacagggataatgtcttagcccacaaaaattcacttttttgacaggatataaagacataatctctagttatggaatgagaaacagtacacagttggtggaaagaggccaagtttgaaatgggcctgtccgagcacttttataatcatataattcataggtacatgcctgtgttgcttaatgcagaactacagacctttaacaacttctttttgctacgtaagacttggctgtgtcctaggatgaaggag

SEQ ID NO: 342686 - DNA, 318 bp, Homo sapiens
tttgctatttgtacaacaccatgaaacatgttcctacttcagggccttgcatttgcactttcttctactgaaatagtcttcctctagatagtgctcatgctctcacttccttcaggtagctgctcaaatactgcctttttattgaggcctttgctgaccaacccatataaaataatagtcttccttccctgccctctctgccctaccttccccaccctgccagactgacaacccctattcctcttatcctgctctctttttctccactgaactgttcactatctgacataataggtatatagttgtttactgtctccc

SEQ ID NO: 342687 - DNA, 586 bp, Homo sapiens
agaacagcacacaggccaatggctagaatgaaagtgacagtggtgggaaaacagagaacggggccagagtaagttaaaccatggttaggcatttctgctcccagatgtgttgggaagccatcagagagtttagagcagaaaaatgactgggtatgacttatgttctaaaaggtacatttcagcgattgggtagaaaatggattgtatggagaaataggctgactggtcaggtgaacagggcaatctgggaaagagatgaaaagtggcttggtatagtagggtgatagctatgaaggtggtaagaatgtgagcaacagtgagttttcggttatactggattcaaatctacattttagttaccttgagcaagtttcgttttttgttgttgttgttgttgctgtttttgagatggagtcttgctctgtcgcccaggccggagtgcagtggcgccatctcggcttactgcaacctccacctcccagattcaagcaattctcctgtgttggcttcctgagtagctgggactaccgtacattgagatgggggaagggatggacactcacatgggcactccataccggggatc

SEQ ID NO: 342688 - DNA, 428 bp, Homo sapiens
tttttgcacttggtaagatttcttcttgcatgtctgcacactgcagacttctccagcacaaaacaaagaattacaacatcctccttaccggctgccactgattacttgattaaatcgtcacctctaatttaccctgagcacctgcaaagttcttctccatgcaccagatagtcttcagggtcggaattacatattctctgcagccttctcaagagcttcactccaacatcagtgtctccacccctccctctcatcctcaggactggattttttttttttttttccttcaaaccattgaccatttaacaaaagctttctgttatttttaattggctagccctacttcaagcgacagccgttgttaatgggtcaagggtttgaaggaattcagtctctaacagccagatactacatcccggctccgggcc

SEQ ID NO: 342689 - DNA, 317 bp, Homo sapiens
tttttgcacttggtaagatttcttcttgcatgtctgcacactgcagacttctccagcacaaaacaaagaattacaacatcctccttaccggctgccactgattacttgattaaatcgtcacctctaatttaccctgagcacctgcaaagttcttctccatgcaccagatagtcttcagggtcggaattacatattctctgcagccttctcaagagcttcactccaacatcagtgtctccacccctccctctcatcctcaggactggatttttttttttttttaagacagagtctcgctctgtcgcccaggctggagt

SEQ ID NO: 342690 - DNA, 1271 bp, Homo sapiens
agttgtagcagatatccattctttttgcatggggccagagacccagaaaggctatcagagatttcagcttcctctgtatcaaggtgctttgggaagcaaagctgcccgtgtaggtgaaagcagtagaaatttggaagaaaactcattgttctagaactgtcatagaaatatctcagatatgaaagacttaaacaaaaaggatattgagggacggctttctgcaaagatgtggcctaagatatgtgcatatctgtactaggagttgctgttgtgcatcttgtttaactctcttagaagggacttcagcctatatgtggttgttattaattacattctcaggaacagaatattaattttctgttacagaaaacagtaaatcagaagaccacaatctacgaaattcaggatgatagaggaaaaatggatgtagtggggacaggacaatgtcacaatatcccctgtgaagaaggagataagctccaacttttctgctttcgacttagaaaaaagaaccagatgtcaaaactgatttcagaaatgcatagttttatccagtaagaattaaataggcaaatattagttttccaaagtggaaatgatttgctttaagttttggcaaaaacaagtttgtaggtttttttacagagttcagcgggaggcatgagaaaacagatattctccttgtattcacatttactttttttaattttttttttctggatggaatgatgtgataggatacaattttaaaaagaaagaaatctgaactttatcaaaaaaattgaactctgaattttatgtaaacttttaagtgattgtagggttgggatttaaaattacatgttctccatttgtgaattagaaaacgtcgtgtgtgtgtgtgtgtgtgtgtgatactttctagtttgtaacattacaatacacatatgtgtgtatttagtccataaaaatacctaatttgaaacttaaaattatttgcagtgatcaaaattatgtcccactgacaaagttttatacagaggaagctctccaatttgttaatttgaattcaaatattcacgtgttaagtttccttacagtacatgattttacgctgttgccattttgaatgttgtaaattattttttatttcagtaggtttttgggaaacaggtggtgcttcgttataggaataagttctttagtggtgatttctgactttttgatgcacccatcgtccaagcagcgtacactgtacccagtgtgtatgtagcattttatccctcaccccc

SEQ ID NO: 342691 - DNA, 4166 bp, Homo sapiens
  misc_feature (3081)..(3081): n is a, c, g, or t
  misc_feature (3145)..(3145): n is a, c, g, or t
  misc_feature (3152)..(3152): n is a, c, g, or t
  misc_feature (3174)..(3174): n is a, c, g, or t
  misc_feature (3200)..(3200): n is a, c, g, or t
acattgtttcctactccattttctctggggcaatagcagaataggagcaagccagcactagtcagctaactaagtgactcaaccaaggccttttttccttgttatctttgcagatacttcattttcttagcgtttctggagattacaacatcctgcggttccgtttctgggaactttactgatttatctcccccctcacacaaataagcattgattcctgcatttctgaagatctcaagatctggactactgttgaaaaaatttccagtgaggctcacttatgtctgtaaagatgggaaaaaaatacaagaacattgttctactaaaaggattagaggtcatcaatgattatcattttagaatggttaagtccttactgagcaacgatttaaaacttaatttaaaaatgagagaagagtatgacaaaattcagattgctgacttgatggaagaaaagttccgaggtgatgctggtttgggcaaactaataaaaattttcgaagatataccaacgcttgaagacctggctgaaactcttaaaaaagaaaagttaaaagtaaaaggaccagccctatcaagaaagaggaagaaggaagtggatgctacttcacctgcaccctccacaagcagcactgtcaaaactgaaggagcagaggcaactcctggagctcagaaaagaaaaaaatcaaccaaagaaaaggctggacccaaagggagtaaggtgtccgaggaacagactcagcctccctctcctgcaggagccggcatgtccacagccatgggccgttccccatctcccaagacctcattgtcagctccacccaacacttcttcaactgagaacccgaaaacagtggccaaatgtcaggtaactcccagaagaaatgttctccaaaaacgcccagtgatagtgaaggtactgagtacaacaaagccatttgaatatgagaccccagaaatggagaaaaaaataatgtttcatgctacagtggctacacagacacagttcttccatgtgaaggttttaaacaccagcttgaaggagaaattcaatggaaagaaaatcatcatcatatcagattatttggaatatgatagtctcctagaggtcaatgaagaatctactgtatctgaagctggtcctaaccaaacgtttgaggttccaaataaaatcatcaacagagcaaaggaaactctgaagattgatattcttcacaaacaagcttcaggaaatattgtatatggggtatttatgctacataagaaaacagtaaatcagaagaccacaatctacgaaattcaggatgatagaggaaaaatggatgtagtggggacaggacaatgtcacaatatcccctgtgaagaaggagataagctccaacttttctgctttcgacttagaaaaaagaaccagatgtcaaaactgatttcagaaatgcatagttttatccagataaagaaaaaaacaaacccgagaaacaatgaccccaagagcatgaagctaccccaggaacagagtcagcttccaaatccttcagaggccagcacaaccttccctgagagccatcttcggactcctcagatgccaccaacaactccatccagcagtttcttcaccaagaaaagtgaagacacaatctccaaaatgaatgacttcatgaggatgcagatactgaaggaagggagtcattttccaggaccgttcatgaccagcataggcccagctgagagccatccccacactcctcagatgcctccatcaacaccaagcagcagtttcttaaccacgttgaaaccaagactgaagactgaacctgaagaagtttccatagaagacagtgcccagagtgacctcaaagaagtgatggtgctgaacgcaacagaatcatttgtatatgagcccaaagagcagaagaaaatgtttcatgccacagtggcaactgagaatgaagtcttccgagtgaaggtttttaatattgacctaaaggagaagttcaccccaaagaagatcattgccatagcaaattatgtttgccgcaatgggttcctggaggtatatcctttcacacttgtggctgatgtgaatgctgaccgaaacatggagatcccaaaaggattgattagaagtgccagcgtaactcctaaaatcaatcagctttgctcacaaactaaaggaagttttgtgaatggggtgtttgaggtacataaggtaagcccacaccattgttttataaaatttctcctgcaacctccaatttttaaagtcttaacttgtcaactggagtttggtcaacttactcaacacagaaaatcaaccccttcacccttcccccagcactagagataattgaatagagttcatttcaggatatggggtacgttatattgtaacattcctcttcttaaggtatcatcatgcaagttatttagacagtcactaggaaacttggcattttattagttttgatgatctattcagagccacccttgtccaggacagtgcagagtttatatcaacacacatatccttaggattttgtttctttgagttcttctccatctgtatcaatgacaacttaatttaattgtgaataaaagagttgctctcccaagcctgaatcctgattgtgacaaccagagtaagaaataaaatagactactctgctttagaatgcagctatgtctaacagttagctagaattctgatcatttggactccaaagtttcttgcctcttctcattcattaattcatcaggagactgtagagcaactaacttctgcattaaataataagagaaatacgaagcaaaaagactaaaaaagtcacgtagcttaactgctcaatttataaatggggcaataaaatgcaaaaaaaagaaaaaaagcttggtgaattcttaggcttacagtgtgcctttcagtctctacacatcatgtaaatattatgcttagctgatttaacttcttgtttgaagtactgtttcatactccattatacatgtcttctagggtggcttacttttaattgtgctgttttctctacactcagtttaaatgactgtacatatatatgtggttgnagagttaatgaataatgagctacaaaccagaacaatgtgactagatagataggatgatctaganttgaganctggcagattgggaaagagtgnctatatggagaagaaagaagtagttncatattgaaataacagtctacttaatgaggacgtgcaacattctttctcaaacttacaaagtgccataaaaagcctctattctctgctcttgggcaggtgtgaaagaaacctaccaaattaatcagatttttctgtatccaggctccttaaaaaatcccagctgtgctgatgtggaaacaggaagaattaggaaagtaatcaattttttttcctagaaaaaatccagcagacaaagaacttcaacaaaagaggctcaagggaggagttgaaaggcaggattcaaagaccaagtatcttaagctatttggtacctgttattcaggacctacagctctgtttactctatcaaagacaaaagtttccagaaacaccctgtatttctcatagatttgaaaattattgatccagtttcagaagataagtgttaattttcttttgcagaaaaatgtaaggggtgaattcacttattatgaaatacaagataatacagggaagatggaagtggtggtgcatggacgactgaccacaatcaactgtgaggaaggagataaactgaaactcacctgctttgaattggcaccgaaaagtgggaataccggggagttgagatctgtaattcatagtcacatcaaggtcatcaagaccaggaaaaacaagaaagacatactcaatcctgattcaagtatggaaacttcaccagactttttcttctaaaatctggatgtcattgacgataatgtttatggagataaggtctaagtgcctaaaaaaatgtacatatacctggttgaaatacaacactatacatacacaccaccatatatactagctgttaatcctatggaatggggtattgggagtgcttttttaatttttcatagtttttttttaataaaatggcatattttgcatctacaacttctataatttgaaaaaataaataaacattatcttttttgtgaaaa

SEQ ID NO: 342692 - DNA, 899 bp, Homo sapiens
gggcaaagcagagtatgaggaagccagcactagtcaagtgactctaagaagggccattttcccttgttgtctttgaaaatacttcattttcttagcatttcaggagattataacatcctgtatttcagtttctgagagctttactgactgatttccctattcaaaacaatcctcatttcctacatttctgaagatctcaagatctggactactgttgaagaaattcccagtaaggctcacttatatctttagagatggcaaataactacaagaaaattgttctactgaaaggattagaggtcatcaatgattatcattttagaattgttaagtccttactgagtaacgatttaaaacttaatccaaaaatgaaagaagagtatgacaaaattcagattgctgacttgatggaggaaaagttcccaggtgatgccggtttgggcaaactaatagaattcttcaaagaaataccaacactgggagaccttgctgaaactcttaaaagagaaaagttaaaagttgcaaataaaattgaatccattccagtcaaaggaataatcccatctaaaaagacgaaacagaaagaagtgtatcctgctacacctgcatgcaccccaagcaaccgtctcacagctaaaggagcagaggagactcttggacctcagaaaagaaaaaaaccatctgaagaagagactggaaccaaaaggagtaagatgtccaaagagcagactcggccttcctgctctgcaggagccagcacgtccacagccatgggccgttccccacctccccagacctcatcatcagctccacccaacacttcctcaactgagagcctaaaaccattggccaaccgtcacgcaactgccagtaaaaatattttccgagaagacccaata

SEQ ID NO: 342693 - DNA, 872 bp, Homo sapiens
gggcaaagcagagtatgaggaagccagcactagtcaagtgactctaagaagggccattttcccttgttgtctttgaaaatacttcattttcttagcatttcaggagattataacatcctgtatttcagtttctgagagctttactgactgatttccctattcaaaacaatcctcatttcctacatttctgaagatctcaagatctggactactgttgaagaaattcccagtaaggctcacttatatctttagagatggcaaataactacaagaaaattgttctactgaaaggattagaggtcatcaatgattatcattttagaattgttaagtccttactgagtaacgatttaaaacttaatccaaaaatgaaagaagagtatgacaaaattcagattgctgacttgatggaggaaaagttcccaggtgatgccggtttgggcaaactaatagaattcttcaaagaaataccaacactgggagaccttgctgaaactcttaaaagagaaaagttaaaagtcaaaggaataatcccatctaaaaagacgaaacagaaagaagtgtatcctgctacacctgcatgcaccccaagcaaccgtctcacagctaaaggagcagaggagactcttggacctcagaaaagaaaaaaaccatctgaagaagagactggaaccaaaaggagtaagatgtccaaagagcagactcggccttcctgctctgcaggagccagcacgtccacagccatgggccgttccccacctccccagacctcatcatcagctccacccaacacttcctcaactgagagcctaaaaccattggccaaccgtcacgcaactgccagtaaaaatattttccgagaagacccaata

SEQ ID NO: 342694 - DNA, 2670 bp, Homo sapiens
acattgtttcctactccattttctctggggcaatagcagaataggagcaagccagcactagtcagctaactaagtgactcaaccaaggccttttttccttgttatctttgcagatacttcattttcttagcgtttctggagattacaacatcctgcggttccgtttctgggaactttactgatttatctcccccctcacacaaataagcattgattcctgcatttctgaagatctcaagatctggactactgttgaaaaaatttccagtgaggctcacttatgtctgtaaagatgggaaaaaaatacaagaacattgttctactaaaaggattagaggtcatcaatgattatcattttagaatggttaagtccttactgagcaacgatttaaaacttaatttaaaaatgagagaagagtatgacaaaattcagattgctgacttgatggaagaaaagttccgaggtgatgctggtttgggcaaactaataaaaattttcgaagatataccaacgcttgaagacctggctgaaactcttaaaaaagaaaagttaaaagtaaaaggaccagccctatcaagaaagaggaagaaggaagtggatgctacttcacctgcaccctccacaagcagcactgtcaaaactgaaggagcagaggcaactcctggagctcagaaaagaaaaaaatcaaccaaagaaaaggctggacccaaagggagtaaggtgtccgaggaacagactcagcctccctctcctgcaggagccggcatgtccacagccatgggccgttccccatctcccaagacctcattgtcagctccacccaacacttcttcaactgagaacccgaaaacagtggccaaatgtcaggtaactcccagaagaaatgttctccaaaaacgcccagtgatagtgaaggtactgagtacaacaaagccatttgaatatgagaccccagaaatggagaaaaaaataatgtttcatgctacagtggctacacagacacagttcttccatgtgaaggttttaaacaccagcttgaaggagaaattcaatggaaagaaaatcatcatcatatcagattatttggaatatgatagtctcctagaggtcaatgaagaatctactgtatctgaagctggtcctaaccaaacgtttgaggttccaaataaaatcatcaacagagcaaaggaaactctgaagattgatattcttcacaaacaagcttcaggaaatattgtatatggggtatttatgctacataagaaaacagtaaatcagaagaccacaatctacgaaattcaggatgatagaggaaaaatggatgtagtggggacaggacaatgtcacaatatcccctgtgaagaaggagataagctccaacttttctgctttcgacttagaaaaaagaaccagatgtcaaaactgatttcagaaatgcatagttttatccagagtcagcttccaaatccttcagaggccagcacaaccttccctgagagccatcttcggactcctcagatgccaccaacaactccatccagcagtttcttcaccaagaaaagtgaagacacaatctccaaaatgaatgacttcatgaggatgcagatactgaaggaagggagtcattttccaggaccgttcatgaccagcataggcccagctgagagccatccccacactcctcagatgcctccatcaacaccaagcagcagtttcttaaccacgttgaaaccaagactgaagactgaacctgaagaagtttccatagaagacagtgcccagagtgacctcaaagaagtgatggtgctgaacgcaacagaatcatttgtatatgagcccaaagagcagaagaaaatgtttcatgccacagtggcaactgagaatgaagtcttccgagtgaaggtttttaatattgacctaaaggagaagttcaccccaaagaagatcattgccatagcaaattatgtttgccgcaatgggttcctggaggtatatcctttcacacttgtggctgatgtgaatgctgaccgaaacatggagatcccaaaaggattgattagaagtgccagcgtaactcctaaaatcaatcagctttgctcacaaactaaaggaagttttgtgaatggggtgtttgaggtacataagaaaaatgtaaggggtgaattcacttattatgaaatacaagataatacagggaagatggaagtggtggtgcatggacgactgaccacaatcaactgtgaggaaggagataaactgaaactcacctgctttgaattggcaccgaaaagtgggaataccggggagttgagatctgtaattcatagtcacatcaaggtcatcaagaccaggaaaaacaagaaagacatactcaatcctgattcaagtatggaaacttcaccagactttttcttctaaaatctggatgtcattgacgataatgtttatggagataaggtctaagtgcctaaaaaaatgtacatatacctggttgaaatacaacactatacatacacaccaccatatatactagctgttaatcctatggaatggggtattgggagtgcttttttaatttttcatagtttttttttaataaaatggcatattttgcatctacaacttctataatttgaaaaaataaataaacattatcttttttgtgaaaa

SEQ ID NO: 342695 - DNA, 2710 bp, Homo sapiens
cgatgctgtcatgttgagagtccactatccacgtttgtttatccaggaataatgcagaaaatctgagcattcgtgaatctaatcattgagatacttcattttcttagcgtttctggagattacaacatcctgcggttccgtttctgggaactttactgatttatctcccccctcacacaaataagcattgattcctgcatttctgaagatctcaagatctggactactgttgaaaaaatttccagtgaggctcacttatgtctgtaaagatgggaaaaaaatacaagaacattgttctactaaaaggattagaggtcatcaatgattatcattttagaatggttaagtccttactgagcaacgatttaaaacttaatttaaaaatgagagaagagtatgacaaaattcagattgctgacttgatggaagaaaagttccgaggtgatgctggtttgggcaaactaataaaaattttcgaagatataccaacgcttgaagacctggctgaaactcttaaaaaagaaaagttaaaagtaaaaggaccagccctatcaagaaagaggaagaaggaagtggatgctacttcacctgcaccctccacaagcagcactgtcaaaactgaaggagcagaggcaactcctggagctcagaaaagaaaaaaatcaaccaaagaaaaggctggacccaaagggagtaaggtgtccgaggaacagactcagcctccctctcctgcaggagccggcatgtccacagccatgggccgttccccatctcccaagacctcattgtcagctccacccaacacttcttcaactgagaacccgaaaacagtggccaaatgtcaggtaactcccagaagaaatgttctccaaaaacgcccagtgatagtgaaggtactgagtacaacaaagccatttgaatatgagaccccagaaatggagaaaaaaataatgtttcatgctacagtggctacacagacacagttcttccatgtgaaggttttaaacaccagcttgaaggagaaattcaatggaaagaaaatcatcatcatatcagattatttggaatatgatagtctcctagaggtcaatgaagaatctactgtatctgaagctggtcctaaccaaacgtttgaggttccaaataaaatcatcaacagagcaaaggaaactctgaagattgatattcttcacaaacaagcttcaggaaatattgtatatggggtatttatgctacataagaaaacagtaaatcagaagaccacaatctacgaaattcaggatgatagaggaaaaatggatgtagtggggacaggacaatgtcacaatatcccctgtgaagaaggagataagctccaacttttctgctttcgacttagaaaaaagaaccagatgtcaaaactgatttcagaaatgcatagttttatccagataaagaaaaaaacaaacccgagaaacaatgaccccaagagcatgaagctaccccaggaacagagtcagcttccaaatccttcagaggccagcacaaccttccctgagagccatcttcggactcctcagatgccaccaacaactccatccagcagtttcttcaccaagaaaagtgaagacacaatctccaaaatgaatgacttcatgaggatgcagatactgaaggaagggagtcattttccaggaccgttcatgaccagcataggcccagctgagagccatccccacactcctcagatgcctccatcaacaccaagcagcagtttcttaaccacgttgaaaccaagactgaagactgaacctgaagaagtttccatagaagacagtgcccagagtgacctcaaagaagtgatggtgctgaacgcaacagaatcatttgtatatgagcccaaagagcagaagaaaatgtttcatgccacagtggcaactgagaatgaagtcttccgagtgaaggtttttaatattgacctaaaggagaagttcaccccaaagaagatcattgccatagcaaattatgtttgccgcaatgggttcctggaggtatatcctttcacacttgtggctgatgtgaatgctgaccgaaacatggagatcccaaaaggattgattagaagtgccagcgtaactcctaaaatcaatcagctttgctcacaaactaaaggaagttttgtgaatggggtgtttgaggtacataagaaaaatgtaaggggtgaattcacttattatgaaatacaagataatacagggaagatggaagtggtggtgcatggacgactgaccacaatcaactgtgaggaaggagataaactgaaactcacctgctttgaattggcaccgaaaagtgggaataccggggagttgagatctgtaattcatagtcacatcaaggtcatcaagaccaggaaaaacaagaaagacatactcaatcctgattcaagtatggaaacttcaccagactttttcttctaaaatctggatgtcattgacgataatgtttatggagataaggtctaagtgcctaaaaaaatgtacatatacctggttgaaatacaacactatacatacacaccaccatatatactagctgttaatcctatggaatggggtattgggagtgcttttttaatttttcatagtttttttttaataaaatggcatattttgcatctacaacttctataatttgaaaaaataaataaacattatcttttttgtgaaaa

SEQ ID NO: 342696 - DNA, 2887 bp, Homo sapiens
gacacccactgcccttaacagaaaaaatactgctgagcaaagggtttaacaggactctcggtctaccagaagttcagtgcattttccaggattttcaaggcttcgatgctgtcatgttgtgagcccactatccacttgtgtttttccatgaataatgaaggaaacctgaggaatcatgaatgtaatcattgagtttctgagagctttactgactgatttccctattcaaaacaatcctcatttcctacatttctgaagatctcaagatctggactactgttgaagaaattcccagtaaggctcacttatatctttagagatggcaaataactacaagaaaattgttctactgaaaggattagaggtcatcaatgattatcattttagaattgttaagtccttactgatgaaaaaatttccagtgaggctcacttatgtctgtaaagatgggaaaaaaatacaagaacattgttctactaaaaggattagaggtcatcaatgattatcattttagaatggttaagtccttactgagcaacgatttaaaacttaatttaaaaatgagagaagagtatgacaaaattcagattgctgacttgatggaagaaaagttccgaggtgatgctggtttgggcaaactaataaaaattttcgaagatataccaacgcttgaagacctggctgaaactcttaaaaaagaaaagttaaaagtaaaaggaccagccctatcaagaaagaggaagaaggaagtggatgctacttcacctgcaccctccacaagcagcactgtcaaaactgaaggagcagaggcaactcctggagctcagaaaagaaaaaaatcaaccaaagaaaaggctggacccaaagggagtaaggtgtccgaggaacagactcagcctccctctcctgcaggagccggcatgtccacagccatgggccgttccccatctcccaagacctcattgtcagctccacccaacacttcttcaactgagaacccgaaaacagtggccaaatgtcaggtaactcccagaagaaatgttctccaaaaacgcccagtgatagtgaaggtactgagtacaacaaagccatttgaatatgagaccccagaaatggagaaaaaaataatgtttcatgctacagtggctacacagacacagttcttccatgtgaaggttttaaacaccagcttgaaggagaaattcaatggaaagaaaatcatcatcatatcagattatttggaatatgatagtctcctagaggtcaatgaagaatctactgtatctgaagctggtcctaaccaaacgtttgaggttccaaataaaatcatcaacagagcaaaggaaactctgaagattgatattcttcacaaacaagcttcaggaaatattgtatatggggtatttatgctacataagaaaacagtaaatcagaagaccacaatctacgaaattcaggatgatagaggaaaaatggatgtagtggggacaggacaatgtcacaatatcccctgtgaagaaggagataagctccaacttttctgctttcgacttagaaaaaagaaccagatgtcaaaactgatttcagaaatgcatagttttatccagataaagaaaaaaacaaacccgagaaacaatgaccccaagagcatgaagctaccccaggaacagagtcagcttccaaatccttcagaggccagcacaaccttccctgagagccatcttcggactcctcagatgccaccaacaactccatccagcagtttcttcaccaagaaaagtgaagacacaatctccaaaatgaatgacttcatgaggatgcagatactgaaggaagggagtcattttccaggaccgttcatgaccagcataggcccagctgagagccatccccacactcctcagatgcctccatcaacaccaagcagcagtttcttaaccacgttgaaaccaagactgaagactgaacctgaagaagtttccatagaagacagtgcccagagtgacctcaaagaagtgatggtgctgaacgcaacagaatcatttgtatatgagcccaaagagcagaagaaaatgtttcatgccacagtggcaactgagaatgaagtcttccgagtgaaggtttttaatattgacctaaaggagaagttcaccccaaagaagatcattgccatagcaaattatgtttgccgcaatgggttcctggaggtatatcctttcacacttgtggctgatgtgaatgctgaccgaaacatggagatcccaaaaggattgattagaagtgccagcgtaactcctaaaatcaatcagctttgctcacaaactaaaggaagttttgtgaatggggtgtttgaggtacataagaaaaatgtaaggggtgaattcacttattatgaaatacaagataatacagggaagatggaagtggtggtgcatggacgactgaccacaatcaactgtgaggaaggagataaactgaaactcacctgctttgaattggcaccgaaaagtgggaataccggggagttgagatctgtaattcatagtcacatcaaggtcatcaagaccaggaaaaacaagaaagacatactcaatcctgattcaagtatggaaacttcaccagactttttcttctaaaatctggatgtcattgacgataatgtttatggagataaggtctaagtgcctaaaaaaatgtacatatacctggttgaaatacaacactatacatacacaccaccatatatactagctgttaatcctatggaatggggtattgggagtgcttttttaatttttcatagtttttttttaataaaatggcatattttgcatctacaacttctataatttgaaaaaataaataaacattatcttttttgtgaaaa

SEQ ID NO: 342697 - DNA, 2264 bp, Homo sapiens
tgtattgaaactgcttcagctgtcggagatcgtttatatgtcttccttttttctgcattggttgggaataaaattgaatctattccagtaaaaggaccagccctatcaagaaagaggaagaaggaagtggatgctacttcacctgcaccctccacaagcagcactgtcaaaactgaaggagcagaggcaactcctggagctcagaaaagaaaaaaatcaaccaaagaaaaggctggacccaaagggagtaaggtgtccgaggaacagactcagcctccctctcctgcaggagccggcatgtccacagccatgggccgttccccatctcccaagacctcattgtcagctccacccaacacttcttcaactgagaacccgaaaacagtggccaaatgtcaggtaactcccagaagaaatgttctccaaaaacgcccagtgatagtgaaggtactgagtacaacaaagccatttgaatatgagaccccagaaatggagaaaaaaataatgtttcatgctacagtggctacacagacacagttcttccatgtgaaggttttaaacaccagcttgaaggagaaattcaatggaaagaaaatcatcatcatatcagattatttggaatatgatagtctcctagaggtcaatgaagaatctactgtatctgaagctggtcctaaccaaacgtttgaggttccaaataaaatcatcaacagagcaaaggaaactctgaagattgatattcttcacaaacaagcttcaggaaatattgtatatggggtatttatgctacataagaaaacagtaaatcagaagaccacaatctacgaaattcaggatgatagaggaaaaatggatgtagtggggacaggacaatgtcacaatatcccctgtgaagaaggagataagctccaacttttctgctttcgacttagaaaaaagaaccagatgtcaaaactgatttcagaaatgcatagttttatccagataaagaaaaaaacaaacccgagaaacaatgaccccaagagcatgaagctaccccaggaacagagtcagcttccaaatccttcagaggccagcacaaccttccctgagagccatcttcggactcctcagatgccaccaacaactccatccagcagtttcttcaccaagaaaagtgaagacacaatctccaaaatgaatgacttcatgaggatgcagatactgaaggaagggagtcattttccaggaccgttcatgaccagcataggcccagctgagagccatccccacactcctcagatgcctccatcaacaccaagcagcagtttcttaaccacgttgaaaccaagactgaagactgaacctgaagaagtttccatagaagacagtgcccagagtgacctcaaagaagtgatggtgctgaacgcaacagaatcatttgtatatgagcccaaagagcagaagaaaatgtttcatgccacagtggcaactgagaatgaagtcttccgagtgaaggtttttaatattgacctaaaggagaagttcaccccaaagaagatcattgccatagcaaattatgtttgccgcaatgggttcctggaggtatatcctttcacacttgtggctgatgtgaatgctgaccgaaacatggagatcccaaaaggattgattagaagtgccagcgtaactcctaaaatcaatcagctttgctcacaaactaaaggaagttttgtgaatggggtgtttgaggtacataagaaaaatgtaaggggtgaattcacttattatgaaatacaagataatacagggaagatggaagtggtggtgcatggacgactgaccacaatcaactgtgaggaaggagataaactgaaactcacctgctttgaattggcaccgaaaagtgggaataccggggagttgagatctgtaattcatagtcacatcaaggtcatcaagaccaggaaaaacaagaaagacatactcaatcctgattcaagtatggaaacttcaccagactttttcttctaaaatctggatgtcattgacgataatgtttatggagataaggtctaagtgcctaaaaaaatgtacatatacctggttgaaatacaacactatacatacacaccaccatatatactagctgttaatcctatggaatggggtattgggagtgcttttttaatttttcatagtttttttttaataaaatggcatattttgcatctacaacttctataatttgaaaaaataaataaacattatcttttttgtgaaaa

SEQ ID NO: 342698 - DNA, 1714 bp, Homo sapiens
gcaagataaagacaaacactggaaagatttctagggagagaaaatgtcacatgcaaatgttaaaatgtgaaacagcatagtgagttctgtataaattggtatatgtagaaaggtataggaaaatgatgcaagacaggtaaaaagcagccctccaacaagctggcttttgtcataaagacagaaatggagtctccaatgtaaaaacatcagtaagtagatattgaaagattttaggaagaagagtacttgatcattccacattttagcaaaaaaaaaattctgacaattgcctggagggatacattagagagagaccatgtttggaagtaatgagacctattagaatctaataaaggatgatattctcacaaatgaaaagatgttgtgcttcctctaatattgaaaaccattaaacagaaaacgaatactttcagataaagaaaaaaacaaacccgagaaacaatgaccccaagagcatgaagctaccccaggaacagagtcagcttccaaatccttcagaggccagcacaaccttccctgagagccatcttcggactcctcagatgccaccaacaactccatccagcagtttcttcaccaagaaaagtgaagacacaatctccaaaatgaatgacttcatgaggatgcagatactgaaggaagggagtcattttccaggaccgttcatgaccagcataggcccagctgagagccatccccacactcctcagatgcctccatcaacaccaagcagcagtttcttaaccacgttgaaaccaagactgaagactgaacctgaagaagtttccatagaagacagtgcccagagtgacctcaaagaagtgatggtgctgaacgcaacagaatcatttgtatatgagcccaaagagcagaagaaaatgtttcatgccacagtggcaactgagaatgaagtcttccgagtgaaggtttttaatattgacctaaaggagaagttcaccccaaagaagatcattgccatagcaaattatgtttgccgcaatgggttcctggaggtatatcctttcacacttgtggctgatgtgaatgctgaccgaaacatggagatcccaaaaggattgattagaagtgccagcgtaactcctaaaatcaatcagctttgctcacaaactaaaggaagttttgtgaatggggtgtttgaggtacataagaaaaatgtaaggggtgaattcacttattatgaaatacaagataatacagggaagatggaagtggtggtgcatggacgactgaccacaatcaactgtgaggaaggagataaactgaaactcacctgctttgaattggcaccgaaaagtgggaataccggggagttgagatctgtaattcatagtcacatcaaggtcatcaagaccaggaaaaacaagaaagacatactcaatcctgattcaagtatggaaacttcaccagactttttcttctaaaatctggatgtcattgacgataatgtttatggagataaggtctaagtgcctaaaaaaatgtacatatacctggttgaaatacaacactatacatacacaccaccatatatactagctgttaatcctatggaatggggtattgggagtgcttttttaatttttcatagtttttttttaataaaatggcatattttgcatctacaacttctataatttgaaaaaataaataaacattatcttttttgtgaaaa

SEQ ID NO: 342699 - DNA, 2585 bp, Homo sapiens
acattgtttcctactccattttctctggggcaatagcagaataggagcaagccagcactagtcagctaactaagtgactcaaccaaggccttttttccttgttatctttgcagatacttcattttcttagcgtttctggagattacaacatcctgcggttccgtttctgggaactttactgatttatctcccccctcacacaaataagcattgattcctgcatttctgaagatctcaagatctggactactgttgaaaaaatttccagtgaggctcacttatgtctgtaaagatgggaaaaaaatacaagaacattgttctactaaaaggattagaggtcatcaatgattatcattttagaatggttaagtccttactgagcaacgatttaaaacttaatttaaaaatgagagaagagtatgacaaaattcagattgctgacttgatggaagaaaagttccgaggtgatgctggtttgggcaaactaataaaaattttcgaagatataccaacgcttgaagacctggctgaaactcttaaaaaagaaaagttaaaagtaaaaggaccagccctatcaagaaagaggaagaaggaagtggatgctacttcacctgcaccctccacaagcagcactgtcaaaactgaaggagcagaggcaactcctggagctcagaaaagaaaaaaatcaaccaaagaaaaggctggacccaaagggagtaaggtgtccgaggaacagactcagcctccctctcctgcaggagccggcatgtccacagccatgggccgttccccatctcccaagacctcattgtcagctccacccaacacttcttcaactgagaacccgaaaacagtggccaaatgtcaggtaactcccagaagaaatgttctccaaaaacgcccagtgatagtgaaggtactgagtacaacaaagccatttgaatatgagaccccagaaatggagaaaaaaataatgtttcatgctacagtggctacacagacacagttcttccatgtgaaggttttaaacaccagcttgaaggagaaattcaatggaaagaaaatcatcatcatatcagattatttggaatatgatagtctcctagaggtcaatgaagaatctactgtatctgaagctggtcctaaccaaacgtttgaggttccaaataaaatcatcaacagagcaaaggaaactctgaagattgatattcttcacaaacaagcttcaggaaatattgtatatggggtatttatgctacataagaaaacagtaaatcagaagaccacaatctacgaaattcaggatgatagaggaaaaatggatgtagtggggacaggacaatgtcacaatatcccctgtgaagaaggagataagctccaacttttctgctttcgacttagaaaaaagaaccagatgtcaaaactgatttcagaaatgcatagttttatccagataaagaaaaaaacaaacccgagaaacaatgaccccaagagcatgaagctaccccaggaacagagtcagcttccaaatccttcagaggccagcacaaccttccctgagagccatcttcggactcctcagatgccaccaacaactccatccagcagtttcttcaccaagaaaagtgaagacacaatctccaaaatgaatgacttcatgaggatgcagatactgaaggaagggagtcattttccaggaccgttcatgaccagcataggcccagctgagagccatccccacactcctcagatgcctccatcaacaccaagcagcagtttcttaaccacgttgaaaccaagactgaagactgaacctgaagaagtttccatagaagacagtgcccagagtgacctcaaagaagtgatggtgctgaacgcaacagaatcatttgtatatgagcccaaagagcagaagaaaatgtttcatgccacagtggcaactgagaatgaagtcttccgagtgaaggtttttaatattgacctaaaggagaagttcaccccaaagaagatcattgccatagcaaattatgtttgccgcaatgggttcctggaggtatatcctttcacacttgtggctgatgtgaatgctgaccgaaacatggagatcccaaaaggattgattagaagtgccagcgtaactcctaaaatcaatcagctttgctcacaaactaaaggaagttttgtgaatggggtgtttgaggtacataagaaaaatgtaaggggtgaattcacttattatgaaatacaagataatacagggaagatggaagtggtggtgcatggacgactgaccacaatcaactgtgaggaaggagataaactgaaactcacctgctttgaattggcaccgaaaagtgggaataccggggagttgagatctgtaattcatagtcacatcaaggttggaactttataggaacatcatttttccaagtggcgaatcattttgtttatactttaagaagactagactgctactattacagagagtctagcaagtggaaaaggaacaaagccttgcactttactgggtgtaaacttcccaccattgtttttaaagaaggatacttgtaatcataataaaa

SEQ ID NO: 342700 - DNA, 4018 bp, Homo sapiens
  misc_feature (3081)..(3081): n is a, c, g, or t
  misc_feature (3145)..(3145): n is a, c, g, or t
  misc_feature (3152)..(3152): n is a, c, g, or t
  misc_feature (3174)..(3174): n is a, c, g, or t
  misc_feature (3200)..(3200): n is a, c, g, or t
acattgtttcctactccattttctctggggcaatagcagaataggagcaagccagcactagtcagctaactaagtgactcaaccaaggccttttttccttgttatctttgcagatacttcattttcttagcgtttctggagattacaacatcctgcggttccgtttctgggaactttactgatttatctcccccctcacacaaataagcattgattcctgcatttctgaagatctcaagatctggactactgttgaaaaaatttccagtgaggctcacttatgtctgtaaagatgggaaaaaaatacaagaacattgttctactaaaaggattagaggtcatcaatgattatcattttagaatggttaagtccttactgagcaacgatttaaaacttaatttaaaaatgagagaagagtatgacaaaattcagattgctgacttgatggaagaaaagttccgaggtgatgctggtttgggcaaactaataaaaattttcgaagatataccaacgcttgaagacctggctgaaactcttaaaaaagaaaagttaaaagtaaaaggaccagccctatcaagaaagaggaagaaggaagtggatgctacttcacctgcaccctccacaagcagcactgtcaaaactgaaggagcagaggcaactcctggagctcagaaaagaaaaaaatcaaccaaagaaaaggctggacccaaagggagtaaggtgtccgaggaacagactcagcctccctctcctgcaggagccggcatgtccacagccatgggccgttccccatctcccaagacctcattgtcagctccacccaacacttcttcaactgagaacccgaaaacagtggccaaatgtcaggtaactcccagaagaaatgttctccaaaaacgcccagtgatagtgaaggtactgagtacaacaaagccatttgaatatgagaccccagaaatggagaaaaaaataatgtttcatgctacagtggctacacagacacagttcttccatgtgaaggttttaaacaccagcttgaaggagaaattcaatggaaagaaaatcatcatcatatcagattatttggaatatgatagtctcctagaggtcaatgaagaatctactgtatctgaagctggtcctaaccaaacgtttgaggttccaaataaaatcatcaacagagcaaaggaaactctgaagattgatattcttcacaaacaagcttcaggaaatattgtatatggggtatttatgctacataagaaaacagtaaatcagaagaccacaatctacgaaattcaggatgatagaggaaaaatggatgtagtggggacaggacaatgtcacaatatcccctgtgaagaaggagataagctccaacttttctgctttcgacttagaaaaaagaaccagatgtcaaaactgatttcagaaatgcatagttttatccagataaagaaaaaaacaaacccgagaaacaatgaccccaagagcatgaagctaccccaggaacagagtcagcttccaaatccttcagaggccagcacaaccttccctgagagccatcttcggactcctcagatgccaccaacaactccatccagcagtttcttcaccaagaaaagtgaagacacaatctccaaaatgaatgacttcatgaggatgcagatactgaaggaagggagtcattttccaggaccgttcatgaccagcataggcccagctgagagccatccccacactcctcagatgcctccatcaacaccaagcagcagtttcttaaccacgttgaaaccaagactgaagactgaacctgaagaagtttccatagaagacagtgcccagagtgacctcaaagaagtgatggtgctgaacgcaacagaatcatttgtatatgagcccaaagagcagaagaaaatgtttcatgccacagtggcaactgagaatgaagtcttccgagtgaaggtttttaatattgacctaaaggagaagttcaccccaaagaagatcattgccatagcaaattatgtttgccgcaatgggttcctggaggtatatcctttcacacttgtggctgatgtgaatgctgaccgaaacatggagatcccaaaaggattgattagaagtgccagcgtaactcctaaaatcaatcagctttgctcacaaactaaaggaagttttgtgaatggggtgtttgaggtacataaggtaagcccacaccattgttttataaaatttctcctgcaacctccaatttttaaagtcttaacttgtcaactggagtttggtcaacttactcaacacagaaaatcaaccccttcacccttcccccagcactagagataattgaatagagttcatttcaggatatggggtacgttatattgtaacattcctcttcttaaggtatcatcatgcaagttatttagacagtcactaggaaacttggcattttattagttttgatgatctattcagagccacccttgtccaggacagtgcagagtttatatcaacacacatatccttaggattttgtttctttgagttcttctccatctgtatcaatgacaacttaatttaattgtgaataaaagagttgctctcccaagcctgaatcctgattgtgacaaccagagtaagaaataaaatagactactctgctttagaatgcagctatgtctaacagttagctagaattctgatcatttggactccaaagtttcttgcctcttctcattcattaattcatcaggagactgtagagcaactaacttctgcattaaataataagagaaatacgaagcaaaaagactaaaaaagtcacgtagcttaactgctcaatttataaatggggcaataaaatgcaaaaaaaagaaaaaaagcttggtgaattcttaggcttacagtgtgcctttcagtctctacacatcatgtaaatattatgcttagctgatttaacttcttgtttgaagtactgtttcatactccattatacatgtcttctagggtggcttacttttaattgtgctgttttctctacactcagtttaaatgactgtacatatatatgtggttgnagagttaatgaataatgagctacaaaccagaacaatgtgactagatagataggatgatctaganttgaganctggcagattgggaaagagtgnctatatggagaagaaagaagtagttncatattgaaataacagtctacttaatgaggacgtgcaacattctttctcaaacttacaaagtgccataaaaagcctctattctctgctcttgggcaggtgtgaaagaaacctaccaaattaatcagatttttctgtatccaggctccttaaaaaatcccagctgtgctgatgtggaaacaggaagaattaggaaagtaatcaattttttttcctagaaaaaatccagcagacaaagaacttcaacaaaagaggctcaagggaggagttgaaaggcaggattcaaagaccaagtatcttaagctatttggtacctgttattcaggacctacagctctgtttactctatcaaagacaaaagtttccagaaacaccctgtatttctcatagatttgaaaattattgatccagtttcagaagataagtgttaattttcttttgcagaaaaatgtaaggggtgaattcacttattatgaaatacaagataatacagggaagatggaagtggtggtgcatggacgactgaccacaatcaactgtgaggaaggagataaactgaaactcacctgctttgaattggcaccgaaaagtgggaataccggggagttgagatctgtaattcatagtcacatcaaggttggaactttataggaacatcatttttccaagtggcgaatcattttgtttatactttaagaagactagactgctactattacagagagtctagcaagtggaaaaggaacaaagccttgcactttactgggtgtaaacttcccaccattgtttttaaagaaggatacttgtaatcataataaaa

SEQ ID NO: 342701 - DNA, 1984 bp, Homo sapiens
acattgtttcctactccattttctctggggcaatagcagaataggagcaagccagcactagtcagctaactaagtgactcaaccaaggccttttttccttgttatctttgcagatacttcattttcttagcgtttctggagattacaacatcctgcggttccgtttctgggaactttactgatttatctcccccctcacacaaataagcattgattcctgcatttctgaagatctcaagatctggactactgttgaaaaaatttccagtgaggctcacttatgtctgtaaagatgggaaaaaaatacaagaacattgttctactaaaaggattagaggtcatcaatgattatcattttagaatggttaagtccttactgagcaacgatttaaaacttaatttaaaaatgagagaagagtatgacaaaattcagattgctgacttgatggaagaaaagttccgaggtgatgctggtttgggcaaactaataaaaattttcgaagatataccaacgcttgaagacctggctgaaactcttaaaaaagaaaagttaaaagtaaaaggaccagccctatcaagaaagaggaagaaggaagtggatgctacttcacctgcaccctccacaagcagcactgtcaaaactgaaggagcagaggcaactcctggagctcagaaaagaaaaaaatcaaccaaagaaaaggctggacccaaagggagtaaggtgtccgaggaacagactcagcctccctctcctgcaggagccggcatgtccacagccatgggccgttccccatctcccaagacctcattgtcagctccacccaacacttcttcaactgagaacccgaaaacagtggccaaatgtcaggtaactcccagaagaaatgttctccaaaaacgcccagtgatagtgaaggtactgagtacaacaaagccatttgaatatgagaccccagaaatggagaaaaaaataatgtttcatgctacagtggctacacagacacagttcttccatgtgaaggttttaaacaccagcttgaaggagaaattcaatggaaagaaaatcatcatcatatcagattatttggaatatgatagtctcctagaggtcaatgaagaatctactgtatctgaagctggtcctaaccaaacgtttgaggttccaaataaaatcatcaacagagcaaaggaaactctgaagattgatattcttcacaaacaagcttcaggaaatattgtatatggggtatttatgctacataagaaaacagtaaatcagaagaccacaatctacgaaattcaggatgatagaggaaaaatggatgtagtggggacaggacaatgtcacaatatcccctgtgaagaaggagataagctccaacttttctgctttcgacttagaaaaaagaaccagatgtcaaaactgatttcagaaatgcatagttttatccagataaagaaaaaaacaaacccgagaaacaatgaccccaagagcatgaagctaccccaggaacagagtcagcttccaaatccttcagaggccagcacaaccttccctgagagccatcttcggactcctcagatgccaccaacaactccatccagcagtttcttcaccaagaaaagtgaagacacaatctccaaaatgaatgacttcatgaggatgcagatactgaaggaagggagtcattttccaggaccgttcatgaccagcataggcccagctgagagccatccccacactcctcagatgcctccatcaacaccaagcagcagtttcttaaccacggtacaagttccctcttcccaatacattcccctcgctactatataatgacaaggattaacacaaccgtgaaagcacctcaccaatcccctactacatacaatgctttaatttaaccaaatcagtcatttatttatcaagtgtgtattttgaggtcctatccaaaattaaaattctgtttttatcatctctattcca

SEQ ID NO: 342702 - DNA, 2169 bp, Homo sapiens
acattgtttcctactccattttctctggggcaatagcagaataggagcaagccagcactagtcagctaactaagtgactcaaccaaggccttttttccttgttatctttgcagatacttcattttcttagcgtttctggagattacaacatcctgcggttccgtttctgggaactttactgatttatctcccccctcacacaaataagcattgattcctgcatttctgaagatctcaagatctggactactgttgaaaaaatttccagtgaggctcacttatgtctgtaaagatgggaaaaaaatacaagaacattgttctactaaaaggattagaggtcatcaatgattatcattttagaatggttaagtccttactgagcaacgatttaaaacttaatttaaaaatgagagaagagtatgacaaaattcagattgctgacttgatggaagaaaagttccgaggtgatgctggtttgggcaaactaataaaaattttcgaagatataccaacgcttgaagacctggctgaaactcttaaaaaagaaaagttaaaagtaaaaggaccagccctatcaagaaagaggaagaaggaagtggatgctacttcacctgcaccctccacaagcagcactgtcaaaactgaaggagcagaggcaactcctggagctcagaaaagaaaaaaatcaaccaaagaaaaggctggacccaaagggagtaaggtgtccgaggaacagactcagcctccctctcctgcaggagccggcatgtccacagccatgggccgttccccatctcccaagacctcattgtcagctccacccaacacttcttcaactgagaacccgaaaacagtggccaaatgtcaggtaactcccagaagaaatgttctccaaaaacgcccagtgatagtgaaggtactgagtacaacaaagccatttgaatatgagaccccagaaatggagaaaaaaataatgtttcatgctacagtggctacacagacacagttcttccatgtgaaggttttaaacaccagcttgaaggagaaattcaatggaaagaaaatcatcatcatatcagattatttggaatatgatagtctcctagaggtcaatgaagaatctactgtatctgaagctggtcctaaccaaacgtttgaggttccaaataaaatcatcaacagagcaaaggaaactctgaagattgatattcttcacaaacaagcttcaggaaatattgtatatggggtatttatgctacataagaaaacagtaaatcagaagaccacaatctacgaaattcaggatgatagaggaaaaatggatgtagtggggacaggacaatgtcacaatatcccctgtgaagaaggagataagctccaacttttctgctttcgacttagaaaaaagaaccagatgtcaaaactgatttcagaaatgcatagttttatccagtaagaattaaataggcaaatattagttttccaaagtggaaatgatttgctttaagttttggcaaaaacaagtttgtaggtttttttacagagttcagcgggaggcatgagaaaacagatattctccttgtattcacatttactttttttaattttttttttctggatggaatgatgtgataggatacaattttaaaaagaaagaaatctgaactttatcaaaaaaattgaactctgaattttatgtaaacttttaagtgattgtagggttgggatttaaaattacatgttctccatttgtgaattagaaaacgtcgtgtgtgtgtgtgtgtgtgtgtgatactttctagtttgtaacattacaatacacatatgtgtgtatttagtccataaaaatacctaatttgaaacttaaaattatttgcagtgatcaaaattatgtcccactgacaaagttttatacagaggaagctctccaatttgttaatttgaattcaaatattcacgtgttaagtttccttacagtacatgattttacgctgttgccattttgaatgttgtaaattattttttatttcagtaggtttttgggaaacaggtggtgcttcgttataggaataagttctttagtggtgatttctgactttttgatgcacccatcgtccaagcagcgtacactgtacccagtgtgtatgtagcattttatccctcaccccc

SEQ ID NO: 342703 - DNA, 1112 bp, Homo sapiens
ttctgtgactttctagttgactaaagacttacactaggaatctcaggttcatcatttgtgaaatgggagaaatactgtctaccatagagggtcatcaacttagctcacagcagccctgaattaccaagaatgcatctgagcaaatcagatcacaaaggtacctgcctttagtgagatacatacactggtttacatcagacagaggtagctgggtctacataacaaagtccatgctttttgccacactgacccatacattcatgtgggattcttggaacactaacaaaggctaatattagaaggcaaatagttcaaaacaaaggctgacatattcaggcacacacatgctctcagattgctccagttctcaggaccagcagtcaaacatttcaaaccttctttgatagcaattgcaccaggaataccttttgtactctcccccttccttctgcccaatgaaaaccctctcctcaactcttgtcattgggtgcaccagctcctttctctctcctgttgttccctgacatctcctgctctttcacttgcactcatgctgagtaggagtgaatatctcatttcacggtccaaattaaacagagaggcatgactcaaaggtcaagaatttattaagggagatagatgagagcgagaaaagaatcatttagaaaggaataggggaagagatatggtgcagggggaggagatacagtgtgattgaagggagaaatgtaggatcatcagcatctcaactggtctgtctttatctctttctccttcaaggtcatcaagaccaggaaaaacaagaaagacatactcaatcctgattcaagtatggaaacttcaccagactttttcttctaaaatctggatgtcattgacgataatgtttatggagataaggtctaagtgcctaaaaaaatgtacatatacctggttgaaatacaacactatacatacacaccaccatatatactagctgttaatcctatggaatggggtattgggagtgcttttttaatttttcatagtttttttttaataaaatggcatattttgcatctacaacttctataatttgaaaaaataaataaacattatcttttttgtgaaaa

SEQ ID NO: 342704 - DNA, 2413 bp, Homo sapiens
  misc_feature (1562)..(1562): n is a, c, g, or t
gacacccactgcccttaacagaaaaaatactgctgagcaaagggtttaacaggactctcggtctaccagaagttcagtgcattttccaggattttcaaggcttcgatgctgtcatgttgtgagcccactatccacttgtgtttttccatgaataatgaaggaaacctgaggaatcatgaatgtaatcattgagtttctgagagctttactgactgatttccctattcaaaacaatcctcatttcctacatttctgaagatctcaagatctggactactgttgaagaaattcccagtaaggctcacttatatctttagagatggcaaataactacaagaaaattgttctactgaaaggattagaggtcatcaatgattatcattttagaattgttaagtccttactgagtaacgatttaaaacttaatccaaaaatgaaagaagagtatgacaaaattcagattgctgacttgatggaggaaaagttcccaggtgatgccggtttgggcaaactaatagaattcttcaaagaaataccaacactgggagaccttgctgaaactcttaaaagagaaaagttaaaagttgcaaataaaattgaatccattccagtcaaaggaataatcccatctaaaaagacgaaacagaaagaagtgtatcctgctacacctgcatgcaccccaagcaaccgtctcacagctaaaggagcagaggagactcttggacctcaggtaagcttcaggaagaggagcaggcttcaagtctcacagtggaagctctgctgtggctgttccactcaatctgtccagcaggcagttatttcttcatatgtttcccatcaagtttcagatttatcaaattacataataattgatcatctttctgcaaggcaacaagttaaacgctttagtaaacataatgtaaatatacataaaataaatataatattttcatctccaatagagaaggatgttaacttgagagtcagataaaaaaacgtttgcctatgtttacaaaagcctagtttcttaactgcaagtcagcatatcccaaaacacaagtaattaaggaatgatgtgtgttactttctctgctccctttttaaaaatgaaaccatctatgccatgttctttcaattggcctggggatgtacttaagtttccaagaaaaacaatttatatacaataaatatattaccttgtaatgaaaatgtgctctgcttcatttgacactgaaagtaattaacaagaaaaataaactacttgtagaaaagaaaaaaaccatctgaagaagagactggaaccaaaaggagtaagatgtccaaagagcagactcggccttcctgctctgcaggagccagcacgtccacagccatgggccgttccccacctccccagacctcatcatcagctccacccaacacttcctcaactgaggtacactcttcctggtccccttttgattcattttcttcaacccaaaatgtaggaatctgatttcatcttctactgaaaaatgacatcaatcatcagccagtaaatcaaatgtatagactgagaattnactgcattttaatcttttgcttccacaggcatatttgatgaacttgacattatctctgactgcaggaagttttctgtcctgtgctgtttggggaagagacagagaactgcggaatctggaactttcagcaacagactcactgtctactgcccccatctattatacacccattccctttgctcactaatttgttcaagtttctctgacatacaccatgctcctttttcctttaggattttcacacaccatatttctttcacctttaaactcttacctggccaaccctatccaccctctggatcccaatattgagatcttatcctcagggaatcctcacttagacccctgtaacaggttaaatcttcatggtgttctgtttcctaggaacttctttcttttctactgtttatgacaactgaagttaataagtgtttatctttcccacctactcaaagtagttccaagattagggctagtttgtaattctgtggaccactgtaaacgagggcctagttcagtgtctgcctcatgggaagcttccaataaatacctttgctcaacgaaaaaatgaaaacccagtggctcacgcctgtaatcccagcactttgggaggccgaggcaggtggattgcctgaggtcaggagtttgagactagtctggccaacatggtgaaacactatctctactaaaaatacaaaaaaattagctgggtatggtggcttacgcctataatcccagctactcaggaggctgaggcaggggaattgcttgaaccagggaggtggaggttgcagtgagctgagatcgcaccactgcactccagcctgggtgacagagcgagactccatctc

SEQ ID NO: 342705 - DNA, 675 bp, Homo sapiens
acattgtttcctactccattttctctggggcaatagcagaataggagcaagccagcactagtcagctaactaagtgactcaaccaaggccttttttccttgttatctttgcagatacttcattttcttagcgtttctggagattacaacatcctgcggttccgtttctgggaactttactgatttatctcccccctcacacaaataagcattgattcctgcatttctgaagatctcaagatctggactactgttgaaaaaatttccagtgaggctcacttatgtctgtaaagatgggaaaaaaatacaagaacattgttctactaaaaggattagaggtcatcaatgattatcattttagaatggttaagtccttactgagcaacgatttaaaacttaatttaaaaatgagagaagagtatgacaaaattcagattgctgacttgatggaagaaaagttccgaggtgatgctggtttgggcaaactaataaaaattttcgaagatataccaacgcttgaagacctggctgaaactcttaaaaaagaaaagttaaaagttccaggtacatcgccactcgaggtatatatatgatggatttgtatagaatatgcgccgctccatcattcaaacagctcagttttaatattagaaactaaaggcaattaatatatctt

SEQ ID NO: 342706 - DNA, 2733 bp, Homo sapiens
acattgtttcctactccattttctctggggcaatagcagaataggagcaagccagcactagtcagctaactaagtgactcaaccaaggccttttttccttgttatctttgcagatacttcattttcttagcgtttctggagattacaacatcctgcggttccgtttctgggaactttactgatttatctcccccctcacacaaataagcattgattcctgcatttctgaagatctcaagatctggactactgttgaaaaaatttccagtgaggctcacttatgtctgtaaagatgggaaaaaaatacaagaacattgttctactaaaaggattagaggtcatcaatgattatcattttagaatggttaagtccttactgagcaacgatttaaaacttaatttaaaaatgagagaagagtatgacaaaattcagattgctgacttgatggaagaaaagttccgaggtgatgctggtttgggcaaactaataaaaattttcgaagatataccaacgcttgaagacctggctgaaactcttaaaaaagaaaagttaaaagtaaaaggaccagccctatcaagaaagaggaagaaggaagtggatgctacttcacctgcaccctccacaagcagcactgtcaaaactgaaggagcagaggcaactcctggagctcagaaaagaaaaaaatcaaccaaagaaaaggctggacccaaagggagtaaggtgtccgaggaacagactcagcctccctctcctgcaggagccggcatgtccacagccatgggccgttccccatctcccaagacctcattgtcagctccacccaacacttcttcaactgagaacccgaaaacagtggccaaatgtcaggtaactcccagaagaaatgttctccaaaaacgcccagtgatagtgaaggtactgagtacaacaaagccatttgaatatgagaccccagaaatggagaaaaaaataatgtttcatgctacagtggctacacagacacagttcttccatgtgaaggttttaaacaccagcttgaaggagaaattcaatggaaagaaaatcatcatcatatcagattatttggaatatgatagtctcctagaggtcaatgaagaatctactgtatctgaagctggtcctaaccaaacgtttgaggttccaaataaaatcatcaacagagcaaaggaaactctgaagattgatattcttcacaaacaagcttcaggaaatattgtatatggggtatttatgctacataagaaaacagtaaatcagaagaccacaatctacgaaattcaggatgatagaggaaaaatggatgtagtggggacaggacaatgtcacaatatcccctgtgaagaaggagataagctccaacttttctgctttcgacttagaaaaaagaaccagatgtcaaaactgatttcagaaatgcatagttttatccagataaagaaaaaaacaaacccgagaaacaatgaccccaagagcatgaagctaccccaggaacagagtcagcttccaaatccttcagaggccagcacaaccttccctgagagccatcttcggactcctcagatgccaccaacaactccatccagcagtttcttcaccaagaaaagtgaagacacaatctccaaaatgaatgacttcatgaggatgcagatactgaaggaagggagtcattttccaggaccgttcatgaccagcataggcccagctgagagccatccccacactcctcagatgcctccatcaacaccaagcagcagtttcttaaccacgttgaaaccaagactgaagactgaacctgaagaagtttccatagaagacagtgcccagagtgacctcaaagaagtgatggtgctgaacgcaacagaatcatttgtatatgagcccaaagagcagaagaaaatgtttcatgccacagtggcaactgagaatgaagtcttccgagtgaaggtttttaatattgacctaaaggagaagttcaccccaaagaagatcattgccatagcaaattatgtttgccgcaatgggttcctggaggtatatcctttcacacttgtggctgatgtgaatgctgaccgaaacatggagatcccaaaaggattgattagaagtgccagcgtaactcctaaaatcaatcagctttgctcacaaactaaaggaagttttgtgaatggggtgtttgaggtacataagaaaaatgtaaggggtgaattcacttattatgaaatacaagataatacagggaagatggaagtggtggtgcatggacgactgaccacaatcaactgtgaggaaggagataaactgaaactcacctgctttgaattggcaccgaaaagtgggaataccggggagttgagatctgtaattcatagtcacatcaaggtcatcaagaccaggaaaaacaagaaagacatactcaatcctgattcaagtatggaaacttcaccagactttttcttctaaaatctggatgtcattgacgataatgtttatggagataaggtctaagtgcctaaaaaaatgtacatatacctggttgaaatacaacactatacatacacaccaccatatatactagctgttaatcctatggaatggggtattgggagtgcttttttaatttttcatagtttttttttaataaaatggcatattttgcatctacaacttctataatttgaaaaaataaataaacattatcttttttgtgaaaa

SEQ ID NO: 342707 - DNA, 694 bp, Homo sapiens
aagactactcaggcgtgcactgcgaggtggagatctgacttctcttgttcccgcttaagactgcctcctgtatacttcattttcttagcgtttctggagattacaacatcctgcggttccgtttctgggaactttactgatttatctcccccctcacacaaataagcattgattcctgcatttctgaagatctcaagatctggactactgttgaaaaaatttccagtgaggctcacttatgtctgtaaagatgggaaaaaaatacaagaacattgttctactaaaaggattagaggtcatcaatgattatcattttagaatggttaagtccttactgagcaacgatttaaaacttaatttaaaaatgagagaagagtatgacaaaattcagattgctgacttgatggaagaaaagttccgaggtgatgctggtttgggcaaactaataaaaattttcgaagatataccaacgcttgaagacctggctgaaactcttaaaaaagaaaagttaaaagtaaaaggaccagccctatcaagaaagaggaagaaggaagtggatgctacttcacctgcaccctccacaagcagcactgtcaaaactgaaggagcagaggcaactcctggagctcagaaaaaacaacaaaaacaacaaaaacccttttgggcgcttggggcctcggaaaggtttttaaac

SEQ ID NO: 342708 - DNA, 2565 bp, Homo sapiens
acattgtttcctactccattttctctggggcaatagcagaataggagcaagccagcactagtcagctaactaagtgactcaaccaaggccttttttccttgttatctttgcagatacttcattttcttagcgtttctggagattacaacatcctgcggttccgtttctgggaactttactgatttatctcccccctcacacaaataagcattgattcctgcatttctgaagatctcaagatctggactactgttgaaaaaatttccagtgaggctcacttatgtctgtaaagatgggaaaaaaatacaagaacattgttctactaaaaggattagaggtcatcaatgattatcattttagaatggttaagtccttactgagcaacgatttaaaacttaatttaaaaatgagagaagagtatgacaaaattcagattgctgacttgatggaagaaaagttccgaggtgatgctggtttgggcaaactaataaaaattttcgaagatataccaacgcttgaagacctggctgaaactcttaaaaaagaaaagttaaaagtaaaaggaccagccctatcaagaaagaggaagaaggaagtggatgctacttcacctgcaccctccacaagcagcactgtcaaaactgaaggagcagaggcaactcctggagctcagaaaagaaaaaaatcaaccaaagaaaaggctggacccaaagggagtaaggtgtccgaggaacagactcagcctccctctcctgcaggagccggcatgtccacagccatgggccgttccccatctcccaagacctcattgtcagctccacccaacacttcttcaactgagaacccgaaaacagtggccaaatgtcaggtaactcccagaagaaatgttctccaaaaacgcccagtgatagtgaaggtactgagtacaacaaagccatttgaatatgagaccccagaaatggagaaaaaaataatgtttcatgctacagtggctacacagacacagttcttccatgtgaaggttttaaacaccagcttgaaggagaaattcaatggaaagaaaatcatcatcatatcagattatttggaatatgatagtctcctagaggtcaatgaagaatctactgtatctgaagctggtcctaaccaaacgtttgaggttccaaataaaatcatcaacagagcaaaggaaactctgaagattgatattcttcacaaacaagcttcaggaaatattgtatatggggtatttatgctacataagaaaacagtaaatcagaagaccacaatctacgaaattcaggatgatagaggaaaaatggatgtagtggggacaggacaatgtcacaatatcccctgtgaagaaggagataagctccaacttttctgctttcgacttagaaaaaagaaccagatgtcaaaactgatttcagaaatgcatagttttatccagataaagaaaaaaacaaacccgagaaacaatgaccccaagagcatgaagctaccccaggaacagagtcagcttccaaatccttcagaggccagcacaaccttccctgagagccatcttcggactcctcagatgccaccaacaactccatccagcagtttcttcaccaagttgaaaccaagactgaagactgaacctgaagaagtttccatagaagacagtgcccagagtgacctcaaagaagtgatggtgctgaacgcaacagaatcatttgtatatgagcccaaagagcagaagaaaatgtttcatgccacagtggcaactgagaatgaagtcttccgagtgaaggtttttaatattgacctaaaggagaagttcaccccaaagaagatcattgccatagcaaattatgtttgccgcaatgggttcctggaggtatatcctttcacacttgtggctgatgtgaatgctgaccgaaacatggagatcccaaaaggattgattagaagtgccagcgtaactcctaaaatcaatcagctttgctcacaaactaaaggaagttttgtgaatggggtgtttgaggtacataagaaaaatgtaaggggtgaattcacttattatgaaatacaagataatacagggaagatggaagtggtggtgcatggacgactgaccacaatcaactgtgaggaaggagataaactgaaactcacctgctttgaattggcaccgaaaagtgggaataccggggagttgagatctgtaattcatagtcacatcaaggtcatcaagaccaggaaaaacaagaaagacatactcaatcctgattcaagtatggaaacttcaccagactttttcttctaaaatctggatgtcattgacgataatgtttatggagataaggtctaagtgcctaaaaaaatgtacatatacctggttgaaatacaacactatacatacacaccaccatatatactagctgttaatcctatggaatggggtattgggagtgcttttttaatttttcatagtttttttttaataaaatggcatattttgcatctacaacttctataatttgaaaaaataaataaacattatcttttttgtgaaaa

SEQ ID NO: 342709 - DNA, 3046 bp, Homo sapiens
tcaacatcgcattcccagaaatgccatgaaaggaaagaccaagtcttgactgagaaacggaccgggcagatgagggactcccacatatacctgtttcctgctcttcccgaagacattttgccacaagcatataattcagcttctgaaaaatacggtcttcctcactgcagacaccatgccagcgttttaaatcaagttggctactcgtgctgtttagagtatgcagtttgcctgtggcaatattaaactcatctggaagaaagcacttaaacctatccagttcctcatcggtgatgttatccaggctggttagcaagagtatctccttatatttactctccatctcacgacttttcagcttataagggatccaaactatgtaagattataccaccaaaagtgattcaacattcaaaatgaagcaagatacttcattttcttagcgtttctggagattacaacatcctgcggttccgtttctgggaactttactgatttatctcccccctcacacaaataagcattgattcctgcatttctgaagatctcaagatctggactactgttgaaaaaatttccagtgaggctcacttatgtctgtaaagatgggaaaaaaatacaagaacattgttctactaaaaggattagaggtcatcaatgattatcattttagaatggttaagtccttactgagcaacgatttaaaacttaatttaaaaatgagagaagagtatgacaaaattcagattgctgacttgatggaagaaaagttccgaggtgatgctggtttgggcaaactaataaaaattttcgaagatataccaacgcttgaagacctggctgaaactcttaaaaaagaaaagttaaaagtaaaaggaccagccctatcaagaaagaggaagaaggaagtggatgctacttcacctgcaccctccacaagcagcactgtcaaaactgaaggagcagaggcaactcctggagctcagaaaagaaaaaaatcaaccaaagaaaaggctggacccaaagggagtaaggtgtccgaggaacagactcagcctccctctcctgcaggagccggcatgtccacagccatgggccgttccccatctcccaagacctcattgtcagctccacccaacacttcttcaactgagaacccgaaaacagtggccaaatgtcaggtaactcccagaagaaatgttctccaaaaacgcccagtgatagtgaaggtactgagtacaacaaagccatttgaatatgagaccccagaaatggagaaaaaaataatgtttcatgctacagtggctacacagacacagttcttccatgtgaaggttttaaacaccagcttgaaggagaaattcaatggaaagaaaatcatcatcatatcagattatttggaatatgatagtctcctagaggtcaatgaagaatctactgtatctgaagctggtcctaaccaaacgtttgaggttccaaataaaatcatcaacagagcaaaggaaactctgaagattgatattcttcacaaacaagcttcaggaaatattgtatatggggtatttatgctacataagaaaacagtaaatcagaagaccacaatctacgaaattcaggatgatagaggaaaaatggatgtagtggggacaggacaatgtcacaatatcccctgtgaagaaggagataagctccaacttttctgctttcgacttagaaaaaagaaccagatgtcaaaactgatttcagaaatgcatagttttatccagataaagaaaaaaacaaacccgagaaacaatgaccccaagagcatgaagctaccccaggaacagagtcagcttccaaatccttcagaggccagcacaaccttccctgagagccatcttcggactcctcagatgccaccaacaactccatccagcagtttcttcaccaagaaaagtgaagacacaatctccaaaatgaatgacttcatgaggatgcagatactgaaggaagggagtcattttccaggaccgttcatgaccagcataggcccagctgagagccatccccacactcctcagatgcctccatcaacaccaagcagcagtttcttaaccacgttgaaaccaagactgaagactgaacctgaagaagtttccatagaagacagtgcccagagtgacctcaaagaagtgatggtgctgaacgcaacagaatcatttgtatatgagcccaaagagcagaagaaaatgtttcatgccacagtggcaactgagaatgaagtcttccgagtgaaggtttttaatattgacctaaaggagaagttcaccccaaagaagatcattgccatagcaaattatgtttgccgcaatgggttcctggaggtatatcctttcacacttgtggctgatgtgaatgctgaccgaaacatggagatcccaaaaggattgattagaagtgccagcgtaactcctaaaatcaatcagctttgctcacaaactaaaggaagttttgtgaatggggtgtttgaggtacataagaaaaatgtaaggggtgaattcacttattatgaaatacaagataatacagggaagatggaagtggtggtgcatggacgactgaccacaatcaactgtgaggaaggagataaactgaaactcacctgctttgaattggcaccgaaaagtgggaataccggggagttgagatctgtaattcatagtcacatcaaggtcatcaagaccaggaaaaacaagaaagacatactcaatcctgattcaagtatggaaacttcaccagactttttcttctaaaatctggatgtcattgacgataatgtttatggagataaggtctaagtgcctaaaaaaatgtacatatacctggttgaaatacaacactatacatacacaccaccatatatactagctgttaatcctatggaatggggtattgggagtgcttttttaatttttcatagtttttttttaataaaatggcatattttgcatctacaacttctataatttgaaaaaataaataaacattatcttttttgtgaaaa

SEQ ID NO: 342710 - DNA, 2901 bp, Homo sapiens
acattgtttcctactccattttctctggggcaatagcagaataggagcaagccagcactagtcagctaactaagtgactcaaccaaggccttttttccttgttatctttgcagatacttcattttcttagcgtttctggagattacaacatcctgcggttccgtttctgggaactttactgatttatctcccccctcacacaaataagcattgattcctgcatttctgaagatctcaagatctggactactgttgaaaaaatttccagtgaggctcacttatgtctgtaaagatgggaaaaaaatacaagaacattgttctactaaaaggattagaggtcatcaatgattatcattttagaatggttaagtccttactgagcaacgatttaaaacttaatttaaaaatgagagaagagtatgacaaaattcagattgctgacttgatggaagaaaagttccgaggtgatgctggtttgggcaaactaataaaaattttcgaagatataccaacgcttgaagacctggctgaaactcttaaaaaagaaaagttaaaagtaaaaggaccagccctatcaagaaagaggaagaaggaagtggatgctacttcacctgcaccctccacaagcagcactgtcaaaactgaaggagcagaggcaactcctggagctcagaaaagaaaaaaatcaaccaaagaaaaggctggacccaaagggagtaaggtgtccgaggaacagactcagcctccctctcctgcaggagccggcatgtccacagccatgggccgttccccatctcccaagacctcattgtcagctccacccaacacttcttcaactgagaacccgaaaacagtggccaaatgtcaggtaactcccagaagaaatgttctccaaaaacgcccagtgatagtgaaggtactgagtacaacaaagccatttgaatatgagaccccagaaatggagaaaaaaataatgtttcatgctacagtggctacacagacacagttcttccatgtgaaggttttaaacaccagcttgaaggagaaattcaatggaaagaaaatcatcatcatatcagattatttggaatatgatagtctcctagaggtcaatgaagaatctactgtatctgaagctggtcctaaccaaacgtttgaggttccaaataaaatcatcaacagagcaaaggaaactctgaagattgatattcttcacaaacaagcttcaggaaatattgtatatggggtatttatgctacataagaaaacagtaaatcagaagaccacaatctacgaaattcaggatgatagaggaaaaatggatgtagtggggacaggacaatgtcacaatatcccctgtgaagaaggagataagctccaacttttctgctttcgacttagaaaaaagaaccagatgtcaaaactgatttcagaaatgcatagttttatccagataaagaaaaaaacaaacccgagaaacaatgaccccaagagcatgaagctaccccaggaacagagtcagcttccaaatccttcagaggccagcacaaccttccctgagagccatcttcggactcctcagatgccaccaacaactccatccagcagtttcttcaccaagaaaagtgaagacacaatctccaaaatgaatgacttcatgaggatgcagatactgaaggaagggagtcattttccaggaccgttcatgaccagcataggcccagctgagagccatccccacactcctcagatgcctccatcaacaccaagcagcagtttcttaaccacgaaaagtgaagacacaatctccaaaatgaatgacttcatgaggatgcagatactgaaggaagggagtcattttccaggaccgttcatgaccagcataggcccagctgagagccatccccacactcctcagatgcctccatcaacaccaagcagcagtttcttaaccacgttgaaaccaagactgaagactgaacctgaagaagtttccatagaagacagtgcccagagtgacctcaaagaagtgatggtgctgaacgcaacagaatcatttgtatatgagcccaaagagcagaagaaaatgtttcatgccacagtggcaactgagaatgaagtcttccgagtgaaggtttttaatattgacctaaaggagaagttcaccccaaagaagatcattgccatagcaaattatgtttgccgcaatgggttcctggaggtatatcctttcacacttgtggctgatgtgaatgctgaccgaaacatggagatcccaaaaggattgattagaagtgccagcgtaactcctaaaatcaatcagctttgctcacaaactaaaggaagttttgtgaatggggtgtttgaggtacataagaaaaatgtaaggggtgaattcacttattatgaaatacaagataatacagggaagatggaagtggtggtgcatggacgactgaccacaatcaactgtgaggaaggagataaactgaaactcacctgctttgaattggcaccgaaaagtgggaataccggggagttgagatctgtaattcatagtcacatcaaggtcatcaagaccaggaaaaacaagaaagacatactcaatcctgattcaagtatggaaacttcaccagactttttcttctaaaatctggatgtcattgacgataatgtttatggagataaggtctaagtgcctaaaaaaatgtacatatacctggttgaaatacaacactatacatacacaccaccatatatactagctgttaatcctatggaatggggtattgggagtgcttttttaatttttcatagtttttttttaataaaatggcatattttgcatctacaacttctataatttgaaaaaataaataaacattatcttttttgtgaaaa

SEQ ID NO: 342711 - DNA, 1835 bp, Homo sapiens
agttgtagcagatatccattctttttgcatggggccagagacccagaaaggctatcagagatttcagcttcctctgtatcaaggtgctttgggaagcaaagctgcccgtgtaggtgaaagcagtagaaatttggaagaaaactcattgttctagaactgtcatagaaatatctcagatatgaaagacttaaacaaaaaggatattgagggacggctttctgcaaagatgtggcctaagatatgtgcatatctgtactaggagttgctgttgtgcatcttgtttaactctcttagaagggacttcagcctatatgtggttgttattaattacattctcaggaacagaatattaattttctgttacagaaaacagtaaatcagaagaccacaatctacgaaattcaggatgatagaggaaaaatggatgtagtggggacaggacaatgtcacaatatcccctgtgaagaaggagataagctccaacttttctgctttcgacttagaaaaaagaaccagatgtcaaaactgatttcagaaatgcatagttttatccagataaagaaaaaaacaaacccgagaaacaatgaccccaagagcatgaagctaccccaggaacagagtcagcttccaaatccttcagaggccagcacaaccttccctgagagccatcttcggactcctcagatgccaccaacaactccatccagcagtttcttcaccaagaaaagtgaagacacaatctccaaaatgaatgacttcatgaggatgcagatactgaaggaagggagtcattttccaggaccgttcatgaccagcataggcccagctgagagccatccccacactcctcagatgcctccatcaacaccaagcagcagtttcttaaccacgttgaaaccaagactgaagactgaacctgaagaagtttccatagaagacagtgcccagagtgacctcaaagaagtgatggtgctgaacgcaacagaatcatttgtatatgagcccaaagagcagaagaaaatgtttcatgccacagtggcaactgagaatgaagtcttccgagtgaaggtttttaatattgacctaaaggagaagttcaccccaaagaagatcattgccatagcaaattatgtttgccgcaatgggttcctggaggtatatcctttcacacttgtggctgatgtgaatgctgaccgaaacatggagatcccaaaaggattgattagaagtgccagcgtaactcctaaaatcaatcagctttgctcacaaactaaaggaagttttgtgaatggggtgtttgaggtacataagaaaaatgtaaggggtgaattcacttattatgaaatacaagataatacagggaagatggaagtggtggtgcatggacgactgaccacaatcaactgtgaggaaggagataaactgaaactcacctgctttgaattggcaccgaaaagtgggaataccggggagttgagatctgtaattcatagtcacatcaaggtcatcaagaccaggaaaaacaagaaagacatactcaatcctgattcaagtatggaaacttcaccagactttttcttctaaaatctggatgtcattgacgataatgtttatggagataaggtctaagtgcctaaaaaaatgtacatatacctggttgaaatacaacactatacatacacaccaccatatatactagctgttaatcctatggaatggggtattgggagtgcttttttaatttttcatagtttttttttaataaaatggcatattttgcatctacaacttctataatttgaaaaaataaataaacattatcttttttgtgaaaa

SEQ ID NO: 342712 - DNA, 2321 bp, Homo sapiens
  misc_feature (1470)..(1470): n is a, c, g, or t
gggcaaagcagagtatgaggaagccagcactagtcaagtgactctaagaagggccattttcccttgttgtctttgaaaatacttcattttcttagcatttcaggagattataacatcctgtatttcagtttctgagagctttactgactgatttccctattcaaaacaatcctcatttcctacatttctgaagatctcaagatctggactactgttgaagaaattcccagtaaggctcacttatatctttagagatggcaaataactacaagaaaattgttctactgaaaggattagaggtcatcaatgattatcattttagaattgttaagtccttactgagtaacgatttaaaacttaatccaaaaatgaaagaagagtatgacaaaattcagattgctgacttgatggaggaaaagttcccaggtgatgccggtttgggcaaactaatagaattcttcaaagaaataccaacactgggagaccttgctgaaactcttaaaagagaaaagttaaaagtcaaaggaataatcccatctaaaaagacgaaacagaaagaagtgtatcctgctacacctgcatgcaccccaagcaaccgtctcacagctaaaggagcagaggagactcttggacctcaggtaagcttcaggaagaggagcaggcttcaagtctcacagtggaagctctgctgtggctgttccactcaatctgtccagcaggcagttatttcttcatatgtttcccatcaagtttcagatttatcaaattacataataattgatcatctttctgcaaggcaacaagttaaacgctttagtaaacataatgtaaatatacataaaataaatataatattttcatctccaatagagaaggatgttaacttgagagtcagataaaaaaacgtttgcctatgtttacaaaagcctagtttcttaactgcaagtcagcatatcccaaaacacaagtaattaaggaatgatgtgtgttactttctctgctccctttttaaaaatgaaaccatctatgccatgttctttcaattggcctggggatgtacttaagtttccaagaaaaacaatttatatacaataaatatattaccttgtaatgaaaatgtgctctgcttcatttgacactgaaagtaattaacaagaaaaataaactacttgtagaaaagaaaaaaaccatctgaagaagagactggaaccaaaaggagtaagatgtccaaagagcagactcggccttcctgctctgcaggagccagcacgtccacagccatgggccgttccccacctccccagacctcatcatcagctccacccaacacttcctcaactgaggtacactcttcctggtccccttttgattcattttcttcaacccaaaatgtaggaatctgatttcatcttctactgaaaaatgacatcaatcatcagccagtaaatcaaatgtatagactgagaattnactgcattttaatcttttgcttccacaggcatatttgatgaacttgacattatctctgactgcaggaagttttctgtcctgtgctgtttggggaagagacagagaactgcggaatctggaactttcagcaacagactcactgtctactgcccccatctattatacacccattccctttgctcactaatttgttcaagtttctctgacatacaccatgctcctttttcctttaggattttcacacaccatatttctttcacctttaaactcttacctggccaaccctatccaccctctggatcccaatattgagatcttatcctcagggaatcctcacttagacccctgtaacaggttaaatcttcatggtgttctgtttcctaggaacttctttcttttctactgtttatgacaactgaagttaataagtgtttatctttcccacctactcaaagtagttccaagattagggctagtttgtaattctgtggaccactgtaaacgagggcctagttcagtgtctgcctcatgggaagcttccaataaatacctttgctcaacgaaaaaatgaaaacccagtggctcacgcctgtaatcccagcactttgggaggccgaggcaggtggattgcctgaggtcaggagtttgagactagtctggccaacatggtgaaacactatctctactaaaaatacaaaaaaattagctgggtatggtggcttacgcctataatcccagctactcaggaggctgaggcaggggaattgcttgaaccagggaggtggaggttgcagtgagctgagatcgcaccactgcactccagcctgggtgacagagcgagactccatctc

SEQ ID NO: 342713 - DNA, 130 bp, Homo sapiens
caggtcttttcccctcaaaggagaaccatttgaggatgtgaaccacattgtctggcttctggcttctctcacctgttgacttaagaaaggagataaggaattatcctttttttttttttttttttttttt

SEQ ID NO: 342714 - DNA, 176 bp, Homo sapiens
tttgttcccaaggcaaaaacaaaaatacttttaaataaaactatttctactacttataccactattacttagaataataaggctcaattaagaatatgtagcttaatacctaatgcatgcagggattaaaacctagataacaggttgataggggcagcaaaccaccatggcacacg

SEQ ID NO: 342715 - DNA, 694 bp, Homo sapiens
aatattgaaaaatgaaacaatatctcctaaaagcagtcattttgtggactggtaaatgaaaaggacaaaaagtatattctttggactgttaaatcctattaaattactgttgctacaagtcatgacgaaagagtaaaccacaaaatccaattttaacaatcactgctccactacatggagcaaaaaaatgaaatagcaaattcaaccaagcaagtcactgcacatcaccaatacctggtaatgtaaatggtatgctgagcagtcaagagcaaaatatacaaatgacacacaagagggcccaatgcgaacaagcccttttaacgttcaaaacagagaaaaataaacatatttgattaaagatctatgaatcctgttccaatgagagaattataatttaggcttaaggaaatgtctcaaatccctttctcaccccattttctggcttctcctttgtgcagactggtggaggagaaatatcaagaatatttacataatgaacaatataaagaataaaagacaatggggttccccaaagggaagagcttatctacaacatggtttaacatgcataggttagggagtgggtgtggaggttcctgcagctctgagggctaactgatgcagatcattaaccactatctccagtgtgtttttggggtatgtttggaaaggctggaaattttcattaaaaagt

SEQ ID NO: 342716 - DNA, 494 bp, Homo sapiens
cagcccaggtccgagtcacatgctacactcagtcgtcacgtcatagccatctccgtcagtctgcaactgtctctcggtctttcttggtgtttgtgaccttggcactttcgaagactacattcggcccagttgatctgtcgaaggtatttccctgtggctagattcaggtcaggtgccgctggcagtaacaacacggaggtgaggctgcgctcttttcagtgtacaccaccaggcggccgagagcttttttttatttgccattactagtaaagttcactttgataatttggtaaaggtgatgtcctccaggcatgtgcactgtgaagttcctcttttcccctttgtaattagtatgtattctgtggggaggtgctttgaggctaggtaaatattccatcctcatgaaaccttcagtttacttttactttttaaatcagtacagattcatggttcctattttattcaatcagttgaaacagctactaatgttattc

SEQ ID NO: 342717 - DNA, 175 bp, Homo sapiens
ctgggtctgtgggaggctcaggattctggtccggactggagtagaacctggggagctattggctggcctctgttatttaaagccacagaatggatgtaaaaccaaggactagcagtcatactgagacggtgaaatggtggaaattggaaccttagggagcagcactgggctggat

SEQ ID NO: 342718 - DNA, 663 bp, Homo sapiens
aagggttttacacaaggcctaacctgaactgatttcttttttaagaccattattgccttgtggagaatgggagcaggaagatcaagtaggaggatgttatattagtctaggcaagagatattggtgactgggctgaggtgtagcaattaggatggagaacaaaagatggttttgagaaatcagcaagatttgggagagggcatactaaggagaaagagagagaaatcaagaatgactgatttttgtaaatgaagtttactgacttgagtaaaaatgggaatgaagtgacattgaatgagatgggaaagtttgcaggggcagaaataaagaggtgtttgagttttgtttaggacctatctctaatatgtttttgaggattctaaagggagctgtcagttggctatataagttcaaagctagggaaatctggatgcagctaaaattatatttgagataagcatggagagctaggcaggcaacagaccacacggggtcttatagggcaagatcagaagtctagattttattctaatgccataagaagacattaaagggtttacacaaggcctaacctgaactgatttcttttttaagaccattattgccttgtggagaatgggagcaggaagtcagtagggagacatgggatcctctaggaatcac

SEQ ID NO: 342719 - DNA, 758 bp, Homo sapiens
aagggttttacacaaggcctaacctgaactgatttcttttttaagaccattattgccttgtggagaatgggagcaggaagatcaagtaggaggatgttatattagtctaggcaagagatattggtgactgggctgaggtgtagcaattaggatggagaacaaaagatggttttgagaaatcagcaagatttgggagagggcatactaaggagaaagagagagaaatcaagaatgactgatttttgtaaatgaagtttactgacttgagtaaaaatgggaatgaagtgacattgaatgagatgggaaagtttgcaggggcagaaataaagaggtgtttgagttttgtttaggacctatctctaatatgtttttgaggattctaaagggagctgtcagttggctatataagttcaaagctagggaaatctggatgcagctaaaattatatttgagataagcacaccttccatcaatatgttggctgtaattttaaaaagcatttggagtatacttgaaaatactgaaactctctatctgtagtacataccttctgttcatcagtgactaattttagggtacacaacagttgtgcaaaagaatgaagtcctcttagttgcacttcttatcaaaatcccaatggtattgttttatagaaatagaaaaaaattaaattcatatggaaccacaaaggagcccaaatagccaaagcaatcttgagaaagaagagcaaagttgaaggcatcacacttcctaacttc

SEQ ID NO: 342720 - DNA, 2115 bp, Homo sapiens
tgcttccggtctggcggtgagtggggagtgggatccgatcccgtggggctatgtaggggaagttggtggctgcagctgccgtggttttctcctggtgtccagcagaaacggcggcggcgcaaggtgtggctgggccaacccaggatctcccaggaccctccgctctgcgcgacaaggggcccgcgcttgccaaggccgacgggcaggagtgaacgtggcctccgtgggtctgcagccccgataggccaattgtacagaatttaaaccgtctctcagatgtgtacagtagaactcaagaagacagactaccaagggtcatctgaagtcgtgattgggtcactaataacaccaggacaaagttaagggatcactactcaagcataagccccagttttcataagactgctgtgaagatgtttgatataaaggcttgggctgagtatgttgtggaatgggctgcaaaggacccctatggcttccttacaaccgttattttggcccttactccactgttcctagcaagtgctgtactgtcttggaaattggccaagatgattgaggccagggagaaggagcaaaagaagaagcaaaaacgccaagaaaacattgcaaaagctaaacgactaaaaaaggattgaaggactgaacaggctttgcaaccagaggaaaatcatttggaaaattacacagctttggaagaatccactaaagtttcttctttggatttcttgacagtatgatttagtaaatgaaatttgaccaaatggaagaatcatgttagttctgacctcaatactatagtaacttttaggcgtgggtgtagaagtttataggtttctattgacagttattgtaaattagcatttactgtggtacaaattctttataactgacttagtcatttgccgcttagcagtttatatactgaaatgaaaacatcttgtggggaaaagtgactttagattatgaactcaattcaaatgaactctatttaaaatggggtcctattttggacaaaggaaattaagaatgtaaaagtcagaacagtcttgaggtaaaaagtgtgctttggcttaaaagggatacagtatattaattacatcttttattattattgtttatttcttagaatcatttctggctttctcaaaacaaaataatattaatgagtacttctatttgctgcatttttcttattacagcctttgagacagctggtaattataagtcattttccattttttaaaacataattttataaagaattctcttatctcgactatgtagaataccacctactggacagaacaatttttgtactcacaaacactgccattttcttagagatggcttgagaggagtaacactatggtttaaagcttgcagtaaaaatgccaaacactgtagtaccttggaacccagtttattcttgtgctaagcagaactgtaaaatagttaaaatgtcttatcaagtaattcgccgattacaaagacaccatttgttttttatttcattctttgttttaactcatgtggtagtgatatttaatactttctgatcaaacaggttcaaagtaaaacgttaaatttcacatttcttttaaagaactcttaaagtgtaacagttacgccatacttcataagtggtaaagaaaggtataaaatttggaaacattttgttgggcatagtagtgattgggtgaaaaggataaattatatcaaaatgagaatgtgctgtaattggaagtagggagctaaaggatgtttctttcagtttagtagaactggaacgttttactattaaacatggcttttataaatgcatggtccaataattttattcactgttagtatttaattcactgtcagcttattaatgttttctgtacccattaatgaattttaaattacaaaaaattgtctagcagctacagtttaaaaatgaaactagacattaaaataaatttgataattttttataaagaggtcctggattttttttttttttttggaggaactaacattttaagttacattatgttatgcaagttagaatttcagttacagctaagcatacttgtaaaatttcaggactgtatctctcagaacctaagg

SEQ ID NO: 342721 - DNA, 452 bp, Homo sapiens
tttttcccgtatgtcaatgaactaaaaaaattttattattgaaataagtaacttagtaaaatacttgatttccagtaattaggattttcttacagggcatttgcaattgtaaattcaaatgaggaagaaacgtattaagttactataccggataggcaattttagatgtcatataggttgcatatatacaatatagaaattttccatttaaaattttattacaattatcctgaaattgtgacttaaattttgttttattttttgtattctttccaactagccaattgtacagaatttaaaccgtctctcagatgtgtacagtagaactcaagaagacagactaccaagggtcatctgaagtcgtgattgggtcactaataacaccaggacaaagttaagggatcactactcaagcataaggtagatgatttttttaaaaaaattccagttga

SEQ ID NO: 342722 - DNA, 2018 bp, Homo sapiens
tttttcccgtatgtcaatgaactaaaaaaattttattattgaaataagtaacttagtaaaatacttgatttccagtaattaggattttcttacagggcatttgcaattgtaaattcaaatgaggaagaaacgtattaagttactataccggataggcaattttagatgtcatataggttgcatatatacaatatagaaattttccatttaaaattttattacaattatcctgaaattgtgacttaaattttgttttattttttgtattctttccaactagccaattgtacagaatttaaaccgtctctcagatgtgtacagtagaactcaagaagacagactaccaagggtcatctgaagtcgtgattgggtcactaataacaccaggacaaagttaagggatcactactcaagcataagccccagttttcataagactgctgtgaagatgtttgatataaaggcttgggctgagtatgttgtggaatgggctgcaaaggacccctatggcttccttacaaccgttattttggcccttactccactgttcctagcaagtgctgtactgtcttggaaattggccaagatgattgaggccagggagaaggagcaaaagaagaagcaaaaacgccaagaaaacattgcaaaagctaaacgactaaaaaaggattgaaggactgaacaggctttgcaaccagaggaaaatcatttggaaaattacacagctttggaagaatccactaaagtttcttctttggatttcttgacagtatgatttagtaaatgaaatttgaccaaatggaagaatcatgttagttctgacctcaatactatagtaacttttaggcgtgggtgtagaagtttataggtttctattgacagttattgtaaattagcatttactgtggtacaaattctttataactgacttagtcatttgccgcttagcagtttatatactgaaatgaaaacatcttgtggggaaaagtgactttagattatgaactcaattcaaatgaactctatttaaaatggggtcctattttggacaaaggaaattaagaatgtaaaagtcagaacagtcttgaggtaaaaagtgtgctttggcttaaaagggatacagtatattaattacatcttttattattattgtttatttcttagaatcatttctggctttctcaaaacaaaataatattaatgagtacttctatttgctgcatttttcttattacagcctttgagacagctggtaattataagtcattttccattttttaaaacataattttataaagaattctcttatctcgactatgtagaataccacctactggacagaacaatttttgtactcacaaacactgccattttcttagagatggcttgagaggagtaacactatggtttaaagcttgcagtaaaaatgccaaacactgtagtaccttggaacccagtttattcttgtgctaagcagaactgtaaaatagttaaaatgtcttatcaagtaattcgccgattacaaagacaccatttgttttttatttcattctttgttttaactcatgtggtagtgatatttaatactttctgatcaaacaggttcaaagtaaaacgttaaatttcacatttcttttaaagaactcttaaagtgtaacagttacgccatacttcataagtggtaaagaaaggtataaaatttggaaacattttgttgggcatagtagtgattgggtgaaaaggataaattatatcaaaatgagaatgtgctgtaattggaagtagggagctaaaggatgtttctttcagtttagtagaactggaacgttttactattaaacatggcttttataaatgcatggtccaataattttattcactgttagtatttaattcactgtcagcttattaatgttttctgtacccattaatgaattttaaattacaaaaaattgtctagcagctacagtttaaaaatgaaactagacattaaaataaatttgataattttttataaa

SEQ ID NO: 342723 - DNA, 1983 bp, Homo sapiens
tgcttccggtctggcggtgagtggggagtgggatccgatcccgtggggctatgtaggggaagttggtggctgcagctgccgtggttttctcctggtgtccagcagaaacggcggcggcgcaaggtgtggctgggccaacccaggatctcccaggaccctccgctctgcgcgacaaggggcccgcgcttgccaaggccgacgggcaggagtgaacgtggcctccgtgggtctgcagccccgataggccaattgtacagaatttaaaccgtctctcagatgtgtacagtagaactcaagaagacagactaccaagggtcatctgaagtcgtgattgggtcactaataacaccaggacaaagttaagggatcactactcaagcataagccccagttttcataagactgctgtgaagatgtttgatataaaggcttgggctgagtatgttgtggaatgggctgcaaaggacccctatggcttccttacaaccgttattttggcccttactccactgttcctagcaagtgctgtactgtcttggaaattggccaagatgattgaggccagggagaaggagcaaaagaagaagcaaaaacgccaagaaaacattgcaaaagctaaacgactaaaaaaggattgaaggactgaacaggctttgcaaccagaggaaaatcatttggaaaattacacagctttggaagaatccactaaagtttcttctttggatttcttgacagtatgatttagtaaatgaaatttgaccaaatggaagaatcatgttagttctgacctcaatactatagtaacttttaggcgtgggtgtagaagtttataggtttctattgacagttattgtaaattagcatttactgtggtacaaattctttataactgacttagtcatttgccgcttagcagtttatatactgaaatgaaaacatcttgtggggaaaagtgactttagattatgaactcaattcaaatgaactctatttaaaatggggtcctattttggacaaaggaaattaagaatgtaaaagtcagaacagtcttgaggtaaaaagtgtgctttggcttaaaagggatacagtatattaattacatcttttattattattgtttatttcttagaatcatttctggctttctcaaaacaaaataatattaatgagtacttctatttgctgcatttttcttattacagcctttgagacagctggtaattataagtcattttccattttttaaaacataattttataaagaattctcttatctcgactatgtagaataccacctactggacagaacaatttttgtactcacaaacactgccattttcttagagatggcttgagaggagtaacactatggtttaaagcttgcagtaaaaatgccaaacactgtagtaccttggaacccagtttattcttgtgctaagcagaactgtaaaatagttaaaatgtcttatcaagtaattcgccgattacaaagacaccatttgttttttatttcattctttgttttaactcatgtggtagtgatatttaatactttctgatcaaacaggttcaaagtaaaacgttaaatttcacatttcttttaaagaactcttaaagtgtaacagttacgccatacttcataagtggtaaagaaaggtataaaatttggaaacattttgttgggcatagtagtgattgggtgaaaaggataaattatatcaaaatgagaatgtgctgtaattggaagtagggagctaaaggatgtttctttcagtttagtagaactggaacgttttactattaaacatggcttttataaatgcatggtccaataattttattcactgttagtatttaattcactgtcagcttattaatgttttctgtacccattaatgaattttaaattacaaaaaattgtctagcagctacagtttaaaaatgaaactagacattaaaataaatttgataattttttataaa

SEQ ID NO: 342724 - DNA, 2382 bp, Homo sapiens
tgcttccggtctggcggtgagtggggagtgggatccgatcccgtggggctatgtaggggaagttggtggctgcagctgccgtggttttctcctggtgtccagcagaaacggcggcggcgcaaggtgtggctgggccaacccaggatctcccaggaccctccgctctgcgcgacaaggggcccgcgcttgccaaggccgacgggcaggagtgaacgtggcctccgtgggtctgcagccccgataggccaattgtacagaatttaaaccgtctctcagatgtgtacagtagaactcaagaagacagactaccaagggtcatctgaagtcgtgattgggtcactaataacaccaggacaaagttaagggatcactactcaagcataagccccagttttcataagactgctgtgaagatgtttgatataaaggcttgggctgagtatgttgtggaatgggctgcaaaggacccctatggcttccttacaaccgttattttggcccttactccactgttcctagcaagtgctgtactgtcttggaaattggccaagatgattgaggccagggagaaggagcaaaagaagaagcaaaaacgccaagaaaacattgcaaaagctaaacgactaaaaaaggattgaaggactgaacaggctttgcaaccagaggaaaatcatttggaaaattacacagctttggaagaatccactaaagtttcttctttggatttcttgacagtatgatttagtaaatgaaatttgaccaaatggaagaatcatgttagttctgacctcaatactatagtaacttttaggcgtgggtgtagaagtttataggtttctattgacagttattgtaaattagcatttactgtggtacaaattctttataactgacttagtcatttgccgcttagcagtttatatactgaaatgaaaacatcttgtggggaaaagtgactttagattatgaactcaattcaaatgaactctatttaaaatggggtcctattttggacaaaggaaattaagaatgtaaaagtcagaacagtcttgaggtaaaaagtgtgctttggcttaaaagggatacagtatattaattacatcttttattattattgtttatttcttagaatcatttctggctttctcaaaacaaaataatattaatgagtacttctatttgctgcatttttcttattacagcctttgagacagctggtaattataagtcattttccattttttaaaacataattttataaagaattctcttatctcgactatgtagaataccacctactggacagaacaatttttgtactcacaaacactgccattttcttagagatggcttgagaggagtaacactatggtttaaagcttgcagtaaaaatgccaaacactgtagtaccttggaacccagtttattcttgtgctaagcagaactgtaaaatagttaaaatgtcttatcaagtaattcgccgattacaaagacaccatttgttttttatttcattctttgttttaactcatgtggtagtgatatttaatactttctgatcaaacaggttcaaagtaaaacgttaaatttcacatttcttttaaagaactcttaaagtgtaacagttacgccatacttcataagtggtaaagaaaggtataaaatttggaaacattttgttgggcatagtagtgattgggtgaaaaggataaattatatcaaaatgagaatgtgctgtaattggaagtagggagctaaaggatgtttctttcagtttagtagaactggaacgttttactattaaacatggcttttataaatgcatggtccaataattttattcactgttagtatttaattcactgtcagcttattaatgttttctgtacccattaatgaattttaaattacaaaaaattgtctagcagctacagtttaaaaatgaaactagacattaaaataaatttgataattttttataaaaaaaaaaagaaaaaaaaaaaaaagaaaaaaaaaaaaaaaaaaaaaaaaaaagaaacaaaaaaaaaaaagggggggggggggaaaaaaccccgcgggggggggcatagaggaccctttttggatgaagagggggcccccaagagagggacggctaacaaaaaggacaaaacaacagggaggggcggaaaaacaccaaggggggaggaggaaacaacatgcatcctggtgacatcctgggaagagcacaccccccactcgcgggggcgggaacaatagggggcccaacccacagcaacaaaatgagccgcccggggaaaaaaaaccgggggtttacggcgtcgacacacgcgaaatcctgccccgcaagagtcgcccgccaaaagaaattaggggatgatc

SEQ ID NO: 342725 - DNA, 1948 bp, Homo sapiens
tgcttccggtctggcggtgagtggggagtgggatccgatcccgtggggctatgtaggggaagttggtggctgcagctgccgtggttttctcctggtgtccagcagaaacggcggcggcgcaaggtgtggctgggccaacccaggatctcccaggaccctccgctctgcgcgacaaggggcccgcgcttgccaaggccgacgggcaggagtgaacgtggcctccgtgggtctgcagccccgataggccaattgtacagaatttaaaccgtctctcagatgtgtacagtagaactcaagaagacagactaccaagggtcatctgaagtcgtgattgggtcactaataacaccaggacaaagttaagggatcactactcaagcataagatataaaggcttgggctgagtatgttgtggaatgggctgcaaaggacccctatggcttccttacaaccgttattttggcccttactccactgttcctagcaagtgctgtactgtcttggaaattggccaagatgattgaggccagggagaaggagcaaaagaagaagcaaaaacgccaagaaaacattgcaaaagctaaacgactaaaaaaggattgaaggactgaacaggctttgcaaccagaggaaaatcatttggaaaattacacagctttggaagaatccactaaagtttcttctttggatttcttgacagtatgatttagtaaatgaaatttgaccaaatggaagaatcatgttagttctgacctcaatactatagtaacttttaggcgtgggtgtagaagtttataggtttctattgacagttattgtaaattagcatttactgtggtacaaattctttataactgacttagtcatttgccgcttagcagtttatatactgaaatgaaaacatcttgtggggaaaagtgactttagattatgaactcaattcaaatgaactctatttaaaatggggtcctattttggacaaaggaaattaagaatgtaaaagtcagaacagtcttgaggtaaaaagtgtgctttggcttaaaagggatacagtatattaattacatcttttattattattgtttatttcttagaatcatttctggctttctcaaaacaaaataatattaatgagtacttctatttgctgcatttttcttattacagcctttgagacagctggtaattataagtcattttccattttttaaaacataattttataaagaattctcttatctcgactatgtagaataccacctactggacagaacaatttttgtactcacaaacactgccattttcttagagatggcttgagaggagtaacactatggtttaaagcttgcagtaaaaatgccaaacactgtagtaccttggaacccagtttattcttgtgctaagcagaactgtaaaatagttaaaatgtcttatcaagtaattcgccgattacaaagacaccatttgttttttatttcattctttgttttaactcatgtggtagtgatatttaatactttctgatcaaacaggttcaaagtaaaacgttaaatttcacatttcttttaaagaactcttaaagtgtaacagttacgccatacttcataagtggtaaagaaaggtataaaatttggaaacattttgttgggcatagtagtgattgggtgaaaaggataaattatatcaaaatgagaatgtgctgtaattggaagtagggagctaaaggatgtttctttcagtttagtagaactggaacgttttactattaaacatggcttttataaatgcatggtccaataattttattcactgttagtatttaattcactgtcagcttattaatgttttctgtacccattaatgaattttaaattacaaaaaattgtctagcagctacagtttaaaaatgaaactagacattaaaataaatttgataattttttataaa

SEQ ID NO: 342726 - DNA, 1929 bp, Homo sapiens
tgcttccggtctggcggtgagtggggagtgggatccgatcccgtggggctatgtaggggaagttggtggctgcagctgccgtggttttctcctggtgtccagcagaaacggcggcggcgcaaggtgtggctgggccaacccaggatctcccaggaccctccgctctgcgcgacaaggggcccgcgcttgccaaggccgacgggcaggagtgaacgtggcctccgtgggtctgcagccccgataggccaattgtacagaatttaaaccgtctctcagatgtgtacagtagaactcaagaagacagactaccaagggtcatctgaagtcgtgattgggtcactaataacaccaggacaaagttaagggatcactactcaagcataagccccagttttcataagactgctgtgaagatgtttgatataaaggcttgggctgagtatgttgtggaatgggctgcaaaggacccctatggcttccttacaaccgttattttggcccttactccactgttcctagcaagtgctgtactgtcttggaaattggccaagatgattgaggccagggagaaggagcaaaagaagaagcaaaaacgccaagaaaacattgcaaaagctaaacgactaaaaaaggattgaaggactgaacaggctttgcaaccagaggaaaatcatttggaaaattacacagctttggaagaatccactaaagtttcttctttggatttcttgacagtatgatttagtaaatgaaatttgaccaaatggaagaatcatgttagttctgacctcaatactatagtaacttttaggcgtgggtgtagaagtttataggtttctattgacagttattgtaaattagcatttactgtggtacaaattctttataactgacttagtcatttgccgcttagcagtttatatactgaaatgaaaacatcttgtggggaaaagtgactttagattatgaactcaattcaaatgaactctatttaaaatggggtcctattttggacaaaggaaattaagaatgtaaaagtcagaacagtcttgaggtaaaaagtgtgctttggcttaaaagggatacagtatattaattacatcttttattattattgtttatttcttagaatcatttctggctttctcaaaacaaaataatattaatgagtacttctatttgctgcatttttcttattacagcctttgagacagctggtaattataagtcattttccattttttaaaacataattttataaagaattctcttatctcgactatgtagaataccacctactggacagaacaatttttgtactcacaaacactgccattttcttagagatggcttgagaggagtaacactatggtttaaagcttgcagtaaaaatgccaaacactgtagtaccttggaacccagtttattcttgtgctaagcagaactgtaaaatagttaaaatgtcttatcaagtaattcgccgattacaaagacaccatttgttttttatttcattctttgttttaactcatgtggtagtgatatttaatactttctgatcaaacaggttcaaagtaaaacgttaaatttcacatttcttttaaagaactcttaaagtgtaacagttacgccatacttcataagtggtaaagaaaggtataaaatttggaaacattttgttgggcatagtagtgattgggtgaaaaggataaattatatcaaaatgagaatgtgctgtaattggaagtagggagctcttttataaatgcatggtccaataattttattcactgttagtatttaattcactgtcagcttattaatgttttctgtacccattaatgaattttaaattacaaaaaattgtctagcagctacagtttaaaaatgaaactagacattaaaataaatttgataattttttataaa

SEQ ID NO: 342727 - DNA, 541 bp, Homo sapiens
tgcttccggtctggcggtgagtggggagtgggatccgatcccgtggggctatgtaggggaagttggtggctgcagctgccgtggttttctcctggtgtccagcagaaacggcggcggcgcaaggtgtggctgggccaacccaggatctcccaggaccctccgctctgcgcgacaaggggcccgcgcttgccaaggccgacgggcaggagtgaacgtggcctccgtgggtctgcagccccgataggccaattgtacagaatttaaaccgtctctcagatgtgtacagtagaactcaagaagacagactaccaagggtcatctgaagtcgtgattgggtcactaataacaccaggacaaagttaagggatcactactcaagcataagccccagttttcataagactgctgtgaagatgtttgatataaaggcttgggctgagtatgttgtggaatgggctgcaaaggacccttggtagtctgtcttcttgagttctactgtacacatctgagagacggtttaaattctgtacaattggcctat

SEQ ID NO: 342728 - DNA, 225 bp, Homo sapiens
caacatggagaaaccccatctctactaaaaacacaaaattagccgggcgtggtggagaatcacttgaacccaggctggagtgcagtggcacaatcagggctcactgcagcctccatctcccaggctcaggtgatcctttgctgggcgtccttgtcatagagaagcagtattttttttttttaaaacctcatcactattatctttatacttcagaagcaaactaag

SEQ ID NO: 342729 - DNA, 324 bp, Homo sapiens
gttgcagtgagctgagatcacaccactgcactccagactccagcctggagtgctggagaacagagtgagactccatctcaaacaacaacaacaacaacaacaaaccctgagatgtcttcacatcatacttcgtacaaaaacctaaagtggccaggcacagtggctcacgcctgtaatcccatcactttgggaggccgaggcgggtggatcacgaggtcaggagttcaagaccagcctggccaacacagcgaaactccatctctactaaaaatacagaaattagccaggcatggtgacgcgtgcctgtagtcccagctacttggg

SEQ ID NO: 342730 - DNA, 516 bp, Homo sapiens
tcctgccccatgtctcctgcgtgagccatccaaaatagtctagaacctgtcaatgtggatatttcatttaattcttgagttagatagtatcagcttgtattttatcattaaaagaaactgagtttcagagaagttaagtcatttggacaagatcaataggaagccgagtcaaacgtaggtctaacaagcaaacccattctgtttccccataccaactgcctccctaaatttctggcgtgtctggccgggtgcggtgactcatatctgtaatcccagcactttgggaggccaaggtgggtagatcacgaagtcaggagatcgagaccatcctggctaacatggtgaaaccccatctctactaaaaatacaaaaaattagccggacgtggtggcgggtgcctgtagtcccacctactcaggaggctgaggcaggagaatggcatgaacctgggaggcggagcttgcagtgagccaagattgcaccactgcactccagcctgggcgacagagggagact

SEQ ID NO: 342731 - DNA, 488 bp, Homo sapiens
ctcaaagccccaagggtactgaataattgcagtcatttaaggagcacctccacttgtgccaggcactgagcactttacatatagcatctcctgtaatcctcacagtgtccccctgaggtgggtgccctcatcatcccagtttacagaggaggaaactgagggttggggaggttgaagaagttgactagaaagtaacagagcaggagtcttcctgactgcagaacccatgttcttaactcctatgctacaatgcttctccaaaggcctcatccaacaagcattcaaaagtcctgggcactttggagggcaagctgactctctgacccagccatttcccttctagaatttaatcagccacataagtgcagaaacagccacataagtgcacaaatacctatggacaaagatatctacaacagctctgtctgtaatagtaaaaaattgaaaacaatgcaaatggggaattaaatgctttatggtttgttcat

SEQ ID NO: 342732 - DNA, 484 bp, Homo sapiens
aaattgtacccagagtaacctatgtatgcctctgcatatatgcactatctggggaaagggtccacaacccttagcaagtttcaggttttcgaagggcccataaaagctaagaagtaccgacctgtattaactttcatacctttatgttctggctcatatacgatgttatgtgctcaaaaggacaagctgggcaacataaagcctcttctcccccttgttctgccaacaaggattccatctagtgctgaaagaaaggacctctggagtcagacccaggcctaaatcctggctccatccattactatgcaatttggggcaattaattaacaaccaagcttcagtgtccacaacacaaactgaggtgagtaaaacctgcttcatagagttgttgtaaggagtaaacaaaatcccttgcgccaagcatctagcaggcacagtaggtactgctatgcacctgtgcccttggtttccttaagttctggcc

SEQ ID NO: 342733 - DNA, 573 bp, Homo sapiens
caccctgaaagtcgtgaactgcagttgggcttcccagtctgaacgttgtggtgtggttccccacatgctttgaatatagaaagtagcccactgcctgaatagtccagggccactgatacactgcaggtggcatttggtggcataaaaagagatgaagcaaaataacgcacgttggtagattgcttcctttgtgaatcaggtgttcagtaacaagttttaatgagatcctgagctgaatgaatcattcctaaagcaaaccatgctgggctgtatgtatctgagtgtatggagagatttaaatgtgaaaaggcctgagtcttgtctgcgagggctcagggtgcaggtgcacagcgtctcagcatacccaggtctctagatgtacagagttagatattacagcattttagacctaagtatagcgtcatgcgctcaggtcctcagtcatcctcatgcccacaagccctctgcatttacagatgagcaaataggatatccaggggctctctctaggcctgcagagctcatcacatgaatccggctggctcagggcgaggtgggtgagccccctgctcc

SEQ ID NO: 342734 - DNA, 568 bp, Homo sapiens
cctcaattacccttgacaattctcttaagttcaccctttaagtacactttaccatatgaacagctcacaatggtggccaatatacaatcccctccaacattcaagcaccatactaaacaggtagtttacagttaaagaccaagtgtacaaaaaagtacatcatttttcttgctcctatgccattccacctccataatccctcatttaaaacccatcaatatctgcccactctgctgaagataaaattcaaaatatctaacatggcctagaatgtcttatatgatttgataccttgcagcctcatctcccattgcatctcactttctacatgacagcccaccaggcctttcatttcccaaaatacactctttcctccttgcagaccatttgcaaaatgctactccctcaatctactctctcttcccttttctccctttctcttacataaggcttagtcatcctttggatctctacagaaacgtcatgtccttagggaagccttctcaatccagcccttccctacactatgttaggggtctccctgccatgcgtgtacacttaagcacac

SEQ ID NO: 342735 - DNA, 504 bp, Homo sapiens
gaaaatgatagcagatggaaatttggttctactcaaaggaatgaaaagtaccaggaatgataagataactaagagggcaaatatgaaagacttttgccgttgtaaaaatgtacttaaattgtttaaagcaaagatataacattatattgtaagatttattaaagtacatggaaataaaatgtatgacaatagcacaaaggatgagaggggagaaatggaaatatactattgtatggttcatacattttatgtcaagtgttatatatttttttgacccagagtctcactgtgtcacccaggctggagtgcagtggcacgatctcagctttctgcagcgtctgcttcctgggttcaagcaattctcgtgcctcagcctcccaagcagctgggattacaggtgtgcgccaccacacccagctaatttctttgtatttttagtagagatagggtttcaccatgttgcccaggttgctctggaactcttgacctcaagtgatctgcctg

SEQ ID NO: 342736 - DNA, 590 bp, Homo sapiens
gggtagcatgctgtatgggtgtgggcaccagagccacaactgttcctggccacaggcactgagcagctgggatcatggcattgtagtcacccatgtgagcatggtggaatgacagtggagcctcaagagtggacaaatgaagtggctactggtcccctgagcagagcactcaagcactggctccaatttcaagatggcaccatactatagcagcttgggtcatggggtggtgagggtacacacattgttcattctctggagcattgcagcttcatggaaattccttgaggctctacaaactgggctcagggcctatgagtactgtagaattctatcagagaaggactgcatgtgcctgcagtggtaatggggactgttgggggcctatggcttacgttttccccacaaggggaagtgcctcctggctcaaagtgggagacagggcagcagagtcagggtgttttgctccccctctatgccgtcatcctgggttgccatactccatggggaattggccactcgctttctgcgctctatcactttccttcagaggctctagtcaaattttagttgtctgttctttttggtcc

SEQ ID NO: 342737 - DNA, 795 bp, Homo sapiens
ccagcagcctcaacaggcacagctcctccctcacagtggcccatttaggcccaacttatgactgtgaggccatttccaggcctagtgcctgcctcgtggctgactcttgaagcccaaaacttcctcaaatcaggcttttgcccaacttctgtctactgtcggactctacaggtcagcctctgcctcacagtggaccctccagacccagatggtgtctcactgtggcatcctcaggtgaagctcctgcctttcggcagcctctccaggcccagctcctcctgcctcccagtggcctctttcggcccagcccagctcatgcctcccggcggccttcccaagccccgcttttgactttcggtggcctctgcaggcctcgacaaggcccagcctcctgcctcccgaaggcctgcacaggcccagcctctgcctcacagcggactctccacgcccagctagctgttgcttcactcgtcgcgaccgtccccggagttcgcatacatgcgtcccttgaccttgccttccggctccgccttacgggtgccaagagatccctacgccttgccccttgtctcctgggcccaagttgtgccgcgtgctgtgctagcggcgcctattcgtggcccgctttgccctatgcttcgtgcacctacatctgtgagcgtctcgcacaccctgcgactcaacgtttctactgttccttgggtcccagtgccgcgattggcctcctgggtgtgttcctcacgcatatcctgcgctacaagcgttcttgttgcgctctttcctcaaagtattcgg

SEQ ID NO: 342738 - DNA, 233 bp, Homo sapiens
acccagcctcagctcggcctgccactcctgcctcccagccttctctccaggccctgaactttctcaagttgacctcaccaggcccagctcatgcttctttgcagcctctccaggcccagctcctgcatcttggtgcccctccaggcccacccggcctcatctccagcctcatctccatccctactccagcacctcagtctccagcctcatctcagccctcatcccagctgcta

SEQ ID NO: 342739 - DNA, 110 bp, Homo sapiens
cacagcagattcttcacgcccagcttctacctcactgtggaccccccaagccaagctcccaacctttcagcagcttctacacacccagctcctgccacccagtggcctct

SEQ ID NO: 342740 - DNA, 662 bp, Homo sapiens
ccagcagcctcaacaggcacagctcctccctcacagtggcccatttaggcccaacttatgactgtgaggccatttccaggcctagtgcctgcctcgtggctgactcttgaagcccaaaacttcctcaaatcaggcttttgcccaacttctgtctactgtcggactctacaggtcagcctctgcctcacagtggaccctccagacccagatggtgtctcactgtggcatcctcaggtgaagctcctgcctttcggcagcctctccaggcccagctcctcctgcctcccagtggcctctttcggcccagcccagctcatgcctcccggcggccttcccaagccccgcttttgactttcggtggcctctgcaggcctcgacaaggcccagcctcctgcctcccgaaggcctgcacaggcccagcctctgcctcacagcggactctccacgcccagctagctgttgcttcactgcggacctcccgagtccaaagctccctgcctctcggccgcttcggcaggcccagctcccgcctgccagtggcctcttcaggcccatggggctcattcctgacaacggcctttccaggcccagtttttcccttccagcggcctctccgggcccagaacctcctcaagtcggcctctccagacccacttgcaccc

SEQ ID NO: 342741 - DNA, 242 bp, Homo sapiens
tcatgactctcaatggcctatttaggcccataccctacgtcacggcagcctccgcagatgaggctactgcctcacaacagcctccacaggcacagctccatcgttacaatggcctctttagacccagctcctgcctcccagccttctctccaggccctgaactttctcaagttgacctcaccaggcccagctcatgcttctttgcagcctctccaggcccagctcctgcatcttggtgcccc

SEQ ID NO: 342742 - DNA, 100 bp, Homo sapiens
tacagagaatttagcagttgaatggcaaggaaaacttctgcctatcaaaacactgcaaacagcgctctctctttttctctcttaccccttccagttcttc

SEQ ID NO: 342743 - DNA, 716 bp, Homo sapiens
ttccatgactccgataacacgaatttgctttttctgtcatattctcacaagctcctcagtctttctgtttttaattctattttctatgttgttgtatacgctgagtaatatgtattattctatcttctagtgcatagattatttcctctgtcccattcattctgctgttaagtctatctctgaatgtatttttatttttctggttcaatttctctcataaaagctctgaactttttatttcaattactgagtcagttataaaaattctaatttaaaaaaattattggctgggagcggggtagggatatggcaggtacgataatgtaaggaaaggcaaagaggtgaaaattagcaagttgtgaacaatagcagtgaccagtgcaggtcagtttcaggtccctggcattcaggttgggaatggcaggatgggaggttgggcagtggagctgggagcagctctcagagggccttgcatggctttctaaggagctcaaacattttccagtaggtgatggcctgcatgagggctttaagcaggggagcaaaatggtcacgtttgcatttttttattatttctagaaggcactatagatggatgagtctggtggttgtgagaggccatgtctgaaggtcaggaggtcagtgaggagtgagggctgactagcctgggccggtgaggatggagaggaggagagggagtagagagctgttggggg

SEQ ID NO: 342744 - DNA, 216 bp, Homo sapiens
gcatcaagttcatatgtgatggaatcgtagggtatgatgtgatggaaaggtttttggctaggcgactgaataaatgctggtcctgtttaccaaaatagtgtggaagaggatcatgcttaagggtgagtgtcggaggcctgggtacagataattgagttcaggatatatcaagtttggggtttttaaagacatcaaattggaggtgtccggtcagat

SEQ ID NO: 342745 - DNA, 349 bp, Homo sapiens
tgcagtgttggaatcaaggctcactgcagcctcaagcggccttcccacctcagcgtcctaagtagatgggactaccggtgcacaccatcacacctggccaatttttaaaaaattggctgggatcacaggcatgcaccaccatgccaagctaatttttgtgtttttagtagagacagggtttcactatgttgtccaggctgttgaactcctgacctcaagtgatccaccctccttggcttcccaaagtgctgggaatacaggcatgagccaccgcgcctgacctttttttttttttttttcacattttatagcttttctttgttttttaagttaggaattcagtgtggaa

SEQ ID NO: 342746 - DNA, 181 bp, Homo sapiens
acccagaggaagaaaggattcatttcctaccattgaatttataggttttatgcaaatgtaacacctcaggcaaggaaaattctatcgtcctgcctcctgactcctctacccacctctgctcttacaatggattttctaaaaggcaattttgatcagacctctcctcaaaggtagcccacaa

SEQ ID NO: 342747 - DNA, 625 bp, Homo sapiens
acatttctttttgtgttgatgtttaaatcttttattattagtctcatattctccctcaagactcagaattctagtactcctaatgaacatttatgtccgttgggcagtcctgctgccatcctaagctacacatactgggaatggaactcaatcatcttttctttgcaaatcagtgtctcttaccaatttctttcattctgtttacccagtcttctaggtttgaaattttggggttgtttttaggattttgtattgccttcattttcttaattaatcagagtccttctagttctagtctagaaatatgtttcatatctgccattcatgttccactatgattttgactgtcttgcagttcctgataattttatgaatagattaatataatgctgtttaacttattttctatatgcttaattcattctagacatagctggaagacagatcttaaattataactttttttttcctatatgttattcaatgaagaataaacctagtttagtatttcacttggtaaagtgtagtacgtcatgcatgaattgcagcatcaggatcacttgtgatatttgccagaggtggccatcccacatcacctaaatcaaatctctgggcatggattctg

SEQ ID NO: 342748 - DNA, 129 bp, Homo sapiens
tctccaaaaagactatactaatttatacttaaaacagtgcaggagaaatttgatttttcctcatttttataaccatgatcagcaaaaaatgttatttcattgattgattgatttttttttttaagtcag

SEQ ID NO: 342749 - DNA, 487 bp, Homo sapiens
aattaatattgccacattattttaaattatgtacaaagacctaacatgtcactcagggaccatttcacccactgctctatttagccgccagtctcttcagcaatggtgagggtttggtgtacacattatttcatcacccaggtaataagcatagcacccgacaggtagtttttcggtcctcaccctcctcccatcttaccctcaagtaggccctgctgtttgttgttcccttttttgtgtcaatgtgtagtcaatgttcagctcccacctataagtgagaacctgtggtgtctggttttctgtccctgcattagttcacttaggatagtggcttccagctccatctatgttgctgcaaaagacattatcttgttcctttttatggctgtgtagtattccatggtgtatatataccacattttctgtctttctccttccttccttccttccttcattccttctctctctctctctttctttctttcag

SEQ ID NO: 342750 - DNA, 279 bp, Homo sapiens
ctaatggagctgcctgggtaggagatgccggtgcggggtggggaggaggagggaggtacatccttctctgtatggggtgagaagtaaggaagtatacagcataacttttggagatactgctaactccacagcttcttctagaacccagctaaggctagaattcagctaaaacacattttactgagctacttccctttttccatctgccttctaacacttctttacaacatttcttgagtgcaaccctcaattgattaattcacaagaatcttggactct

SEQ ID NO: 342751 - DNA, 405 bp, Homo sapiens
tgctccccagaacctggactacaaatgggacaaagggggctcttggtaaaaagcctgggagaccagaaaaaggctgtgcaacacaacaaggaaactggagcctagaggaaaacgcaggaagactaaggagggaaaagaagagggcggggcacaggggagagacagacagaagggagccagagagggcagaaagagaggcaggccgaaaccgtctgtataaatggataaatctggtaaattcagagaattgctctttccacagattgactcagagctgtgaaagttcatctccacgcaggcaccacatttgtttttaccacgtgccccaacagtttcagtgctctacaaccagtgtttcctaatttcttggcttaagttgcttaagtgaaggagtttctcatttct

SEQ ID NO: 342752 - DNA, 439 bp, Homo sapiens
gagacacaggatctcgggtgactgcccactttagttccccaaagtccccctaaaaataaaggcacttcaagggaatttagacaacctttaagtcctttaagtgagcaacagatacttatctgatcataataataagtgtgaagatgatgtataggggccgggtgcggtggctcacgcctgtaatcctagcactttgggaggccgaggccggtagatcacctgaggtcaagagttcaagaccagcctgaccaatgtggtgaaaccccgtctctaccaaaaatacaaaaattagctgggcgtggtggcacatgcctctaatcccagctacttgggaggctgaggcaggagaattgcttgaacctgggaggtggaggttgcaatgagccgagatcatgccactgcactccagcctgggcaacagagtgagactccatctcat

SEQ ID NO: 342753 - DNA, 710 bp, Homo sapiens
ctttggtgtggctgtccactcaaggggctgaactctaagcggaaagcatcagagtgcagggcgctaagcattcagctagccctcacaggccctcacgccaggaaggaactcactgccttcctacaaagaccaagaggtacctgggaggagctctgccagagctggaagtttgagacctaaagttagcatcagggcccctgagaaaaggaaggagactggagcaaaccgtgacccttatgagctgaattatgcttccccctagaattcatatgttgaagccccaacccctagtaccctagaatgtgactgtacttggagatagggtctttaaggaggtaattaagtacaattaggtcatcagggtaagccctaatccaatctgactggtgttcttttaatgaagaagagaaaatttggacacacagagagacaccagggatgcaggtgcacagaggaactaccaggggaggacaaagcattgtgaaagtggttgtctgcaagccagggggagaggtctcaggttaaaccatccctaatggccccttggtcttggactttcagcagtgcaactgtgagaaaataaatttctgttagttatttaagcccctaagtccatagtattttgtcacggcagcctgagcagaccaaccacctctggagagatgggggtcaaaggattgcccagactgaatttccatcaacagagggca

SEQ ID NO: 342754 - DNA, 407 bp, Homo sapiens
atgcacaagttcaaagggatgaatagagaagatttcacagaataggtggcattgacaggtgcataggatttcaatagggagaaattaaggagagaaaacattccaggctgaataaatgagcaatggcgtaaaactaaggaagtataagtcatgtacagggaacttcaaatggttgagtttacttagattttatttagaaaatgcgtagatgaatagaggaaatgagaatataaaagccgatgggtcgcaggcataaaggtcctaggcagtgggaagccatgggaggctttttagccaggagtttcccctcagagcaatctgctgataaaaatctgttagtggtgtgcaggaaggatgaagggactccaggtagctgtaatttatgcatacagtggtagtggtgggag

SEQ ID NO: 342755 - DNA, 465 bp, Homo sapiens
accagtaacaaataaagagattgaagaggtaattaaaaacgttccaacgaagaaaaccccaggaccagatggcttcacagctgaattctgccaaacattcaaagaacaattattaccaatacttcttaaattcttccaaaaaaaaaaataataataaagctagagggaatacttccaaaaactttttatgaggccagcatcaccttgatactgaagcttgacaaagataccacaagaaaagaaaaagtacaggccaatattgctgatgaatattaattcaattctcaataaagtattgcagactgaattcaacaatgcattcaaaagattacgtaatgtgaccagggggatttatccttggcatgcaaggctggtttggcatatacaaataaatcattgtaatatgtcacattaacagaatgaaagatagaaaccacatctaaattgacatagaaaaagcatttg

SEQ ID NO: 342756 - DNA, 380 bp, Homo sapiens
tcctgccttgttttgtctcctctctcctgcatgtaacaagtgagagtagagattttggagtatttttacgagtctgtatttccagagtctaggatagtgcctgggacataggagtgcttaaaaaaagatgagcgacgttaagaatccttgagaaaacctaatggaatgatattaccagtgaccaaaaggtgaatacattttctttttaatggagcatatttgtttttttttttaattttaaaattaaataatattttaaccttattttcgcctctcatcaaatgggcttttctggatctagatacagatattatttactcctgattgtgtcatgcatgtttgaaaccactgctaaggaggtagcaggtatagttaaaggg

SEQ ID NO: 342757 - DNA, 316 bp, Homo sapiens
accagcctgggtgacagaggaagactctgtctcaaaaaacaaaacaaaacaaaaaaaaacactaacatggtgaaagactcatcccaacaatttttcactacagtagctgaggtacatcatgcactacacacatacttgattctttcttccagacgttgccttgtgaattggattttgaactgtgctcctgccatggccttaagaatgaccaagaagtccttgtggcttgatgacatctgatgtctttgagactcacacagcaggcagttggcaaggcagcgggcttactcacacaggcaggggttccacgagtcac

SEQ ID NO: 342758 - DNA, 562 bp, Homo sapiens
agtgtggtagctcatgcctgtaatcccagcactttgggaggctgaggcaggtggatcacgaggtaaggagattgagaccatcctggctaacacggtgaaaccccatctctactaaaaaatacaaaaaaattagctgggtgtggtggcgggcacctgtagtcccagctacttgggaggctgaggcgggagaatggcttgaacccgggaggcggagcttgcagagaaccgagatcgtgccactgcactccagcctgggtgacagagtgagactccgtctcaaaaactgtttctctgaagctgaaatcagatctgagagctaataggagaattttgttttgagaactatgcggtccacattattcctgtttagagaccagtgtttgcttaatggcttgggcctgtttttgcaattactcagcattttcctcactaaaaaacctttaatatactcaacaatcattggtaaatgagacctctttttcttttctagctgagacattgcatattcttttaacatttccaacactgatagttttctgtccttgtgtatccttgtagtttc

SEQ ID NO: 342759 - DNA, 456 bp, Homo sapiens
cctggccaagattgattgattctttgtctgtctgtctttctgtctttccttgtctttctttccttctctgtcactgcactccagcctgggtgacagagtgagactccgtctcaaaaaaaaaaaaaaatgtgttcctgtctttgcttgttatacagttttgtaaaatcctatctgtttctgtttctctgaagctgaaatcagatctgagagctaataggagaattttgttttgagaactatgcggtccacattattcctgtttagagaccagtgtttgcttaatggcttgggcctgtttttgcaattactcagcattttcctcactaaaaaacctttaatatactcaacaatcattggtaaatgagacctctttttcttttctagctgagacattgcatattcttttaacatttccaacactgatagttttctgtccttgtgtatccttgtagtttc

SEQ ID NO: 342760 - DNA, 685 bp, Homo sapiens
attatttaatgtaatggcaactccacgggggaggacaaagaaaaaagcatcttttgatcattctccggatagccttcctttgaggagctccggtaggcaggcgaagaagaaagcaacagagacaacagatgaggatgaagatggtggctcagagaagaagtacaggaaatgtgaaaaggcaggctgtacggcaacatgtcctgtgtgctttgcaagtgcttctgaaagatgtgccaaaaatggctacacctcccgatggtatcatctctcctgtggggaacatttctgtaatgaatgctttgaccattactacagaagccataaggatggatatgacaaatatactacatggaaaaaaatatggactagcaatggcaaaaccgaacctagtcccaaagctttcatggcagaccagcaactcccctactgggttcagtgtacaaaacctgagtgtagaaaatggaggcagcttaccaaggaaatccagcttactccacagatagccaagacttatcgatgcggtatgaaaccaaatactgctattaagcctgagacctcagatcattgttccctcccagaggatctatagtcatcatgagaaggctctgatttgatgactccatgttaagtcaactctggaacagtatcacgtatttgaagactgaaaataactgcttttgttcag

SEQ ID NO: 342761 - DNA, 679 bp, Homo sapiens
attatttaatgtaatggcaactccacgggggaggacaaagaaaaaagcatcttttgatcattctccggatagccttcctttgaggagctccggtaggcaggcgaagaagaaagcaacagagacaacagatgaggatgaagatggtggctcagagaagaagtacaggaaatgtgaaaaggcaggctgtacggcaacatgtcctgtgtgctttgcaagtgcttctgaaagatgtgccaaaaatggctacacctcccgatggtatcatctctcctgtggggaacatttctgtaatgaatgctttgaccattactacagaagccataaggatggatatgacaaatatactacatggaaaaaaatatggactagcaatggcaaaaccgaacctagtcccaaagctttcatggcagaccagcaactcccctactgggttcagtgtacaaaacctgagtgtagaaaatggaggcagcttaccaaggaaatccagcttactccacagatagccaagacttatcgatgcggtatgaaaccaaatactgctattaagagacggggttttgctgtcttgcccagggtgaggcccttgattgattctggaactcaactttaagagttgaaggcctctctgagaagaggaagagaaaagagaaaatgggaaggagctgacatgagggcgtgg

SEQ ID NO: 342762 - DNA, 384 bp, Homo sapiens
tgctttgcaagtgcttctgaaaggtctgtttagatgtgtgtcttggcctcccatttctgcttgtgagaagttctttgtggaaacatcatccttgtagatagttttcctaaagatagatacagatactataagtcatctaatctaataatagagacattgcccagacattctgtacacaccacaccctcctcaaggccctccctacttatccctagcctactgggagaggccacacccatgtcaattttgcaacacagtgtcctcaaatccagccaaccatatctacctctccaagggttgagggtgggatggtgtatgtcgtggtgagacagtagagagaactcatgagctttctgtagacaccagtgtttgtttacttttcgt

SEQ ID NO: 342763 - DNA, 381 bp, Homo sapiens
ggactacaggtgtgtgccactgtgcttcactaatttttgtatttttttttttttttaatagagacggggttttgctgtcttgcccagggtgaggcccttgattgattctggaactcaactttaagagttgaaggcctctctgagaagaggaagagaaaagagaaaatgggaaggagctgacatgagggcgtgggcagttcatttccaggctgcgtggctgcactgatgggagctgggaactgagcaatgaaaataccatgaacaggcagaggggagcgtgtccagcttgcaggaacaatatcttggttgcactaaacttaactacctgtgtcccagattacttgacaatgaaaagttgactcagtggcatttcattataat

SEQ ID NO: 342764 - DNA, 360 bp, Homo sapiens
  misc_feature (349)..(349): n is a, c, g, or t
  misc_feature (359)..(359): n is a, c, g, or t
cgcaaatttccttccactcgaaatttccttccactcgacaggcagatgaatcagagaccaatagaagctgggaagtggggtgggattgtgatccgtggaatggtgcagtctaaatgttgtttattcactgtctgcaaaaagaaaaacgcacacactgagattaggtgttagaaacttttatagcagtttggcgtggctgtaataattgttgtgtgtgttagataactaggtaaaaagagtagaggccatcacactcctgttgctggtggcgtgagctatgtagaagtactatgcacaatacgagtggaaggaaatttcgggggatcctggagattcccaatagcaggcnagcctccctng

SEQ ID NO: 342765 - DNA, 589 bp, Homo sapiens
gacattgcccttgttctaatgaaggtactttcaattatggctcacagcagcctcaatctccgggacccaagcaatcctcccacctaggcctcccaaagtgctggggttacaggtgtgagccactgtgcccagcctaatgagagtacatgttaatggggaaaactaatatgtaaagattaacagataaatgattattacaagacaaaacaagaaaggattatgaaggaaatacacaggcagatgaatcagagaccaatagaagctgggaagtggggtgggattgtgatccgtggaatggtgcagtctaaatgttgtttattcactgtctgcaaaaagaaaaacgcacacactgagattaggtgttagaaacttttatagcagtttggcgtggctgtaataattgttgtgtgtgttagataactaggtaaaaagagtagaggccatcacactcctgttgctggtggcgtgagctatgtagaagtactatgcacaatagaaccatgttccaacttggaatattttagtttgtcaactgtaagccaaatgtgtacataatccaaaatttatttctttcattaaaagctaattt

SEQ ID NO: 342766 - DNA, 268 bp, Homo sapiens
ggcagctgggcccccagcagcgggcgctctaccgggatgtgatgctggagaactatgggaacgtggcctctctgggattccctgtccctaagccggagttgatctcccagctggagcaggggaaggaactttgggtcctgaatcttctgggagctgaggaaccagatatcttgaaaagctgccagaaagattctgaggttgggaccaagaaggaactatctattttaaaccaaaaattttccgaagaagtaaaaaccccagaatttgt

SEQ ID NO: 342767 - DNA, 576 bp, Homo sapiens
tatcacagagtaaacatacccatataatcactacttagagtggtatggaccaaatatttgtgtgtcctaatattcatatgttgaaatcctaatccccaatgtgacagtattagggaatgaatcctccattcatgagatggagtcctcatgaatgggattagtgaactcataaaagagacctcagagagttatgtagctctctttctgccatgtgaggatacaatgagaagtaggcagtctgcagcctagaagacagctctcactagaactgaccatgctggcaccctgattttggatttccagcctccagaatgatgagaaatgaatttctgttaatttgtaagccacccagtttatggtactttaatatagcagcccaaactaagagagagggtggacaatttttttcaacaaagggtcagatagtaagtatgttagcctttgcagttcatataatctctgtggcagctactcagctttgcagttgtagcacaaaagtaaccttagacaatatgtaaacaaatgagcgtggctgtgtttcaataaagctctttctggacaataattttcacatgc

SEQ ID NO: 342768 - DNA, 366 bp, Homo sapiens
gtccatgtgccaaatgttatgtatatttctggacaaaggatgcatgcctgcaaatagacccaaaaacaactatgactccaaaaagcttgagtctccatggtgaaaaattatgagcctatgttcacagaagttgctgcagaatcccatatagcaataattcattttcttctctggacgaatttaccacctggtgggaagatggcagttgagactaggaagactgccactcttaattcttatacatctttctagaaactgaagttgaattcttctactcgtagtgcaagtcaaagataactctttttattatctcactgtcagactagctaaaaataagatgcatatactgtgcttaagatcaacagt

SEQ ID NO: 342769 - DNA, 232 bp, Homo sapiens
tggaaaacatcaaaatgaaaccaataatgcctcctcaggaagctgaccgtcgggaaggatgaatagcaattcagtctacaaatatttcctgaacacttctggctggaaaccttggaccaattaatgactatgctgtagacagcacatacagacagtgctggctgcagtctgggcaagtgaggctcctgcctggccaggacaggaaggctgacccagaggctcaactctctct

SEQ ID NO: 342770 - DNA, 524 bp, Homo sapiens
gaacagatttaactaaggaggtgaaagacccctacaaggaaaactacaaaacatagataaaagaaatcgaagagggcacaaagggaaagacatcccatgctcacggactggaagagctattattgttaaaatgactacactgccaaagcaatctaaagattcagtacaacccctatcaagatatcaatgccatttttcacagaaatagaaaaaaaaaagtcctaaaatgattgtggaaccaaaagagtccaaagagctaacacaacccgagcaaaaacaaagctggcagcatcacactacctgacttcaaaatataaggttatagtaaccaaaaacagcatggtattggtataaaaacaggcacacagaataatggaacagaatagagaacccagaaataaatccacatatttatagctaactgatttttttacaaaggtgccaagaacatacattggaaaatggataccttcttcaataaatagtgctgggaaaatacagaagaatgaaactggacctctgcc

SEQ ID NO: 342771 - DNA, 3759 bp, Homo sapiens
ggctcgggactgtgttaagaaccaagggcatataaagacagatgggaggagaccctggccggggagaggaagaagcatctacataggtactaagtaccattcgctaattcagcttagagaactatcaacacaggacaatgcaagcccatgagctgttccggtattttcgaatgccagagctggttgacttccgacagtacgtgcgtactcttccgaccaacacgcttatgggcttcggagcttttgcagcactcaccaccttctggtacgccacgagacccaaacccctgaagccgccatgcgacctctccatgcagtcagtggaagtggcgggtagtggtggtgcacgaagatccgcactacttgacagcgacgagcccttggtgtatttctatgatgatgtcacaacattatacgaaggtttccagaggggaatacaggtgtcaaataatggcccttgtttaggctctcggaaaccagaccaaccctatgaatggctttcatataaacaggttgcagaattgtcggagtgcataggctcagcactgatccagaagggcttcaagactgccccagatcagttcattggcatctttgctcaaaatagacctgagtgggtgattattgaacaaggatgctttgcttattcgatggtgatcgttccactttatgatacccttggaaatgaagccatcacgtacatagtcaacaaagctgaactctctctggtttttgttgacaagccagagaaggccaaactcttattagagggtgtagaaaataagttaataccaggccttaaaatcatagttgtcatggatgcctacggcagtgaactggtggaacgaggccagaggtgtggggtggaagtcaccagcatgaaggcgatggaggacctgggaagagccaacagacggaagcccaagcctccagcacctgaagatcttgcagtaatttgtttcacaagtggaactacaggcaaccccaaaggagcaatggtcactcaccgaaacatagtgagcgattgttcagcttttgtgaaagcaacagagaatacagtcaatccttgcccagatgatactttgatatctttcttgcctctcgcccatatgtttgagagagttgtagagtgtgtaatgctgtgtcatggagctaaaatcggatttttccaaggagatatcaggctgctcatggatgacctcaaggtgcttcaacccactgtcttccccgtggttccaagactgctgaaccggatgtttgaccgaattttcggacaagcaaacaccacgctgaagcgatggctcttggactttgcctccaagaggaaagaagcagagcttcgcagcggcatcatcagaaacaacagcctgtgggaccggctgatcttccacaaagtacagtcgagcctgggcggaagagtccggctgatggtgacaggagccgccccggtgtctgccactgtgctgacgttcctcagagcagccctgggctgtcagttttatgaaggatacggacagacagagtgcactgccgggtgctgcctaaccatgcctggagactggaccgcaggccatgttggggccccgatgccgtgcaatttgataaaacttgttgatgtggaagaaatgaattacatggctgccgagggcgagggcgaggtgtgtgtgaaagggccaaatgtatttcagggctacttgaaggacccagcgaaaacagcagaagctttggacaaagacggctggttacacacaggggacattggaaaatggttaccaaatggcaccttgaaaattatcgaccggaaaaagcacatatttaagctggcacaaggagaatacatagcccctgaaaagattgaaaatatctacatgcgaagtgagcctgttgctcaggtgtttgtccacggagaaagcctgcaggcatttctcattgcaattgtggtaccagatgttgagacattatgttcctgggcccaaaagagaggatttgaagggtcgtttgaggaactgtgcagaaataaggatgtcaaaaaagctatcctcgaagatatggtgagacttgggaaggattctggtctgaaaccatttgaacaggtcaaaggcatcacattgcaccctgaattattttctatcgacaatggccttctgactccaacaatgaaggcgaaaaggccagagctgcggaactatttcaggtcgcagatagatgacctctattccactatcaaggtttagtgtgaagaagaaagctcagaggaaatggcacagttccacaatctcttctcctgctgatggccttcatgttgttaattttgaatacagcaagtgtagggaaggaagcgttcgtgtttgacttgtccattcggggttcttctcataggaatgctagaggaaacagaacactgccttacagtcacctcatgttgcagaccatgtttatggtaatacacactttccaaaatgagccttaaaaattgtaaaggggatactataaatgtgctaagttatttgagacttcctcagtttaaaaagtgggttttaaatcttctgtctccctgtttttctaatcaaggggttaggactttgctatctctgagatgtctgctacttgctgcaaattctgcagctgtctgctgctctaaagagtacagtgcactagagggaagtgttccctttaaaaataagaacaactgtcctggctggagaatctcacaagcggaccagagatctttttaaatccctgctactgtcccttctcacaggcattcacagaacccttctgattcgtaagggttacgaaactcatgttcttctccagtcccctgtggtttctgttggagcataaggtttccagtaagcgggagggcagatccaactcagaaccatgcagataaggagcctctggcaaatgggtgctcatcagaacgcgtggattctctttcatggcagaatgctcttggactcggttctccaggcctgattccccgactccatcctttttcaggggttatttaaaaatctgccttagattctatagtgaagacaagcatttcaagaaagagttacctggatcagccatgctcagctgtgacgcctgaataactgtctactttatcttcactgaaccactcactctgtgtaaaggccaacagatttttaatgtggttttcatatcaaaagatcatgttgggattaacttgcctttttccccaaaaaataaactctcaggcaagcatttctttaaagctattaagggagtatatacttgagtacttattgaaatggacagtaataagcaaatgttcttataatgctacctgatttctatgaaatgtgtttgacaagccaaaattctaggatgtagaaatctggaaagttcatttcctgggattcacttctccagggattttttaaagttaatttgggaaattaacagcagttcactttattgtgagtctttgccacatttgactgaattgagctgtcatttgtacatttaaagcagctgttttggggtctgtgagagtacatgtattatatacaagcacaacagggcttgcactaaagaattgtcattgtaataacactacttggtagcctaacttcatatatgtattcttaattgcacaaaaagtcaataatttgtcaccttggggttttgaatgtttgctttaagtgttggctatttctatgttttataaaccaaaacaaaatttccaaaaacaatgaaggaaaccaaaataaatatttctgcatttca

SEQ ID NO: 342772 - DNA, 3305 bp, Homo sapiens
tcgagcgcgttaccgactgcatctgtgcctcaaccctatgaatgtttcatataaacaggttgcagaattgtcggagtgcataggctcagcactgatccagaagggcttcaagactgccccagatcagttcattggcatctttgctcaaaatagacctgagtgggtgattattgaacaaggatgctttgcttattcgatggtgatcgttccactttatgatacccttggaaatgaagccatcacgtacatagtcaacaaagctgaactctctctggtttttgttgacaagccagagaaggccaaactcttattagagggtgtagaaaataagttaataccaggccttaaaatcatagttgtcatggatgcctacggcagtgaactggtggaacgaggccagaggtgtggggtggaagtcaccagcatgaaggcgatggaggacctgggaagagccaacagacggaagcccaagcctccagcacctgaagatcttgcagtaatttgtttcacaagtggaactacaggcaaccccaaaggagcaatggtcactcaccgaaacatagtgagcgattgttcagcttttgtgaaagcaacagagaatacagtcaatccttgcccagatgatactttgatatctttcttgcctctcgcccatatgtttgagagagttgtagagtgtgtaatgctgtgtcatggagctaaaatcggatttttccaaggagatatcaggctgctcatggatgacctcaaggtgcttcaacccactgtcttccccgtggttccaagactgctgaaccggatgtttgaccgaattttcggacaagcaaacaccacgctgaagcgatggctcttggactttgcctccaagaggaaagaagcagagcttcgcagcggcatcatcagaaacaacagcctgtgggaccggctgatcttccacaaagtacagtcgagcctgggcggaagagtccggctgatggtgacaggagccgccccggtgtctgccactgtgctgacgttcctcagagcagccctgggctgtcagttttatgaaggatacggacagacagagtgcactgccgggtgctgcctaaccatgcctggagactggaccgcaggccatgttggggccccgatgccgtgcaatttgataaaacttgttgatgtggaagaaatgaattacatggctgccgagggcgagggcgaggtgtgtgtgaaagggccaaatgtatttcagggctacttgaaggacccagcgaaaacagcagaagctttggacaaagacggctggttacacacaggggacattggaaaatggttaccaaatggcaccttgaaaattatcgaccggaaaaagcacatatttaagctggcacaaggagaatacatagcccctgaaaagattgaaaatatctacatgcgaagtgagcctgttgctcaggtgtttgtccacggagaaagcctgcaggcatttctcattgcaattgtggtaccagatgttgagacattatgttcctgggcccaaaagagaggatttgaagggtcgtttgaggaactgtgcagaaataaggatgtcaaaaaagctatcctcgaagatatggtgagacttgggaaggattctggtctgaaaccatttgaacaggtcaaaggcatcacattgcaccctgaattattttctatcgacaatggccttctgactccaacaatgaaggcgaaaaggccagagctgcggaactatttcaggtcgcagatagatgacctctattccactatcaaggtttagtgtgaagaagaaagctcagaggaaatggcacagttccacaatctcttctcctgctgatggccttcatgttgttaattttgaatacagcaagtgtagggaaggaagcgttcgtgtttgacttgtccattcggggttcttctcataggaatgctagaggaaacagaacactgccttacagtcacctcatgttgcagaccatgtttatggtaatacacactttccaaaatgagccttaaaaattgtaaaggggatactataaatgtgctaagttatttgagacttcctcagtttaaaaagtgggttttaaatcttctgtctccctgtttttctaatcaaggggttaggactttgctatctctgagatgtctgctacttgctgcaaattctgcagctgtctgctgctctaaagagtacagtgcactagagggaagtgttccctttaaaaataagaacaactgtcctggctggagaatctcacaagcggaccagagatctttttaaatccctgctactgtcccttctcacaggcattcacagaacccttctgattcgtaagggttacgaaactcatgttcttctccagtcccctgtggtttctgttggagcataaggtttccagtaagcgggagggcagatccaactcagaaccatgcagataaggagcctctggcaaatgggtgctcatcagaacgcgtggattctctttcatggcagaatgctcttggactcggttctccaggcctgattccccgactccatcctttttcaggggttatttaaaaatctgccttagattctatagtgaagacaagcatttcaagaaagagttacctggatcagccatgctcagctgtgacgcctgaataactgtctactttatcttcactgaaccactcactctgtgtaaaggccaacagatttttaatgtggttttcatatcaaaagatcatgttgggattaacttgcctttttccccaaaaaataaactctcaggcaagcatttctttaaagctattaagggagtatatacttgagtacttattgaaatggacagtaataagcaaatgttcttataatgctacctgatttctatgaaatgtgtttgacaagccaaaattctaggatgtagaaatctggaaagttcatttcctgggattcacttctccagggattttttaaagttaatttgggaaattaacagcagttcactttattgtgagtctttgccacatttgactgaattgagctgtcatttgtacatttaaagcagctgttttggggtctgtgagagtacatgtattatatacaagcacaacagggcttgcactaaagaattgtcattgtaataacactacttggtagcctaacttcatatatgtattcttaattgcacaaaaagtcaataatttgtcaccttggggttttgaatgtttgctttaagtgttggctatttctatgttttataaaccaaaacaaaatttccaaaaacaatgaaggaaaccaaaataaatatttctgcatttca

SEQ ID NO: 342773 - DNA, 3791 bp, Homo sapiens
ccgcgggagggcggggccggcgcggcgagcgcaccagcagcatcctggctcagccgcggcggtggcgggggcgcaaccagcgggccgaggcggcggcgccagcggcgccttaaatagcatccagagccggcgcggggcagggagtgggctgcagtgacagccggcggcggagcggccggtccacggaggagaattcagcttagagaactatcaacacaggacaatgcaagcccatgagctgttccggtattttcgaatgccagagctggttgacttccgacagtacgtgcgtactcttccgaccaacacgcttatgggcttcggagcttttgcagcactcaccaccttctggtacgccacgagacccaaacccctgaagccgccatgcgacctctccatgcagtcagtggaagtggcgggtagtggtggtgcacgaagatccgcactacttgacagcgacgagcccttggtgtatttctatgatgatgtcacaacattatacgaaggtttccagaggggaatacaggtgtcaaataatggcccttgtttaggctctcggaaaccagaccaaccctatgaatggctttcatataaacaggttgcagaattgtcggagtgcataggctcagcactgatccagaagggcttcaagactgccccagatcagttcattggcatctttgctcaaaatagacctgagtgggtgattattgaacaaggatgctttgcttattcgatggtgatcgttccactttatgatacccttggaaatgaagccatcacgtacatagtcaacaaagctgaactctctctggtttttgttgacaagccagagaaggccaaactcttattagagggtgtagaaaataagttaataccaggccttaaaatcatagttgtcatggatgcctacggcagtgaactggtggaacgaggccagaggtgtggggtggaagtcaccagcatgaaggcgatggaggacctgggaagagccaacagacggaagcccaagcctccagcacctgaagatcttgcagtaatttgtttcacaagtggaactacaggcaaccccaaaggagcaatggtcactcaccgaaacatagtgagcgattgttcagcttttgtgaaagcaacagagaatacagtcaatccttgcccagatgatactttgatatctttcttgcctctcgcccatatgtttgagagagttgtagagtgtgtaatgctgtgtcatggagtgcttcaacccactgtcttccccgtggttccaagactgctgaaccggatgtttgaccgaattttcggacaagcaaacaccacgctgaagcgatggctcttggactttgcctccaagaggaaagaagcagagcttcgcagcggcatcatcagaaacaacagcctgtgggaccggctgatcttccacaaagtacagtcgagcctgggcggaagagtccggctgatggtgacaggagccgccccggtgtctgccactgtgctgacgttcctcagagcagccctgggctgtcagttttatgaaggatacggacagacagagtgcactgccgggtgctgcctaaccatgcctggagactggaccgcaggccatgttggggccccgatgccgtgcaatttgataaaacttgttgatgtggaagaaatgaattacatggctgccgagggcgagggcgaggtgtgtgtgaaagggccaaatgtatttcagggctacttgaaggacccagcgaaaacagcagaagctttggacaaagacggctggttacacacaggggacattggaaaatggttaccaaatggcaccttgaaaattatcgaccggaaaaagcacatatttaagctggcacaaggagaatacatagcccctgaaaagattgaaaatatctacatgcgaagtgagcctgttgctcaggtgtttgtccacggagaaagcctgcaggcatttctcattgcaattgtggtaccagatgttgagacattatgttcctgggcccaaaagagaggatttgaagggtcgtttgaggaactgtgcagaaataaggatgtcaaaaaagctatcctcgaagatatggtgagacttgggaaggattctggtctgaaaccatttgaacaggtcaaaggcatcacattgcaccctgaattattttctatcgacaatggccttctgactccaacaatgaaggcgaaaaggccagagctgcggaactatttcaggtcgcagatagatgacctctattccactatcaaggtttagtgtgaagaagaaagctcagaggaaatggcacagttccacaatctcttctcctgctgatggccttcatgttgttaattttgaatacagcaagtgtagggaaggaagcgttcgtgtttgacttgtccattcggggttcttctcataggaatgctagaggaaacagaacactgccttacagtcacctcatgttgcagaccatgtttatggtaatacacactttccaaaatgagccttaaaaattgtaaaggggatactataaatgtgctaagttatttgagacttcctcagtttaaaaagtgggttttaaatcttctgtctccctgtttttctaatcaaggggttaggactttgctatctctgagatgtctgctacttgctgcaaattctgcagctgtctgctgctctaaagagtacagtgcactagagggaagtgttccctttaaaaataagaacaactgtcctggctggagaatctcacaagcggaccagagatctttttaaatccctgctactgtcccttctcacaggcattcacagaacccttctgattcgtaagggttacgaaactcatgttcttctccagtcccctgtggtttctgttggagcataaggtttccagtaagcgggagggcagatccaactcagaaccatgcagataaggagcctctggcaaatgggtgctcatcagaacgcgtggattctctttcatggcagaatgctcttggactcggttctccaggcctgattccccgactccatcctttttcaggggttatttaaaaatctgccttagattctatagtgaagacaagcatttcaagaaagagttacctggatcagccatgctcagctgtgacgcctgaataactgtctactttatcttcactgaaccactcactctgtgtaaaggccaacagatttttaatgtggttttcatatcaaaagatcatgttgggattaacttgcctttttccccaaaaaataaactctcaggcaagcatttctttaaagctattaagggagtatatacttgagtacttattgaaatggacagtaataagcaaatgttcttataatgctacctgatttctatgaaatgtgtttgacaagccaaaattctaggatgtagaaatctggaaagttcatttcctgggattcacttctccagggattttttaaagttaatttgggaaattaacagcagttcactttattgtgagtctttgccacatttgactgaattgagctgtcatttgtacatttaaagcagctgttttggggtctgtgagagtacatgtattatatacaagcacaacagggcttgcactaaagaattgtcattgtaataacactacttggtagcctaacttcatatatgtattcttaattgcacaaaaagtcaataatttgtcaccttggggttttgaatgtttgctttaagtgttggctatttctatgttttataaaccaaaacaaaatttccaaaaacaatgaaggaaaccaaaataaatatttctgcatttca

SEQ ID NO: 342774 - DNA, 3439 bp, Homo sapiens
ccgcgggagggcggggccggcgcggcgagcgcaccagcagcatcctggctcagccgcggcggtggcgggggcgcaaccagcgggccgaggcggcggcgccagcggcgccttaaatagcatccagagccggcgcggggcagggagtgggctgcagtgacagccggcggcggagcggccggtccacggaggagggtagtggtggtgcacgaagatccgcactacttgacagcgacgagcccttggtgtatttctatgatgatgtcacaacattatacgaaggtttccagaggggaatacaggtgtcaaataatggcccttgtttaggctctcggaaaccagaccaaccctatgaatggctttcatataaacaggttgcagaattgtcggagtgcataggctcagcactgatccagaagggcttcaagactgccccagatcagttcattggcatctttgctcaaaatagacctgagtgggtgattattgaacaaggatgctttgcttattcgatggtgatcgttccactttatgatacccttggaaatgaagccatcacgtacatagtcaacaaaggacctgggaagagccaacagacggaagcccaagcctccagcacctgaagatcttgcagtaatttgtttcacaagtggaactacaggcaaccccaaaggagcaatggtcactcaccgaaacatagtgagcgattgttcagcttttgtgaaagcaacagagaatacagtcaatccttgcccagatgatactttgatatctttcttgcctctcgcccatatgtttgagagagttgtagagtgtgtaatgctgtgtcatggagctaaaatcggatttttccaaggagatatcaggctgctcatggatgacctcaaggtgcttcaacccactgtcttccccgtggttccaagactgctgaaccggatgtttgaccgaattttcggacaagcaaacaccacgctgaagcgatggctcttggactttgcctccaagaggaaagaagcagagcttcgcagcggcatcatcagaaacaacagcctgtgggaccggctgatcttccacaaagtacagtcgagcctgggcggaagagtccggctgatggtgacaggagccgccccggtgtctgccactgtgctgacgttcctcagagcagccctgggctgtcagttttatgaaggatacggacagacagagtgcactgccgggtgctgcctaaccatgcctggagactggaccgcaggccatgttggggccccgatgccgtgcaatttgataaaacttgttgatgtggaagaaatgaattacatggctgccgagggcgagggcgaggtgtgtgtgaaagggccaaatgtatttcagggctacttgaaggacccagcgaaaacagcagaagctttggacaaagacggctggttacacacaggggacattggaaaatggttaccaaatggcaccttgaaaattatcgaccggaaaaagcacatatttaagctggcacaaggagaatacatagcccctgaaaagattgaaaatatctacatgcgaagtgagcctgttgctcaggtgtttgtccacggagaaagcctgcaggcatttctcattgcaattgtggtaccagatgttgagacattatgttcctgggcccaaaagagaggatttgaagggtcgtttgaggaactgtgcagaaataaggatgtcaaaaaagctatcctcgaagatatggtgagacttgggaaggattctggtctgaaaccatttgaacaggtcaaaggcatcacattgcaccctgaattattttctatcgacaatggccttctgactccaacaatgaaggcgaaaaggccagagctgcggaactatttcaggtcgcagatagatgacctctattccactatcaaggtttagtgtgaagaagaaagctcagaggaaatggcacagttccacaatctcttctcctgctgatggccttcatgttgttaattttgaatacagcaagtgtagggaaggaagcgttcgtgtttgacttgtccattcggggttcttctcataggaatgctagaggaaacagaacactgccttacagtcacctcatgttgcagaccatgtttatggtaatacacactttccaaaatgagccttaaaaattgtaaaggggatactataaatgtgctaagttatttgagacttcctcagtttaaaaagtgggttttaaatcttctgtctccctgtttttctaatcaaggggttaggactttgctatctctgagatgtctgctacttgctgcaaattctgcagctgtctgctgctctaaagagtacagtgcactagagggaagtgttccctttaaaaataagaacaactgtcctggctggagaatctcacaagcggaccagagatctttttaaatccctgctactgtcccttctcacaggcattcacagaacccttctgattcgtaagggttacgaaactcatgttcttctccagtcccctgtggtttctgttggagcataaggtttccagtaagcgggagggcagatccaactcagaaccatgcagataaggagcctctggcaaatgggtgctcatcagaacgcgtggattctctttcatggcagaatgctcttggactcggttctccaggcctgattccccgactccatcctttttcaggggttatttaaaaatctgccttagattctatagtgaagacaagcatttcaagaaagagttacctggatcagccatgctcagctgtgacgcctgaataactgtctactttatcttcactgaaccactcactctgtgtaaaggccaacagatttttaatgtggttttcatatcaaaagatcatgttgggattaacttgcctttttccccaaaaaataaactctcaggcaagcatttctttaaagctattaagggagtatatacttgagtacttattgaaatggacagtaataagcaaatgttcttataatgctacctgatttctatgaaatgtgtttgacaagccaaaattctaggatgtagaaatctggaaagttcatttcctgggattcacttctccagggattttttaaagttaatttgggaaattaacagcagttcactttattgtgagtctttgccacatttgactgaattgagctgtcatttgtacatttaaagcagctgttttggggtctgtgagagtacatgtattatatacaagcacaacagggcttgcactaaagaattgtcattgtaataacactacttggtagcctaacttcatatatgtattcttaattgcacaaaaagtcaataatttgtcaccttggggttttgaatgtttgctttaagtgttggctatttctatgttttataaaccaaaacaaaatttccaaaaacaatgaaggaaaccaaaataaatatttctgcatttca

SEQ ID NO: 342775 - DNA, 3792 bp, Homo sapiens
ccgcgggagggcggggccggcgcggcgagcgcaccagcagcatcctggctcagccgcggcggtggcgggggcgcaaccagcgggccgaggcggcggcgccagcggcgccttaaatagcatccagagccggcgcggggcagggagtgggctgcagtgacagccggcggcggagcggccggtccacggaggagaattcagcttagagaactatcaacacaggacaatgcaagcccatgagctgttccggtattttcgaatgccagagctggttgacttccgacagtacgtgcgtactcttccgaccaacacgcttatgggcttcggagcttttgcagcactcaccaccttctggtacgccacgagacccaaacccctgaagccgccatgcgacctctccatgcagtcagtggaagtggcgggtagtggtggtgcacgaagatccgcactacttgacagcgacgagcccttggtgtatttctatgatgatgtcacaacattatacgaaggtttccagaggggaatacaggtgtcaaataatggcccttgtttaggctctcggaaaccagaccaaccctatgaatggctttcatataaacaggttgcagaattgtcggagtgcataggctcagcactgatccagaagggcttcaagactgccccagatcagttcattggcatctttgctcaaaatagacctgagtgggtgattattgaacaaggatgctttgcttattcgatggtgatcgttccactttatgatacccttggaaatgaagccatcacgtacatagtcaacaaagctgaactctctctggtttttgttgacaagccagagaaggccaaactcttattagagggtgtagaaaataagttaataccaggccttaaaatcatagttgtcatggatgcctacggcagtgaactggtggaacgaggccagaggtgtggggtggaagtcaccagcatgaaggcgatggaggacctgggaagagccaacagacggaagcccaagcctccagcacctgaagatcttgcagtaatttgtttcacaagtggaactacaggcaaccccaaaggagcaatggtcactcaccgaaacatagtgagcgattgttcagcttttgtgaaagcaacagagaatacagtcaatccttgcccagatgatactttgatatctttcttgcctctcgcccatatgtttgagagagttgtagagtgtgtaatgctgtgtcatggagctaaaatcggatttttccaaggagatatcaggctgctcatggatgacctcaaggtgcttcaacccactgtcttccccgtggttccaagactgctgaaccggatgtttgaccgaattttcggacaagcaaacaccacgctgaagcgatggctcttggactttgcctccaagaggaaagaagcagagcttcgcagcggcatcatcagaaacaacagcctgtgggaccggctgatcttccacaaagtacagtcgagcctgggcggaagagtccggctgatggtgacaggagccgccccggtgtctgccactgtgctgacgttcctcagagcagccctgggctgtcagttttatgaaggatacggacagacagagtgcactgccgggtgctgcctaaccatgcctggagactggaccgcaggccatgttggggccccgatgccgtgcaatttgataaaacttgttgatgtggaagaaatgaattacatggctgccgagggcgagggcgaggtgtgtgtgaaagggccaaatgtatttcagggctacttgaaggacccagcgaaaacagcagaagctttggacaaagacggctggttacacacaggggacattggaaaatggttaccaaatggcaccttgaaaattatcgaccggaaaaagcacatatttaagctggcacaaggagaatacatagcccctgaaaagattgaaaatatctacatgcgaagtgagcctgttgctcaggtgtttgtccacggagaaagcctgcaggcatttctcattgcaattgtggtaccagatgttgagacattatgttcctgggcccaaaagagaggatttgaagggtcgtttgaggaactgtgcagaaataaggatgtcaaaaaagctatcctcgaagatatggtgagacttgggaaggattctggtctgaaaccatttgaacaggtcaaaggcatcacattgcaccctgaattattttctatcgacaatggccttctgactccaacaatgaaggcgaaaaggccagagctgcggaactatttcaggtcgcagatagatgacctctattccactatcaaggtttagtgtgaagaagaaagctcagaggaaatggcacagttccacaatctcttctcctgctgatggccttcatgttgttaattttgaatacagcaagtgtagggaaggaagcgttcgtgtttgacttgtccattcggggttcttctcataggaatgctagaggaaacagaacactgccttacagtcacctcatgttgcagaccatgtttatggtaatacacactttccaaaatgagccttaaaaattgtaaaggggatactataaatgtgctaagttatttgagacttcctcagtttgactttgctatctctgagatgtctgctacttgctgcaaattctgcagctgtctgctgctctaaagagtacagtgcactagagggaagtgttccctttaaaaataagaacaactgtcctggctggagaatctcacaagcggaccagagatctttttaaatccctgctactgtcccttctcacaggcattcacagaacccttctgattcgtaagggttacgaaactcatgttcttctccagtcccctgtggtttctgttggagcataaggtttccagtaagcgggagggcagatccaactcagaaccatgcagataaggagcctctggcaaatgggtgctcatcagaacgcgtggattctctttcatggcagaatgctcttggactcggttctccaggcctgattccccgactccatcctttttcaggggttatttaaaaatctgccttagattctatagtgaagacaagcatttcaagaaagagttacctggatcagccatgctcagctgtgacgcctgaataactgtctactttatcttcactgaaccactcactctgtgtaaaggccaacagatttttaatgtggttttcatatcaaaagatcatgttgggattaacttgcctttttccccaaaaaataaactctcaggcaagcatttctttaaagctattaagggagtatatacttgagtacttattgaaatggacagtaataagcaaatgttcttataatgctacctgatttctatgaaatgtgtttgacaagccaaaattctaggatgtagaaatctggaaagttcatttcctgggattcacttctccagggattttttaaagttaatttgggaaattaacagcagttcactttattgtgagtctttgccacatttgactgaattgagctgtcatttgtacatttaaagcagctgttttggggtctgtgagagtacatgtattatatacaagcacaacagggcttgcactaaagaattgtcattgtaataacactacttggtagcctaacttcatatatgtattcttaattgcacaaaaagtcaataatttgtcaccttggggttttgaatgtttgctttaagtgttggctatttctatgttttataaaccaaaacaaaatttccaaaaacaatgaaggaaaccaaaataaatatttctgcatttca

SEQ ID NO: 342776 - DNA, 3791 bp, Homo sapiens
ccgcgggagggcggggccggcgcggcgagcgcaccagcagcatcctggctcagccgcggcggtggcgggggcgcaaccagcgggccgaggcggcggcgccagcggcgccttaaatagcatccagagccggcgcggggcagggagtgggctgcagtgacagccggcggcggagcggccggtccacggaggagaattcagcttagagaactatcaacacaggacaatgcaagcccatgagctgttccggtattttcgaatgccagagctggttgacttccgacagtacgtgcgtactcttccgaccaacacgcttatgggcttcggagcttttgcagcactcaccaccttctggtacgccacgagacccaaacccctgaagccgccatgcgacctctccatgcagtcagtggaagtggcgggtagtggtggtgcacgaagatccgcactacttgacagcgacgagcccttggtgtatttctatgatgatgtcacaacattatacgaaggtttccagaggggaatacaggtgtcaaataatggcccttgtttaggctctcggaaaccagaccaaccctatgaatggctttcatataaacaggttgcagaattgtcggagtgcataggctcagcactgatccagaagggcttcaagactgccccagatcagttcattggcatctttgctcaaaatagacctgagtgggtgattattgaacaaggatgctttgcttattcgatggtgatcgttccactttatgatacccttggaaatgaagccatcacgtacatagtcaacaaagctgaactctctctggtttttgttgacaagccagagaaggccaaactcttattagagggtgtagaaaataagttaataccaggccttaaaatcatagttgtcatggatgcctacggcagtgaactggtggaacgaggccagaggtgtggggtggaagtcaccagcatgaaggcgatggaggacctgggaagagccaacagacggaagcccaagcctccagcacctgaagatcttgcagtaatttgtttcacaagtggaactacaggcaaccccaaaggagcaatggtcactcaccgaaacatagtgagcgattgttcagcttttgtgaaagcaacagagaatacagtcaatccttgcccagatgatactttgatatctttcttgcctctcgcccatatgtttgagagagttgtagagtgtgtaatgctgtgtcatggagctaaaatcggatttttccaaggagatatcaggctgctcatggatgacctcaaggtgcttcaacccactgtcttccccgtggttccaagactgctgaaccggatgtttgaccgaattttcggacaagcaaacaccacgctgaagcgatggctcttggactttgcctccaagaggaaagaagcagagcttcgcagcggcatcatcagaaacaacagcctgtgggaccggctgatcttccacaaagtacagtcgagcctgggcggaagagtccggctgatggtgacaggagccgccccggtgtctgccactgtgctgacgttcctcagagcagccctgggctgtcagttttatgaaggatacggacagacagagtgcactgccgggtgctgcctaaccatgcctggagactggaccgcaggccatgttggggccccgatgccgtgcaatttgataaaacttgttgatgtggaagaaatgaattacatggctgccgagggcgagggcgaggtgtgtgtgaaagggccaaatgtatttcagggctacttgaaggacccagcgaaaacagcagaagctttggacaaagacggctggttacacacaggggacattggaaaatggttaccaaatggcaccttgaaaattatcgaccggaaaaagcacatatttaagctggcacaaggagaatacatagcccctgaaaagattgaaaatatctacatgcgaagtgagcctgttgctcaggtgtttgtccacggagaaagcctgcaggcatttctcattgcaattgtggtaccagatgttgagacattatgttcctgggcccaaaagagaggatttgaagggtcgtttgaggaactgtgcagaaataaggatgtcaaaaaagctatcctcgaagatatggtgagacttgggaaggattctggtctgaaaccatttgaacaggtcaaaggcatcacattgcaccctgaattattttctatcgacaatggccttctgactccaacaatgaaggcgaaaaggccagagctgcggaactatttcaggtcgcagatagatgacctctattccactatcaaggtttagtgtgaagaagaaagctcagaggaaatggcacagttccacaatctcttctcctgctgatggccttcatgttgttaattttgaatacagcaagtgtagggaaggaagcgttcgtgtttgacttgtccattcggggttcttctcataggaatgctagaggaaacagaacactgccttacagtcacctcatgttgcagaccatgtttatggtaatacacactttccaaaatgagccttaaaaattgtaaaggggatactataaatgtgctaagttatttgagacttcctcagtttaaaaagtgggttttaaatcttctgtctccctgtttttctaatcaaggggttaggactttgctatctctgagatgtctgctacttgctgcaaattctgcagctgtctgctgctctaaagagtacagtgcactagagggaagtgttccctttaaaaataagaacaactgtcctggctggagaatctcacaagcggaccagagatctttttaaatccctgctactgtcccttctcacaggcattcacagaacccttctgattcgtaagggttacgaaactcatgttcttctccagtcccctgtggtttctgttggagcataaggtttccagtaagcgggagggcagatccaactcagaaccatgcagataaggagcctctggcaaatgggtgctcatcagaacgcgtggattctctttcatggcagaatgctcttggactcggttctccaggcctgattccccgactccatcctttttcaggggttatttaaaaatctgccttagattctatagtgaagacaagcatttcaagaaagagttacctggatcagccatgctcagctgtgacgcctgaataactgtctactttatcttcactgaaccactcactctgtgtaaaggccaacagatttttaatgtggttttcatatcaaaagatcatgttgggattaacttgcctttttccccaaaaaataaactctcaggcaagcatttctttaaagctattaagggagtatatacttgagtacttattgaaatggacagtaataagcaaatgttcttataatgctacctgatttctatgaaatgtgtttgacaagccaaggattttttaaagttaatttgggaaattaacagcagttcactttattgtgagtctttgccacatttgactgaattgagctgtcatttgtacatttaaagcagctgttttggggtctgtgagagtacatgtattatatacaagcacaacagggcttgcactaaagaattgtcattgtaataacactacttggtagcctaacttcatatatgtattcttaattgcacaaaaagtcaataatttgtcaccttggggttttgaatgtttgctttaagtgttggctatttctatgttttataaaccaaaacaaaatttccaaaaacaatgaaggaaaccaaaataaatatttctgcatttca

SEQ ID NO: 342777 - DNA, 3637 bp, Homo sapiens
ccgcgggagggcggggccggcgcggcgagcgcaccagcagcatcctggctcagccgcggcggtggcgggggcgcaaccagcgggccgaggcggcggcgccagcggcgccttaaatagcatccagagccggcgcggggcagggagtgggctgcagtgacagccggcggcggagcggccggtccacggaggagaattcagcttagagaactatcaacacaggacaatgcaagcccatgagctgttccggtattttcgaatgccagagctggttgacttccgacagtacgtgcgtactcttccgaccaacacgcttatgggcttcggagcttttgcagcactcaccaccttctggtacgccacgagacccaaacccctgaagccgccatgcgacctctccatgcagtcagtggaagtggcgggtagtggtggtgcacgaagatccgcactacttgacagcgacgagcccttggtgtatttctatgatgatgtcacaacattatacgaaggtttccagaggggaatacaggtgtcaaataatggcccttgtttaggctctcggaaaccagaccaaccctatgaatggctttcatataaacaggttgcagaattgtcggagtgcataggctcagcactgatccagaagggcttcaagactgccccagatcagttcattggcatctttgctcaaaatagacctgagtgggtgattattgaacaaggatgctttgcttattcgatggtgatcgttccactttatgatacccttggaaatgaagccatcacgtacatagtcaacaaagctgaactctctctggtttttgttgacaagccagagaaggccaaactcttattagagggtgtagaaaataagttaataccaggccttaaaatcatagttgtcatggatgcctacggcagtgaactggtggaacgaggccagaggtgtggggtggaagtcaccagcatgaaggcgatggaggacctgggaagagccaacagacggaagcccaagcctccagcacctgaagatcttgcagtaatttgtttcacaagtggaactacaggcaaccccaaaggagcaatggtcactcaccgaaacatagtgagcgattgttcagcttttgtgaaagcaacagagaatacagtcaatccttgcccagatgatactttgatatctttcttgcctctcgcccatatgtttgagagagttgtagagtgtgtaatgctgtgtcatggagctaaaatcggatttttccaaggagatatcaggctgctcatggatgacctcaaggtgcttcaacccactgtcttccccgtggttccaagactgctgaaccggatgtttgaccgaattttcggacaagcaaacaccacgctgaagcgatggctcttggactttgcctccaagaggaaagaagcagagcttcgcagcggcatcatcagaaacaacagcctgtgggaccggctgatcttccacaaagtacagtcgagcctgggcggaagagtccggctgatggtgacaggagccgccccggtgtctgccactgtgctgacgttcctcagagcagccctgggctgtcagttttatgaaggatacggacagacagagtgcactgccgggtgctgcctaaccatgcctggagactggaccgcaggccatgttggggccccgatgccgtgcaatttgataaaacttgttgatgtggaagaaatgaattacatggctgccgagggcgagggcgaggtgtgtgtgaaagggccaaatgtatttcagggctacttgaaggacccagcgaaaacagcagaagctttggacaaagacggctggttacacacaggggacattggaaaatggttaccaaatggcaccttgaaaattatcgaccggaaaaagcacatatttaagctggcacaaggagaatacatagcccctgaaaagattgaaaatatctacatgcgaagtgagcctgttgctcaggtgtttgtccacggagaaagcctgcaggcatttctcattgcaattgtggtaccagatgttgagacattatgttcctgggcccaaaagagaggatttgaagggtcgtttgaggaactgtgcagaaataaggatgtcaaaaaagctatcctcgaagatatggtgagacttgggaaggattctggtctgaaaccatttgaacaggtcaaaggcatcacattgcaccctgaattattttctatcgacaatggccttctgactccaacaatgaaggcgaaaaggccagagctgcggaactatttcaggtcgcagatagatgacctctattccactatcaaggtttagtgtgaagaagaaagctcagaggaaatggcacagttccacaatctcttctcctgctgatggccttcatgttgttaattttgaatacagcaagtgtagggaaggaagcgttcgtgtttgacttgtccattcggggttcttctcataggaatgctagaggaaacagaacactgccttacagtcacctcatgttgcagaccatgtttatggtaatacacactttccaaaatgagcttaaaaataagaacaactgtcctggctggagaatctcacaagcggaccagagatctttttaaatccctgctactgtcccttctcacaggcattcacagaacccttctgattcgtaagggttacgaaactcatgttcttctccagtcccctgtggtttctgttggagcataaggtttccagtaagcgggagggcagatccaactcagaaccatgcagataaggagcctctggcaaatgggtgctcatcagaacgcgtggattctctttcatggcagaatgctcttggactcggttctccaggcctgattccccgactccatcctttttcaggggttatttaaaaatctgccttagattctatagtgaagacaagcatttcaagaaagagttacctggatcagccatgctcagctgtgacgcctgaataactgtctactttatcttcactgaaccactcactctgtgtaaaggccaacagatttttaatgtggttttcatatcaaaagatcatgttgggattaacttgcctttttccccaaaaaataaactctcaggcaagcatttctttaaagctattaagggagtatatacttgagtacttattgaaatggacagtaataagcaaatgttcttataatgctacctgatttctatgaaatgtgtttgacaagccaaaattctaggatgtagaaatctggaaagttcatttcctgggattcacttctccagggattttttaaagttaatttgggaaattaacagcagttcactttattgtgagtctttgccacatttgactgaattgagctgtcatttgtacatttaaagcagctgttttggggtctgtgagagtacatgtattatatacaagcacaacagggcttgcactaaagaattgtcattgtaataacactacttggtagcctaacttcatatatgtattcttaattgcacaaaaagtcaataatttgtcaccttggggttttgaatgtttgctttaagtgttggctatttctatgttttataaaccaaaacaaaatttccaaaaacaatgaaggaaaccaaaataaatatttctgcatttca

SEQ ID NO: 342778 - DNA, 1640 bp, Homo sapiens
ccgcgggagggcggggccggcgcggcgagcgcaccagcagcatcctggctcagccgcggcggtggcgggggcgcaaccagcgggccgaggcggcggcgccagcggcgccttaaatagcatccagagccggcgcggggcagggagtgggctgcagtgacagccggcggcggagcggccggtccacggaggagaattcagcttagagaactatcaacacaggacaatgcaagcccatgagctgttccggtattttcgaatgccagagctggttgacttccgacagtacgtgcgtactcttccgaccaacacgcttatgggcttcggagcttttgcagcactcaccaccttctggtacgccacgagacccaaacccctgaagccgccatgcgacctctccatgcagtcagtggaagtggcgggtagtggtggtgcacgaagatccgcactacttgacagcgacgagcccttggtgtatttctatgatgatgtcacaacattatacgaaggtttccagaggggaatacaggtgtcaaataatggcccttgtttaggctctcggaaaccagaccaaccctatgaatggctttcatataaacaggttgcagaattgtcggagtgcataggctcagcactgatccagaagggcttcaagactgccccagatcagttcattggcatctttgctcaaaatagacctgagtgggtgattattgaacaaggatgctttgcttattcgatggtgatcgttccactttatgatacccttggaaatgaagccatcacgtacatagtcaacaaagctgaactctctctggtttttgttgacaagccagagaaggccaaactcttattagagggtgtagaaaataagttaataccaggccttaaaatcatagttgtcatggatgcctacggcagtgaactggtggaacgaggccagaggtgtggggtggaagtcaccagcatgaaggcgatggaggacctgggaagagccaacagacggaagcccaagcctccagcacctgaagatcttgcagtaatttgtttcacaagtggaactacaggcaaccccaaaggagcaatggtcactcaccgaaacatagtgagcgattgttcagcttttgtgaaagcaacagagaatacagtcaatccttgcccagatgatactttgatatctttcttgcctctcgcccatatgtttgagagagttgtagagtgtgtaatgctgtgtcatggagctaaaatcggatttttccaaggagatatcaggctgctcatggatgacctcaaggtgcttcaacccactgtcttccccgtggttccaagactgctgaaccggatgtttgaccgagtaagttccaagcagcgaagtcccaggactgagcactgacttggacgcaggggcttgggcttgaattgggctgtgccatgtgccatctgtatgaccctggacaatcctcccaatcttacagaacttcagtttactcatctgtaaagttagaatgcgtttacctctcagagtggctgataaggattataagagaaaatgcatgaacacactttgtaaaccatggtcacaacacaagcataatgtgggaggtcattttatttttacaataaacactttgagcctctgcttc

SEQ ID NO: 342779 - DNA, 1138 bp, Homo sapiens
ccgcgggagggcggggccggcgcggcgagcgcaccagcagcatcctggctcagccgcggcggtggcgggggcgcaaccagcgggccgaggcggcggcgccagcggcgccttaaatagcatccagagccggcgcggggcagggagtgggctgcagtgacagccggcggcggagcggccggtccacggaggagaattcagcttagagaactatcaacacaggacaatgcaagcccatgagctgttccggtattttcgaatgccagagctggttgacttccgacagtacgtgcgtactcttccgaccaacacgcttatgggcttcggagcttttgcagcactcaccaccttctggtacgccacgagacccaaacccctgaagccgccatgcgacctctccatgcagtcagtggaagtggcgggtagtggtggtgcacgaagatccgcactacttgacagcgacgagcccttggtgtatttctatgatgatgtcacaacattatacgaaggtttccagaggggaatacaggtgtcaaataatggcccttgtttaggctctcggaaaccagaccaaccctatgaatggctttcatataaacaggttgcagaattgtcggagtgcataggctcagcactgatccagaagggcttcaagactgccccagatcagttcattggcatctttgctcaaaatagacctgaggtatgaaccagtaggtacttgctatgcatgattttgagaattctcagatataagagcctaacttctgctagagaccagattttgtagtctgatttctactaaaagtatagctttacgttacaccttagaaagttacacatatgaaaacctcaaccagggccgctgggcacagtggctcacgcctgtaatcccagcactttgtgaggccaaggcgggtgggtcaccagaggtcgggagttccagaccagcctgaccaacatggagaaaccccatctctactaaaaatacaaaattagccaggcctggtggcacacatctgtaatcccagctactcgggaggctgaggcaggagaatcgcttgaatccgggaggcagaggttgcggtgagccaagattgtgccattgcactccagcctgggcaacaagagcgaaactccg

SEQ ID NO: 342780 - DNA, 329 bp, Homo sapiens
tttcttgtgaataaaaccttgtgttttaccaaaaaatctatcaataaaggaatacctgcatgttccctctccgtttctgtgtgcagcattgcttgctggctgagatacaagcctgccgtctggtcagctttgtttctggagttggggcccaatgctgcttctgactttttcctctccattttaggttgcagaattgtcggagtgcataggctcagcactgatccagaagggcttcaagactgccccagatcagttcattggcatctttgctcaaaatagacctgaggtatgaaccagtaggtacttgctatgcatgattttgagaattc

SEQ ID NO: 342781 - DNA, 3845 bp, Homo sapiens
ccgcgggagggcggggccggcgcggcgagcgcaccagcagcatcctggctcagccgcggcggtggcgggggcgcaaccagcgggccgaggcggcggcgccagcggcgccttaaatagcatccagagccggcgcggggcagggagtgggctgcagtgacagccggcggcggagcggccggtccacggaggagaattcagcttagagaactatcaacacaggacaatgcaagcccatgagctgttccggtattttcgaatgccagagctggttgacttccgacagtacgtgcgtactcttccgaccaacacgcttatgggcttcggagcttttgcagcactcaccaccttctggtacgccacgagacccaaacccctgaagccgccatgcgacctctccatgcagtcagtggaagtggcgggtagtggtggtgcacgaagatccgcactacttgacagcgacgagcccttggtgtatttctatgatgatgtcacaacattatacgaaggtttccagaggggaatacaggtgtcaaataatggcccttgtttaggctctcggaaaccagaccaaccctatgaatggctttcatataaacaggttgcagaattgtcggagtgcataggctcagcactgatccagaagggcttcaagactgccccagatcagttcattggcatctttgctcaaaatagacctgagtgggtgattattgaacaaggatgctttgcttattcgatggtgatcgttccactttatgatacccttggaaatgaagccatcacgtacatagtcaacaaagctgaactctctctggtttttgttgacaagccagagaaggccaaactcttattagagggtgtagaaaataagttaataccaggccttaaaatcatagttgtcatggatgcctacggcagtgaactggtggaacgaggccagaggtgtggggtggaagtcaccagcatgaaggcgatggaggacctgggaagagccaacagacggaagcccaagcctccagcacctgaagatcttgcagtaatttgtttcacaagtggaactacaggcaaccccaaaggagcaatggtcactcaccgaaacatagtgagcgattgttcagcttttgtgaaagcaacagagaatacagtcaatccttgcccagatgatactttgatatctttcttgcctctcgcccatatgtttgagagagttgtagagtgtgtaatgctgtgtcatggagctaaaatcggatttttccaaggagatatcaggctgctcatggatgacctcaaggtgcttcaacccactgtcttccccgtggttccaagactgctgaaccggatgtttgaccgaattttcggacaagcaaacaccacgctgaagcgatggctcttggactttgcctccaagaggaaagaagcagagcttcgcagcggcatcatcagaaacaacagcctgtgggaccggctgatcttccacaaagtacagtcgagcctgggcggaagagtccggctgatggtgacaggagccgccccggtgtctgccactgtgctgacgttcctcagagcagccctgggctgtcagttttatgaaggatacggacagacagagtgcactgccgggtgctgcctaaccatgcctggagactggaccgcaggccatgttggggccccgatgccgtgcaatttgataaaacttgttgatgtggaagaaatgaattacatggctgccgagggcgagggcgaggtgtgtgtgaaagggccaaatgtatttcagggctacttgaaggacccagcgaaaacagcagaagctttggacaaagacggctggttacacacaggggacattggaaaatggttaccaaatggcaccttgaaaattatcgaccggaaaaagcacatatttaagctggcacaaggagaatacatagcccctgaaaagattgaaaatatctacatgcgaagtgagcctgttgctcaggtgtttgtccacggagaaagcctgcaggcatttctcattgcaattgtggtaccagatgttgagacattatgttcctgggcccaaaagagaggatttgaagggtcgtttgaggaactgtgcagaaataaggatgtcaaaaaagctatcctcgaagatatggtgagacttgggaaggattctggtctgaaaccatttgaacaggtcaaaggcatcacattgcaccctgaattattttctatcgacaatggccttctgactccaacaatgaaggcgaaaaggccagagctgcggaactatttcaggtcgcagatagatgacctctattccactatcaaggtttagtgtgaagaagaaagctcagaggaaatggcacagttccacaatctcttctcctgctgatggccttcatgttgttaattttgaatacagcaagtgtagggaaggaagcgttcgtgtttgacttgtccattcggggttcttctcataggaatgctagaggaaacagaacactgccttacagtcacctcatgttgcagaccatgtttatggtaatacacactttccaaaatgagccttaaaaattgtaaaggggatactataaatgtgctaagttatttgagacttcctcagtttaaaaagtgggttttaaatcttctgtctccctgtttttctaatcaaggggttaggactttgctatctctgagatgtctgctacttgctgcaaattctgcagctgtctgctgctctaaagagtacagtgcactagagggaagtgttccctttaaaaataagaacaactgtcctggctggagaatctcacaagcggaccagagatctttttaaatccctgctactgtcccttctcacaggcattcacagaacccttctgattcgtaagggttacgaaactcatgttcttctccagtcccctgtggtttctgttggagcataaggtttccagtaagcgggagggcagatccaactcagaaccatgcagataaggagcctctggcaaatgggtgctcatcagaacgcgtggattctctttcatggcagaatgctcttggactcggttctccaggcctgattccccgactccatcctttttcaggggttatttaaaaatctgccttagattctatagtgaagacaagcatttcaagaaagagttacctggatcagccatgctcagctgtgacgcctgaataactgtctactttatcttcactgaaccactcactctgtgtaaaggccaacagatttttaatgtggttttcatatcaaaagatcatgttgggattaacttgcctttttccccaaaaaataaactctcaggcaagcatttctttaaagctattaagggagtatatacttgagtacttattgaaatggacagtaataagcaaatgttcttataatgctacctgatttctatgaaatgtgtttgacaagccaaaattctaggatgtagaaatctggaaagttcatttcctgggattcacttctccagggattttttaaagttaatttgggaaattaacagcagttcactttattgtgagtctttgccacatttgactgaattgagctgtcatttgtacatttaaagcagctgttttggggtctgtgagagtacatgtattatatacaagcacaacagggcttgcactaaagaattgtcattgtaataacactacttggtagcctaacttcatatatgtattcttaattgcacaaaaagtcaataatttgtcaccttggggttttgaatgtttgctttaagtgttggctatttctatgttttataaaccaaaacaaaatttccaaaaacaatgaaggaaaccaaaataaatatttctgcatttca

SEQ ID NO: 342782 - DNA, 3880 bp, Homo sapiens
ccgcgggagggcggggccggcgcggcgagcgcaccagcagcatcctggctcagccgcggcggtggcgggggcgcaaccagcgggccgaggcggcggcgccagcggcgccttaaatagcatccagagccggcgcggggcagggagtgggctgcagtgacagccggcggcggagcggccggtccacggaggagaattcagcttagagaactatcaacacaggacaatgcaagcccatgagctgttccggtattttcgaatgccagagctggttgacttccgacagtacgtgcgtactcttccgaccaacacgcttatgggcttcggagcttttgcagcactcaccaccttctggtacgccacgagacccaaacccctgaagccgccatgcgacctctccatgcagtcagtggaagtggcgggtagtggtggtgcacgaagatccgcactacttgacagcgacgagcccttggtgtatttctatgatgatgtcacaacattatacgaaggtttccagaggggaatacaggtgtcaaataatggcccttgtttaggctctcggaaaccagaccaaccctatgaatggctttcatataaacaggttgcagaattgtcggagtgcataggctcagcactgatccagaagggcttcaagactgccccagatcagttcattggcatctttgctcaaaatagacctgagtgggtgattattgaacaaggatgctttgcttattcgatggtgatcgttccactttatgatacccttggaaatgaagccatcacgtacatagtcaacaaagctgaactctctctggtttttgttgacaagccagagaaggccaaactcttattagagggtgtagaaaataagttaataccaggccttaaaatcatagttgtcatggatgcctacggcagtgaactggtggaacgaggccagaggtgtggggtggaagtcaccagcatgaaggcgatggaggacctgggaagagccaacagacggaagcccaagcctccagcacctgaagatcttgcagtaatttgtttcacaagtggaactacaggcaaccccaaaggagcaatggtcactcaccgaaacatagtgagcgattgttcagcttttgtgaaagcaacagagaatacagtcaatccttgcccagatgatactttgatatctttcttgcctctcgcccatatgtttgagagagttgtagagtgtgtaatgctgtgtcatggagctaaaatcggatttttccaaggagatatcaggctgctcatggatgacctcaaggtgcttcaacccactgtcttccccgtggttccaagactgctgaaccggatgtttgaccgaattttcggacaagcaaacaccacgctgaagcgatggctcttggactttgcctccaagaggaaagaagcagagcttcgcagcggcatcatcagaaacaacagcctgtgggaccggctgatcttccacaaagtacagtcgagcctgggcggaagagtccggctgatggtgacaggagccgccccggtgtctgccactgtgctgacgttcctcagagcagccctgggctgtcagttttatgaaggatacggacagacagagtgcactgccgggtgctgcctaaccatgcctggagactggaccgcaggccatgttggggccccgatgccgtgcaatttgataaaacttgttgatgtggaagaaatgaattacatggctgccgagggcgagggcgaggtgtgtgtgaaagggccaaatgtatttcagggctacttgaaggacccagcgaaaacagcagaagctttggacaaagacggctggttacacacaggggacattggaaaatggttaccaaatggcaccttgaaaattatcgaccggaaaaagcacatatttaagctggcacaaggagaatacatagcccctgaaaagattgaaaatatctacatgcgaagtgagcctgttgctcaggtgtttgtccacggagaaagcctgcaggcatttctcattgcaattgtggtaccagatgttgagacattatgttcctgggcccaaaagagaggatttgaagggtcgtttgaggaactgtgcagaaataaggatgtcaaaaaagctatcctcgaagatatggtgagacttgggaaggattctggtctgaaaccatttgaacaggtcaaaggcatcacattgcaccctgaattattttctatcgacaatggccttctgactccaacaatgaaggcgaaaaggccagagctgcggaactatttcaggtcgcagatagatgacctctattccactatcaaggtttagtgtgaagaagaaagctcagaggaaatggcacagttccacaatctcttctcctgctgatggccttcatgttgttaattttgaatacagcaagtgtagggaaggaagcgttcgtgtttgacttgtccattcggggttcttctcataggaatgctagaggaaacagaacactgccttacagtcacctcatgttgcagaccatgtttatggtaatacacactttccaaaatgagccttaaaaattgtaaaggggatactataaatgtgctaagttatttgagacttcctcagtttaaaaagtgggttttaaatcttctgtctccctgtttttctaatcaaggggttaggactttgctatctctgagatgtctgctacttgctgcaaattctgcagctgtctgctgctctaaagagtacagtgcactagagggaagtgttccctttaaaaataagaacaactgtcctggctggagaatctcacaagcggaccagagatctttttaaatccctgctactgtcccttctcacaggcattcacagaacccttctgattcgtaagggttacgaaactcatgttcttctccagtcccctgtggtttctgttggagcataaggtttccagtaagcgggagggcagatccaactcagaaccatgcagataaggagcctctggcaaatgggtgctcatcagaacgcgtggattctctttcatggcagaatgctcttggactcggttctccaggcctgattccccgactccatcctttttcaggggttatttaaaaatctgccttagattctatagtgaagacaagcatttcaagaaagagttacctggatcagccatgctcagctgtgacgcctgaataactgtctactttatcttcactgaaccactcactctgtgtaaaggccaacagatttttaatgtggttttcatatcaaaagatcatgttgggattaacttgcctttttccccaaaaaataaactctcaggcaagcatttctttaaagctattaagggagtatatacttgagtacttattgaaatggacagtaataagcaaatgttcttataatgctacctgatttctatgaaatgtgtttgacaagccaaaattctaggatgtagaaatctggaaagttcatttcctgggattcacttctccagggattttttaaagttaatttgggaaattaacagcagttcactttattgtgagtctttgccacatttgactgaattgagctgtcatttgtacatttaaagcagctgttttggggtctgtgagagtacatgtattatatacaagcacaacagggcttgcactaaagaattgtcattgtaataacactacttggtagcctaacttcatatatgtattcttaattgcacaaaaagtcaataatttgtcaccttggggttttgaatgtttgctttaagtgttggctatttctatgttttataaaccaaaacaaaatttccaaaaacaatgaaggaaaccaaaataaatatttctgcatttcaaaaaaaaaaacaaaacacaacaacaaacaacactt

SEQ ID NO: 342783 - DNA, 3435 bp, Homo sapiens
tggtcttgaactcctgggctcaactgattcccccaaccttggcctcccaaagtgctgggatcactggtgtgagtcagtgtgcctggccttaatttctttttaagaagggggcatgtgttttgttctcattctgaatcccttatagcacctggcacagagtagtagctaacacagatgttaattttgctgcgtcaaatgttttcactttgaatctctcttgagtattgttctccttattgattacatgatgacatcctgttttctctccctgacctttactgtttgtttagtgggtgattattgaacaaggatgctttgcttattcgatggtgatcgttccactttatgatacccttggaaatgaagccatcacgtacatagtcaacaaagctgaactctctctggtttttgttgacaagccagagaaggccaaactcttattagagggtgtagaaaataagttaataccaggccttaaaatcatagttgtcatggatgcctacggcagtgaactggtggaacgaggccagaggtgtggggtggaagtcaccagcatgaaggcgatggaggacctgggaagagccaacagacggaagcccaagcctccagcacctgaagatcttgcagtaatttgtttcacaagtggaactacaggcaaccccaaaggagcaatggtcactcaccgaaacatagtgagcgattgttcagcttttgtgaaagcaacagagaatacagtcaatccttgcccagatgatactttgatatctttcttgcctctcgcccatatgtttgagagagttgtagagtgtgtaatgctgtgtcatggagctaaaatcggatttttccaaggagatatcaggctgctcatggatgacctcaaggtgcttcaacccactgtcttccccgtggttccaagactgctgaaccggatgtttgaccgaattttcggacaagcaaacaccacgctgaagcgatggctcttggactttgcctccaagaggaaagaagcagagcttcgcagcggcatcatcagaaacaacagcctgtgggaccggctgatcttccacaaagtacagtcgagcctgggcggaagagtccggctgatggtgacaggagccgccccggtgtctgccactgtgctgacgttcctcagagcagccctgggctgtcagttttatgaaggatacggacagacagagtgcactgccgggtgctgcctaaccatgcctggagactggaccgcaggccatgttggggccccgatgccgtgcaatttgataaaacttgttgatgtggaagaaatgaattacatggctgccgagggcgagggcgaggtgtgtgtgaaagggccaaatgtatttcagggctacttgaaggacccagcgaaaacagcagaagctttggacaaagacggctggttacacacaggggacattggaaaatggttaccaaatggcaccttgaaaattatcgaccggaaaaagcacatatttaagctggcacaaggagaatacatagcccctgaaaagattgaaaatatctacatgcgaagtgagcctgttgctcaggtgtttgtccacggagaaagcctgcaggcatttctcattgcaattgtggtaccagatgttgagacattatgttcctgggcccaaaagagaggatttgaagggtcgtttgaggaactgtgcagaaataaggatgtcaaaaaagctatcctcgaagatatggtgagacttgggaaggattctggtctgaaaccatttgaacaggtcaaaggcatcacattgcaccctgaattattttctatcgacaatggccttctgactccaacaatgaaggcgaaaaggccagagctgcggaactatttcaggtcgcagatagatgacctctattccactatcaaggtttagtgtgaagaagaaagctcagaggaaatggcacagttccacaatctcttctcctgctgatggccttcatgttgttaattttgaatacagcaagtgtagggaaggaagcgttcgtgtttgacttgtccattcggggttcttctcataggaatgctagaggaaacagaacactgccttacagtcacctcatgttgcagaccatgtttatggtaatacacactttccaaaatgagccttaaaaattgtaaaggggatactataaatgtgctaagttatttgagacttcctcagtttaaaaagtgggttttaaatcttctgtctccctgtttttctaatcaaggggttaggactttgctatctctgagatgtctgctacttgctgcaaattctgcagctgtctgctgctctaaagagtacagtgcactagagggaagtgttccctttaaaaataagaacaactgtcctggctggagaatctcacaagcggaccagagatctttttaaatccctgctactgtcccttctcacaggcattcacagaacccttctgattcgtaagggttacgaaactcatgttcttctccagtcccctgtggtttctgttggagcataaggtttccagtaagcgggagggcagatccaactcagaaccatgcagataaggagcctctggcaaatgggtgctcatcagaacgcgtggattctctttcatggcagaatgctcttggactcggttctccaggcctgattccccgactccatcctttttcaggggttatttaaaaatctgccttagattctatagtgaagacaagcatttcaagaaagagttacctggatcagccatgctcagctgtgacgcctgaataactgtctactttatcttcactgaaccactcactctgtgtaaaggccaacagatttttaatgtggttttcatatcaaaagatcatgttgggattaacttgcctttttccccaaaaaataaactctcaggcaagcatttctttaaagctattaagggagtatatacttgagtacttattgaaatggacagtaataagcaaatgttcttataatgctacctgatttctatgaaatgtgtttgacaagccaaaattctaggatgtagaaatctggaaagttcatttcctgggattcacttctccagggattttttaaagttaatttgggaaattaacagcagttcactttattgtgagtctttgccacatttgactgaattgagctgtcatttgtacatttaaagcagctgttttggggtctgtgagagtacatgtattatatacaagcacaacagggcttgcactaaagaattgtcattgtaataacactacttggtagcctaacttcatatatgtattcttaattgcacaaaaagtcaataatttgtcaccttggggttttgaatgtttgctttaagtgttggctatttctatgttttataaaccaaaacaaaatttccaaaaacaatgaaggaaaccaaaataaatatttctgcatttca

SEQ ID NO: 342784 - DNA, 3791 bp, Homo sapiens
ccgcgggagggcggggccggcgcggcgagcgcaccagcagcatcctggctcagccgcggcggtggcgggggcgcaaccagcgggccgaggcggcggcgccagcggcgccttaaatagcatccagagccggcgcggggcagggagtgggctgcagtgacagccggcggcggagcggccggtccacggaggagaattcagcttagagaactatcaacacaggacaatgcaagcccatgagctgttccggtattttcgaatgccagagctggttgacttccgacagtacgtgcgtactcttccgaccaacacgcttatgggcttcggagcttttgcagcactcaccaccttctggtacgccacgagacccaaacccctgaagccgccatgcgacctctccatgcagtcagtggaagtggcgggtagtggtggtgcacgaagatccgcactacttgacagcgacgagcccttggtgtatttctatgatgatgtcacaacattatacgaaggtttccagaggggaatacaggtgtcaaataatggcccttgtttaggctctcggaaaccagaccaaccctatgaatggctttcatataaacaggttgcagaattgtcggagtgcataggctcagcactgatccagaagggcttcaagactgccccagatcagttcattggcatctttgctcaaaatagacctgagtgggtgattattgaacaaggatgctttgcttattcgatggtgatcgttccactttatgatacccttggaaatgaagccatcacgtacatagtcaacaaagctgaactctctctggtttttgttgacaagccagagaaggccaaactcttattagagggtgtagaaaataagttaataccaggccttaaaatcatagttgtcatggatgcctacggcagtgaactggtggaacgaggccagaggtgtggggtggaagtcaccagcatgaaggcgatggaggacctgggaagagccaacagacggaagcccaagcctccagcacctgaagatcttgcagtaatttgtttcacaagtggaactacaggcaaccccaaaggagcaatggtcactcaccgaaacatagtgagcgattgttcagcttttgtgaaagcaacagagaatacagtcaatccttgcccagatgatactttgatatctttcttgcctctcgcccatatgtttgagagagttgtagagtgtgtaatgctgtgtcatggagctaaaatcggatttttccaaggagatatcaggctgctcatggatgacctcaaggtgcttcaacccactgtcttccccgtggttccaagactgctgaaccggatgtttgaccgaattttcggacaagcaaacaccacgctgaagcgatggctcttggactttgcctccaagaggaaagaagcagagcttcgcagcggcatcatcagaaacaacagcctgtgggaccggctgatcttccacaaagtacagtcgagcctgggcggaagagtccggctgatggtgacaggagccgccccggtgtctgccactgtgctgacgttcctcagagcagccctgggctgtcagttttatgaaggatacggacagacagagtgcactgccgggtgctgcctaaccatgcctggagactggaccgcaggccatgttggggccccgatgccgtgcaatttgataaaacttgttgatgtggaagaaatgaattacatggctgccgagggcgagggcgaggtgtgtgtgaaagggccaaatgtatttcagggctacttgaaggacccagcgaaaacagcagaagctttggacaaagacggctggttacacacaggggacattggaaaatggttaccaaatggcaccttgaaaattatcgaccggaaaaagcacatatttaagctggcacaaggagaatacatagcccctgaaaagattgaaaatatctacatgcgaagtgagcctgttgctcaggtgtttgtccacggagaaagcctgcaggcatttctcattgcaattgtggtaccagatgttgagacattatgttcctgggcccaaaagagaggatttgaagggtcgtttgaggaactgtgcagaaataaggatgtcaaaaaagctatcctcgaagatatggtgagacttgggaaggattctggtctgaaaccatttgaacaggtcaaaggcatcacattgcaccctgaattattttctatcgacaatggccttctgactccaacaatgaaggcgaatatcaaggtttagtgtgaagaagaaagctcagaggaaatggcacagttccacaatctcttctcctgctgatggccttcatgttgttaattttgaatacagcaagtgtagggaaggaagcgttcgtgtttgacttgtccattcggggttcttctcataggaatgctagaggaaacagaacactgccttacagtcacctcatgttgcagaccatgtttatggtaatacacactttccaaaatgagccttaaaaattgtaaaggggatactataaatgtgctaagttatttgagacttcctcagtttaaaaagtgggttttaaatcttctgtctccctgtttttctaatcaaggggttaggactttgctatctctgagatgtctgctacttgctgcaaattctgcagctgtctgctgctctaaagagtacagtgcactagagggaagtgttccctttaaaaataagaacaactgtcctggctggagaatctcacaagcggaccagagatctttttaaatccctgctactgtcccttctcacaggcattcacagaacccttctgattcgtaagggttacgaaactcatgttcttctccagtcccctgtggtttctgttggagcataaggtttccagtaagcgggagggcagatccaactcagaaccatgcagataaggagcctctggcaaatgggtgctcatcagaacgcgtggattctctttcatggcagaatgctcttggactcggttctccaggcctgattccccgactccatcctttttcaggggttatttaaaaatctgccttagattctatagtgaagacaagcatttcaagaaagagttacctggatcagccatgctcagctgtgacgcctgaataactgtctactttatcttcactgaaccactcactctgtgtaaaggccaacagatttttaatgtggttttcatatcaaaagatcatgttgggattaacttgcctttttccccaaaaaataaactctcaggcaagcatttctttaaagctattaagggagtatatacttgagtacttattgaaatggacagtaataagcaaatgttcttataatgctacctgatttctatgaaatgtgtttgacaagccaaaattctaggatgtagaaatctggaaagttcatttcctgggattcacttctccagggattttttaaagttaatttgggaaattaacagcagttcactttattgtgagtctttgccacatttgactgaattgagctgtcatttgtacatttaaagcagctgttttggggtctgtgagagtacatgtattatatacaagcacaacagggcttgcactaaagaattgtcattgtaataacactacttggtagcctaacttcatatatgtattcttaattgcacaaaaagtcaataatttgtcaccttggggttttgaatgtttgctttaagtgttggctatttctatgttttataaaccaaaacaaaatttccaaaaacaatgaaggaaaccaaaataaatatttctgcatttca

SEQ ID NO: 342785 - DNA, 3788 bp, Homo sapiens
ccgcgggagggcggggccggcgcggcgagcgcaccagcagcatcctggctcagccgcggcggtggcgggggcgcaaccagcgggccgaggcggcggcgccagcggcgccttaaatagcatccagagccggcgcggggcagggagtgggctgcagtgacagccggcggcggagcggccggtccacggaggagaattcagcttagagaactatcaacacaggacaatgcaagcccatgagctgttccggtattttcgaatgccagagctggttgacttccgacagtacgtgcgtactcttccgaccaacacgcttatgggcttcggagcttttgcagcactcaccaccttctggtacgccacgagacccaaacccctgaagccgccatgcgacctctccatgcagtcagtggaagtggcgggtagtggtggtgcacgaagatccgcactacttgacagcgacgagcccttggtgtatttctatgatgatgtcacaacattatacgaaggtttccagaggggaatacaggtgtcaaataatggcccttgtttaggctctcggaaaccagaccaaccctatgaatggctttcatataaacaggttgcagaattgtcggagtgcataggctcagcactgatccagaagggcttcaagactgccccagatcagttcattggcatctttgctcaaaatagacctgagtgggtgattattgaacaaggatgctttgcttattcgatggtgatcgttccactttatgatacccttggaaatgaagccatcacgtacatagtcaacaaagctgaactctctctggtttttgttgacaagccagagaaggccaaactcttattagagggtgtagaaaataagttaataccaggccttaaaatcatagttgtcatggatgcctacggcagtgaactggtggaacgaggccagaggtgtggggtggaagtcaccagcatgaaggcgatggaggacctgggaagagccaacagacggaagcccaagcctccagcacctgaagatcttgcagtaatttgtttcacaagtggaactacaggcaaccccaaaggagcaatggtcactcaccgaaacatagtgagcgattgttcagcttttgtgaaagcaacagagaatacagtcaatccttgcccagatgatactttgatatctttcttgcctctcgcccatatgtttgagagagttgtagagtgtgtaatgctgtgtcatggagctaaaatcggatttttccaaggagatatcaggctgctcatggatgacctcaaggtgcttcaacccactgtcttccccgtggttccaagactgctgaaccggatgtttgaccgaattttcggacaagcaaacaccacgctgaagcgatggctcttggactttgcctccaagaggaaagaagcagagcttcgcagcggcatcatcagaaacaacagcctgtgggaccggctgatcttccacaaagtacagtcgagcctgggcggaagagtccggctgatggtgacaggagccgccccggtgtctgccactgtgctgacgttcctcagagcagccctgggctgtcagttttatgaaggatacggacagacagagtgcactgccgggtgctgcctaaccatgcctggagactggaccgcaggccatgttggggccccgatgccgtgcaatttgataaaacttgttgatgtggaagaaatgaattacatggctgccgagggcgagggcgaggtgtgtgtgaaagggccaaatgtatttcagggctacttgaaggacccagcgaaaacagcagaagctttggacaaagacggctggttacacacaggggacattggaaaatggttaccaaatggcaccttgaaaattatcgaccggaaaaagcacatatttaagctggcacaaggagaatacatagcccctgaaaagattgaaaatatctacatgcgaagtgagcctgttgctcaggtgtttgtccacggagaaagcctgcaggcatttctcattgcaattgtggtaccagatgttgagacattatgttcctgggcccaaaagagaggatttgaagggtcgtttgaggaactgtgcagaaataaggatgtcaaaaaagctatcctcgaagatatggtgagacttgggaaggattctggtctgaaaccatttgaacaggtcaaaggcatcacattgcaccctgaattattttctatcgacaatggccttctgactccaacaatgaaggcgaaaaggccagagctgcggaactatttcaggtcgcagatagatgacctctattccactatcaaggtttagtgtgaagaagaaagctcagaggaaatggcacagttccacaatctcttctcctgctgatggccttcatgttgttaattttgaatacagcaagtgtagggaaggaagcgttcgtgtttgacttgtccattcggggttcttctcataggaatgctagaggaaacagaacactgccttacagtcacctcatgttgcagaccatgtttatggtaatacacactttccaaaatgagccttaaaaattgtaaaggggatactataaatgtgctaagttatttgagacttcctcagtttaaaaagtgggttttaaatcttctgtctccctgtttttctaatcaaggggttaggactttgctatctctgagatgtctgctacttgctgcaaattctgcagctgtctgctgctctaaagagtacagtgcactagagggaagtgttcccttttaaatccctgctactgtcccttctcacaggcattcacagaacccttctgattcgtaagggttacgaaactcatgttcttctccagtcccctgtggtttctgttggagcataaggtttccagtaagcgggagggcagatccaactcagaaccatgcagataaggagcctctggcaaatgggtgctcatcagaacgcgtggattctctttcatggcagaatgctcttggactcggttctccaggcctgattccccgactccatcctttttcaggggttatttaaaaatctgccttagattctatagtgaagacaagcatttcaagaaagagttacctggatcagccatgctcagctgtgacgcctgaataactgtctactttatcttcactgaaccactcactctgtgtaaaggccaacagatttttaatgtggttttcatatcaaaagatcatgttgggattaacttgcctttttccccaaaaaataaactctcaggcaagcatttctttaaagctattaagggagtatatacttgagtacttattgaaatggacagtaataagcaaatgttcttataatgctacctgatttctatgaaatgtgtttgacaagccaaaattctaggatgtagaaatctggaaagttcatttcctgggattcacttctccagggattttttaaagttaatttgggaaattaacagcagttcactttattgtgagtctttgccacatttgactgaattgagctgtcatttgtacatttaaagcagctgttttggggtctgtgagagtacatgtattatatacaagcacaacagggcttgcactaaagaattgtcattgtaataacactacttggtagcctaacttcatatatgtattcttaattgcacaaaaagtcaataatttgtcaccttggggttttgaatgtttgctttaagtgttggctatttctatgttttataaaccaaaacaaaatttccaaaaacaatgaaggaaaccaaaataaatatttctgcatttca

SEQ ID NO: 342786 - DNA, 1290 bp, Homo sapiens
ccgcgggagggcggggccggcgcggcgagcgcaccagcagcatcctggctcagccgcggcggtggcgggggcgcaaccagcgggccgaggcggcggcgccagcggcgccttaaatagcatccagagccggcgcggggcagggagtgggctgcagtgacagccggcggcggagcggccggtccacggaggagaattcagcttagagaactatcaacacaggacaatgcaagcccatgagctgttccggtattttcgaatgccagagctggttgacttccgacagtacgtgcgtactcttccgaccaacacgcttatgggcttcggagcttttgcagcactcaccaccttctggtacgccacgagacccaaacccctgaagccgccatgcgacctctccatgcagtcagtggaagtggcgggtagtggtggtgcacgaagatccgcactacttgacagcgacgagcccttggtgtatttctatgatgatgtcacaacattatacgaaggtttccagaggggaatacaggtgtcaaataatggcccttgtttaggctctcggaaaccagaccaaccctatgaatggctttcatataaacaggttgcagaattgtcggagtgcataggctcagcactgatccagaagggcttcaagactgccccagatcagttcattggcatctttgctcaaaatagacctgagtgggtgattattgaacaaggatgctttgcttattcgatggtgatcgttccactttatgatacccttggaaatgaagccatcacgtacatagtcaacaaagctgaactctctctggtttttgttgacaagccagagaaggccaaactcttattagagggtgtagaaaataagttaataccaggccttaaaatcatagttgtcatggatgcctacggcagtgaactggtggaacgaggccagaggtgtggggtggaagtcaccagcatgaaggcgatggaggacctgggaagagccaacagacggaagcccaagcctccagcacctgaagatcttgcagtaatttgtttcacaagtggaactacaggcaaccccaaaggagcaatggtcactcaccgaaacatagtgagcgattgttcagcttttgtgaaagcaacagaggtaactttttgggatgtcgtcatctttcctcattgattgacattagtccttgagaatgaaagtgctgaaggtgggcaccagtgtgttaggtccatgtggcatttagaaacgatgtgacatatgggtaaggtcagaactttaggcccaagtcc

SEQ ID NO: 342787 - DNA, 519 bp, Homo sapiens
ttagatggctggccggtggaattttggagttctggagaggggtcctgcttccctggaacgaacgtgacatttttctctcccaacagaattcagcttagagaactatcaacacaggacaatgcaagcccatgagctgttccggtattttcgaatgccagagctggttgacttccgacagtacgtgcgtactcttccgaccaacacgcttatgggcttcggagcttttgcagcactcaccaccttctggtacgccacgagacccaaacccctgaagccgccatgcgacctctccatgcagtcagtggaagtggcggtgagtggagggcccagcctgcctcgtgcgttttctccgcatttccccagatgagctgagccctgttgaatgtgatagccatcaagatcaaatatttgtttataactgcactttgtaaatggaaatgtgccaaattactgatggtggtaaatagaggtacagggcaaaatataggcacagggacagatgagagggtgtcggttggg

SEQ ID NO: 342788 - DNA, 279 bp, Homo sapiens
cctcatctgtgaggtattttggggactcttccaccctagaatcggctggtctcttcggcttgttgggtgtatcctaatgacttaggaagttggatgtatgcttagatgagggtctgtttgaacactgggaggaaaatggcagttcatgtgtgaaaatggcggtttaattttcagaaaagtatctagtctgttggtcttggcttcagccctaagtcattaggataccctataaaggaacataggaaaaccctttcacgctcagtggggcctgcctctcaa

SEQ ID NO: 342789 - DNA, 427 bp, Homo sapiens
tgtactatgtgcaaagcatgctgagaaagtagggtagcagaatctaatcttttctggtcaaagaataccttgaaaccagataaaaggtataatctccagaaaaactcacattcacacaaaatttaacttacaaccttagctaataatattctcatatcatggctggaatggttgccattcatctaaatcccatttcttgtacaacccttgcaattttttgttcattttaaaaattattattttttagacacagggcctcactgtcgccaggttggagtgcagtggcgtgatcatagctcactgcagcctcaaactcctgggctcaagtgatcttcctgcctcagcctcccgagtagctgggactacaggcacatgccaccaagctgggctaatttttaattttttttttctgtagagatgggatctc

SEQ ID NO: 342790 - DNA, 4524 bp, Homo sapiens
tgccagaggagccgggacaccgagggaagaggccggagggagatcgcggaggggagggggcgggaggggggtggggtatcctgagtcgtccgtggtccggagtctggaaggccctagagcggcgccagtcgacccgcctcgccacaacttgcccagaccagacacgtttcatcctgcgccctgcaagaaggagccggcctgcctctctccgctttgctgctcctcggcctccgcgggcccggcccgcgtcagcagcgaccctggggtctgggtcccctgtgtcgcccccgcccgcctgcagcgcccggcacccgcccaggagcgcgcagctggggttctagggacgtatacttgagcaagagagaccacagctcttgttcccgctgatcctgcagcccagtggatggagtccagaatctacagacctgccaggaaagaaaaaaaaattcctgatgtctggtccaagcaggaattccccggtggattggggaatgtctggcttttcctcagcttattgatctctgtggtaaccactggaggcccccagaagacccatagaaatgagaggcctgaggtctacaagtcgctgctagaaatattttagcctctccaaagcccagaatgcagccccgacccaagtttgtaagggttctgggtgcacgctgaccctgcgcgggcagacgcgccctttgctccaggtccggacctgggcgctgctatagcaacgtcctggacgcccagaccttaggccgccgccgccgcggaagcgaggaacccggccttctcccgctcctgagggctgtggcggcggcggcccgggaggcggcccaggctgggtaaagaccgcccggctcctcctatgcaagctgaggcagcggattggttttcaagcatgcccttccagaagcatgtctactacccgctcgccagcggcccagaggggcccgacgtcgctgtggccgccgccgccgcgggtgcggcctccatggcctgtgcgccccccagcgcggcttcggggcccctgcccttcttccagttcaggccgcggctggagagtgtggactggcggcggctgagcgccatcgacgtggacaaggtggcgggggctgtggacgtgctgacgctgcaggagaacatcatgaacatcaccttctgcaagctggaagacgagaagtgcccacactgccagtcgggggtggacccggtgctgctgaagctcatccgtctggcgcagttcaccatcgagtacttgctgcactcacaagagttcctcacctcgcagctgcacaccctggaggagcggctgcgcctgagccactgcgacggcgagcagagcaagaagctgctcaccaagcaggcgggggagatcaagacgctcaaggaagagtgcaaacgccggaagaagatgatctccacccagcagctgatgatcgaggccaaagccaactattaccagtgccatttttgtgacaaggcctttatgaaccaagcttttctacaaagtcacattcaacgccgccacactgaagaaaattctcattttgagtatcagaaaaatgcacagattgagaagctccggagtgagatcgtcgtattgaaggaagagctgcagctcaccaggtctgagctagaggctgcacaccatgccagtgcagtcagattctccaaggaatatgaaatgcagaaaacaaaagaggaagactttttgaagttatttgacaggtggaaagaagaagaaaaggagaaactagttgatgaaatggaaaaagtcaaggagatgtttatgaaggaatttaaagaattaacttcgaagaattcagcattagaatatcaactgtcagaaatccagaagtccaatatgcagatcaagtccaacataggcacattaaaagatgcacacgagtttaaagaagaccgttctccatatccccaggatttccataatgtcatgcagcttcttgatagtcaggaaagcaaatggacagctcgagttcaagctattcatcaagaacacaagaaagagaagggtcggctcctgtcacatatagagaaacttcgaacctcaatgatagatgatctaaatgcaagcaatgttttctataagaaaaggatagaagagctagggcagagactccaggagcagaatgagctgattataactcagagacagcagattaaagactttacctgtaatccattaaacagtatcagtgaacccaaagtgaatgccccagccctgcacactttggaaactaaatcaagtctgccaatggtgcatgaacaggcattctcgtcgcacatactggaaccaatagaagaactttcagaggaagaaaaaggaagggaaaatgaacagaaattaaataacaacaaaatgcatttaaggaaagctttgaagagtaactcctccctcactaagggactaagaacaatggtggagcagaacttgatggagaaactggaaaccttggggattaatgcagatatacgtggcatttcaagtgatcagttgcatagagtactaaaaagtgtggaatcagaaagacataagcaagaaagagaaatacctaactttcatcaaattcgagaattccttgaacatcaagtcagctgtaaaattgaggagaaagcactactctcttcagatcagtgcagtgtttctcaaatggataccctttcaactggagaagtacccaaaatgatacaacttccttccaaaaacagacaactgattagacaaaaagctgtttctactgataggacatctgttccaaaaattaagaaaaatgtcatggaagatccttttcccagaaagtcttcaactattacgacccctccttttagttcagaggaggagcaggaggacgacgacctcatccgggcatacgcatccccaggcccacttcctgtgccgccaccacaaaacaagggcagcttcgggaagaacacagtgaaaagtgacgcggacgggaccgagggaagcgaaatcgaggacactgatgattctcccaagcccgcaggagtcgccgttaaaacacctactgaaaaagttgaaaagatgtttccacatcgcaaaaatgtgaacaaaccagtcggtggaactaatgtccctgagatgtttatcaaaaaagaagaattacaagaactaaagtgtgcggatgtggaggatgaagactgggacatatcatccctagaggaagagatatctttgggaaaaaaatctgggaaagaacagaaggaacctccacctgcgaaaaatgaaccacattttgctcatgtgctaaatgcctggggcgcatttaatcctaaggggccaaagggagaaggacttcaagaaaatgaatcaagcacattaaaaagcagcttagtaactgtgactgattggagcgacacttcagatgtctaattccacatgtcagaagattattccagaagccagcagtatttcagtatcacagtgtttcagtaatttgcctccatgattctagtgcttctgccttaccgtgtttcccacagcaacacagagactgattcaaagaacaatggtctctttaatggcacccaatacagtattgaaaatcagatcatcaacagtatttcgaagcatgtaaaggtgtttaagacttccgctgctgcttaaaaataacatgtcattgaagtcataaaaagttttttcttcagaaaggtactctagtgttaagtgtatttttttcaactaattttttagtgaattttttttaaacttacagcatgttttggtttgaattactaaaactttaaaaaatatttttcttatgtatgctgtcgtatcgtaggcgtttatattataaaattctgttagtagtcttaaaattgaattggtggaaccactaatccttaaaagttagtctggttatttttcatatagaagtaagtttaatccgagtgtggtggtgttcacctttaatcccagctacttgggaggctgaggtgggaggataacttgagcacaggagttcaagaccagcgtgggcaatatagcaagactccacccctccacaccccaaaaaagtaagtttaggattagaatatagctaggtccaatgttaaatacattttcctggagtacatttgtcacattcagctttgagccactgtaagcatgttactattaaatggttggttattttatatagcatattctttatcttggatattttatgaataaagtatagttattttaagtgccaattaatttatcagactaaatagaaaatatttgagccattactgaattcacatatgtatgtttttttttactatttaaaatacccaacatgtattatgaaatacctcaaaagtaatttagttacattcttaaacaatgacattgtcgaaagaaagttcttataagctgttttttgcatttttataacttggttatactatattctgtttccaagtaaccttttaactaaaagatttgttgggttttagatctcttttcatttgtcaaccttttcagtaaagccctctgttacatca

SEQ ID NO: 342791 - DNA, 1622 bp, Homo sapiens
tgccagaggagccgggacaccgagggaagaggccggagggagatcgcggaggggagggggcgggaggggggtggggtatcctgagtcgtccgtggtccggagtctggaaggccctagagcggcgccagtcgacccgcctcgccacaacttgcccagaccagacacgtttcatcctgcgccctgcaagaaggagccggcctgcctctctccgctttgctgctcctcggcctccgcgggcccggcccgcgtcagcagcgaccctggggtctgggtcccctgtgtcgcccccgcccgcctgcagcgcccggcacccgcccaggagcgcgcagctggggttctagggacgtatacttgagcaagagagaccacagctcttgttcccgctgatcctgcagcccagtggatggagtccagaatctacagacctgccaggaaagaaaaaaaaattcctgatgtctggtccaagcaggaattccccggtggattggggaatgtctggcttttcctcagcttattgatctctgtggtaaccactggaggcccccagaagacccatagaaatgagaggcctgaggtctacaagtcgctgctagaaatattttagcctctccaaagcccagaatgcagccccgacccaagtttgtaagggttctgggtgcacgctgaccctgcgcgggcagacgcgccctttgctccaggtccggacctgggcgctgctatagcaacgtcctggacgcccagaccttaggccgccgccgccgcggaagcgaggaacccggccttctcccgctcctgagggctgtggcggcggcggcccgggaggcggcccaggctgggtaaagaccgcccggctcctcctatgcaagctgaggcagcggattggttttcaagcatgcccttccagaagcatgtctactacccgctcgccagcggcccagaggggcccgacgtcgctgtggccgccgccgccgcgggtgcggcctccatggcctgtgcgccccccagcgcggcttcggggcccctgcccttcttccagttcaggccgcggctggagagtgtggactggcggcggctgagcgccatcgacgtggacaaggtggcgggggctgtggacgtgctgacgctgcaggagaacatcatgaacatcaccttctgcaagctggaagacgagaagtgcccacactgccagtcgggggtggacccggtgctgctgaagctcatccgtctggcgcagttcaccatcgagtacttgctgcactcacaagagttcctcacctcgcagctgcacaccctggaggagcggctgcgcctgagccactgcgacggcgagcagagcaagaagctgctcaccaagcaggcgggggagatcaagacgctcaaggaagagtgcaaacgccggaagaagatgatctccacccagcagctgatgatcgaggccaaagccaactattaccaggattgtcaaaatgatttgtcttacccagaaggcccaagagtgctgcatttcttcaactctatcaagtttgaaagacatattggatgaagaatattcttagtcacactttccctctgaactttttgatgtggttcctttgtcttctggcagtaaatgttgctgtgag

SEQ ID NO: 342792 - DNA, 333 bp, Homo sapiens
aggtcatctttgagattctgactttctactttggtttccatacctttcatgtctacactcacagacacatgtacatccattcagtcatgtgtacatctgcatagtatcagaaaaatgcacagattgagaagctccggagtgagatcgtcgtattgaaggaagagctgcagctcaccaggtctgagctagaggctgcacaccatgccagtgcagtcagattctccaaggtaccaggcagaattctgtggtattttaattacaattaactgtatgtaattcaattatgccatggactctaataaacagaggacacttaagagtttgtgaatttga

SEQ ID NO: 342793 - DNA, 3330 bp, Homo sapiens
attgagacaggcacctctaagaaaagcccagagtgccactgggtcaaagcaccctgtattattccttgttaccattattgctccctgaagagggctctcatgtatctatgtaggataatccaacctcaacacagcggctgaaagaatctgctaaaaaataattcagtgccccaaaatacactgggctccaaataaactaaagagcaaaaattggctcatgtggcatgaaacaagtaatcgtatcccaagtaagaggacagtttccttcgtgttatcaacaggactgtaccccataagtttccaggtacatttggtaagagatggtgttttaacacgattttctgttgcaacagagtatcagaaaaatgcacagattgagaagctccggagtgagatcgtcgtattgaaggaagagctgcagctcaccaggtctgagctagaggctgcacaccatgccagtgcagtcagattctccaaggaatatgaaatgcagaaaacaaaagaggaagactttttgaagttatttgacaggtggaaagaagaagaaaaggagaaactagttgatgaaatggaaaaagtcaaggagatgtttatgaaggaatttaaagaattaacttcgaagaattcagcattagaatatcaactgtcagaaatccagaagtccaatatgcagatcaagtccaacataggcacattaaaagatgcacacgagtttaaagaagaccgttctccatatccccaggatttccataatgtcatgcagcttcttgatagtcaggaaagcaaatggacagctcgagttcaagctattcatcaagaacacaagaaagagaagggtcggctcctgtcacatatagagaaacttcgaacctcaatgatagatgatctaaatgcaagcaatgttttctataagaaaaggatagaagagctagggcagagactccaggagcagaatgagctgattataactcagagacagcagattaaagactttacctgtaatccattaaacagtatcagtgaacccaaaggaaatcctttagcctggcaggcttttgaatctcagccagctgctccagctgtgcctatgaatgccccagccctgcacactttggaaactaaatcaagtctgccaatggtgcatggaagggaaaatgaacagaaattaaataacaacaaaatgcatttaaggaaagctttgaagagtaactcctccctcactaagggactaagaacaatggtggagcagaacttgatggagaaactggaaaccttggggattaatgcagatatacgtggcatttcaagtgatcagttgcatagagtactaaaaagtgtggaatcagaaagacataagcaagaaagagaaatacctaactttcatcaaattcgagaattccttgaacatcaagtcagctgtaaaattgaggagaaagcactactctcttcagatcagtgcagtgtttctcaaatggataccctttcaactggagaagtacccaaaatgatacaacttccttccaaaaacagacaactgattagacaaaaagctgtttctactgataggacatctgttccaaaaattaagaaaaatgtcatggaagatccttttcccagaaagtcttcaactattacgacccctccttttagttcagaggaggagcaggaggacgacgacctcatccgggcatacgcatccccaggcccacttcctgtgccgccaccacaaaacaagggcagcttcgggaagaacacagtgaaaagtgacgcggacgggaccgagggaagcgaaatcgaggacactgatgattctcccaagcccgcaggagtcgccgttaaaacacctactgaaaaagttgaaaagatgtttccacatcgcaaaaatgtgaacaaaccagtcggtggaactaatgtccctgagatgtttatcaaaaaagaagaattacaagaactaaagtgtgcggatgtggaggatgaagactgggacatatcatccctagaggaagagatatctttgggaaaaaaatctgggaaagaacagaaggaacctccacctgcgaaaaatgaaccacattttgctcatgtgctaaatgcctggggcgcatttaatcctaaggggccaaagggagaaggacttcaagaaaatgaatcaagcacattaaaaagcagcttagtaactgtgactgattggagcgacacttcagatgtctaattccacatgtcagaagattattccagaagccagcagtatttcagtatcacagtgtttcagtaatttgcctccatgattctagtgcttctgccttaccgtgtttcccacagcaacacagagactgattcaaagaacaatggtctctttaatggcacccaatacagtattgaaaatcagatcatcaacagtatttcgaagcatgtaaaggtgtttaagacttccgctgctgcttaaaaataacatgtcattgaagtcataaaaagttttttcttcagaaaggtactctagtgttaagtgtatttttttcaactaattttttagtgaattttttttaaacttacagcatgttttggtttgaattactaaaactttaaaaaatatttttcttatgtatgctgtcgtatcgtaggcgtttatattataaaattctgttagtagtcttaaaattgaattggtggaaccactaatccttaaaagttagtctggttatttttcatatagaagtaagtttaatccgagtgtggtggtgttcacctttaatcccagctacttgggaggctgaggtgggaggataacttgagcacaggagttcaagaccagcgtgggcaatatagcaagactccacccctccacaccccaaaaaagtaagtttaggattagaatatagctaggtccaatgttaaatacattttcctggagtacatttgtcacattcagctttgagccactgtaagcatgttactattaaatggttggttattttatatagcatattctttatcttggatattttatgaataaagtatagttattttaagtgccaattaatttatcagactaaatagaaaatatttgagccattactgaattcacatatgtatgtttttttttactatttaaaatacccaacatgtattatgaaatacctcaaaagtaatttagttacattcttaaacaatgacattgtcgaaagaaagttcttataagctgttttttgcatttttataacttggttatactatattctgtttccaagtaaccttttaactaaaagatttgttgggttttagatctcttttcatttgtcaaccttttcagtaaagccctctgttacatca

SEQ ID NO: 342794 - DNA, 4661 bp, Homo sapiens
  misc_feature (4543)..(4543): n is a, c, g, or t
tgccagaggagccgggacaccgagggaagaggccggagggagatcgcggaggggagggggcgggaggggggtggggtatcctgagtcgtccgtggtccggagtctggaaggccctagagcggcgccagtcgacccgcctcgccacaacttgcccagaccagacacgtttcatcctgcgccctgcaagaaggagccggcctgcctctctccgctttgctgctcctcggcctccgcgggcccggcccgcgtcagcagcgaccctggggtctgggtcccctgtgtcgcccccgcccgcctgcagcgcccggcacccgcccaggagcgcgcagctggggttctagggacgtatacttgagcaagagagaccacagctcttgttcccgctgatcctgcagcccagtggatggagtccagaatctacagacctgccaggaaagaaaaaaaaattcctgatgtctggtccaagcaggaattccccggtggattggggaatgtctggcttttcctcagcttattgatctctgtggtaaccactggaggcccccagaagacccatagaaatgagaggcctgaggtctacaagtcgctgctagaaatattttagcctctccaaagcccagaatgcagccccgacccaagtttgtaagggttctgggtgcacgctgaccctgcgcgggcagacgcgccctttgctccaggtccggacctgggcgctgctatagcaacgtcctggacgcccagaccttaggccgccgccgccgcggaagcgaggaacccggccttctcccgctcctgagggctgtggcggcggcggcccgggaggcggcccaggctgggtaaagaccgcccggctcctcctatgcaagctgaggcagcggattggttttcaagcatgcccttccagaagcatgtctactacccgctcgccagcggcccagaggggcccgacgtcgctgtggccgccgccgccgcgggtgcggcctccatggcctgtgcgccccccagcgcggcttcggggcccctgcccttcttccagttcaggccgcggctggagagtgtggactggcggcggctgagcgccatcgacgtggacaaggtggcgggggctgtggacgtgctgacgctgcaggagaacatcatgaacatcaccttctgcaagctggaagacgagaagtgcccacactgccagtcgggggtggacccggtgctgctgaagctcatccgtctggcgcagttcaccatcgagtacttgctgcactcacaagagttcctcacctcgcagctgcacaccctggaggagcggctgcgcctgagccactgcgacggcgagcagagcaagaagctgctcaccaagcaggcgggggagatcaagacgctcaaggaagagtgcaaacgccggaagaagatgatctccacccagcagctgatgatcgaggccaaagccaactattaccagtgccatttttgtgacaaggcctttatgaaccaagcttttctacaaagtcacattcaacgccgccacactgaagaaaattctcattttgagtatcagaaaaatgcacagattgagaagctccggagtgagatcgtcgtattgaaggaagagctgcagctcaccaggtctgagctagaggctgcacaccatgccagtgcagtcagattctccaaggaatatgaaatgcagaaaacaaaagaggaagactttttgaagttatttgacaggtggaaagaagaagaaaaggagaaactagttgatgaaatggaaaaagtcaaggagatgtttatgaaggaatttaaagaattaacttcgaagaattcagcattagaatatcaactgtcagaaatccagaagtccaatatgcagatcaagtccaacataggcacattaaaagatgcacacgagtttaaagaagaccgttctccatatccccaggatttccataatgtcatgcagcttcttgatagtcaggaaagcaaatggacagctcgagttcaagctattcatcaagaacacaagaaagagaagggtcggctcctgtcacatatagagaaacttcgaacctcaatgatagatgatctaaatgcaagcaatgttttctataagaaaaggatagaagagctagggcagagactccaggagcagaatgagctgattataactcagagacagcagattaaagactttacctgtaatccattaaacagtatcagtgaacccaaaggaaatcctttagcctggcaggcttttgaatctcagccagctgctccagctgtgcctatgaatgccccagccctgcacactttggaaactaaatcaagtctgccaatggtgcatggaagggaaaatgaacagaaattaaataacaacaaaatgcatttaaggaaagctttgaagagtaactcctccctcactaagggactaagaacaatggtggagcagaacttgatggagaaactggaaaccttggggattaatgcagatatacgtggcatttcaagtgatcagttgcatagagtactaaaaagtgtggaatcagaaagacataagcaagaaagagaaatacctaactttcatcaaattcgagaattccttgaacatcaagtcagctgtaaaattgaggagaaagcactactctcttcagatcagtgcagtgtttctcaaatggataccctttcaactggagaagtacccaaaatgatacaacttccttccaaaaacagacaactgattagacaaaaagctgtttctactgataggacatctgttccaaaaattaagaaaaatgtcatggaagatccttttcccagaaagtcttcaactattacgacccctccttttagttcagaggaggagcaggaggacgacgacctcatccgggcatacgcatccccaggcccacttcctgtgccgccaccacaaaacaagggcagcttcgggaagaacacagtgaaaagtgacgcggacgggaccgagggaagcgaaatcgaggacactgatgattctcccaagcccgcaggagtcgccgttaaaacacctactgaaaaagttgaaaagatgtttccacatcgcaaaaatgtgaacaaaccagtcggtggaactaatgtccctgagatgtttatcaaaaaagaagaattacaagaactaaagtgtgcggatgtggaggatgaagactgggacatatcatccctagaggaagagatatctttgggaaaaaaatctgggaaagaacagaaggaacctccacctgcgaaaaatgaaccacattttgctcatgtgctaaatgcctggggcgcatttaatcctaaggggccaaagggagaaggacttcaagaaaatgaatcaagcacattaaaaagcagcttagtaactgtgactgattggagcgacacttcagatgtctaattccacatgtcagaagattattccagaagccagcagtatttcagtatcacagtgtttcagtaatttgcctccatgattctagtgcttctgccttaccgtgtttcccacagcaacacagagactgattcaaagaacaatggtctctttaatggcacccaatacagtattgaaaatcagatcatcaacagtatttcgaagcatgtaaaggtgtttaagacttccgctgctgcttaaaaataacatgtcattgaagtcataaaaagttttttcttcagaaaggtactctagtgttaagtgtatttttttcaactaattttttagtgaattttttttaaacttacagcatgttttggtttgaattactaaaactttaaaaaatatttttcttatgtatgctgtcgtatcgtaggcgtttatattataaaattctgttagtagtcttaaaattgaattggtggaaccactaatccttaaaagttagtctggttatttttcatatagaagtaagtttaatccgagtgtggtggtgttcacctttaatcccagctacttgggaggctgaggtgggaggataacttgagcacaggagttcaagaccagcgtgggcaatatagcaagactccacccctccacaccccaaaaaagtaagtttaggattagaatatagctaggtccaatgttaaatacattttcctggagtacatttgtcacattcagctttgagccactgtaagcatgttactattaaatggttggttattttatatagcatattctttatcttggatattttatgaataaagtatagttattttaagtgccaattaatttatcagactaaatagaaaatatttgagccattactgaattcacatatgtatgtttttttttactatttaaaatacccaacatgtattatgaaatacctcaaaagtaatttagttacattcttaaacaatgacattgtcgaaagaaagttcttataagctgttttttgcatttttataacttggttatactatattctgtttccaagtaaccttttaactaaaagatttgttgggttttagatctcttttcatttgtcaaccttttcagtaaagccctctgttacatcaaaaaaaaaacataatattaacntgaaaaataaagtaacaaatgtacaggttacaaagttttaataatattttagctggagttaatatcccgcctttatttgggtttggcccaggcacaagaggtagatttgacccctccc

SEQ ID NO: 342795 - DNA, 4521 bp, Homo sapiens
  misc_feature (4056)..(4057): n is a, c, g, or t
  misc_feature (4059)..(4059): n is a, c, g, or t
  misc_feature (4063)..(4063): n is a, c, g, or t
  misc_feature (4065)..(4065): n is a, c, g, or t
  misc_feature (4067)..(4067): n is a, c, g, or t
  misc_feature (4069)..(4069): n is a, c, g, or t
  misc_feature (4073)..(4073): n is a, c, g, or t
  misc_feature (4075)..(4075): n is a, c, g, or t
  misc_feature (4082)..(4082): n is a, c, g, or t
  misc_feature (4086)..(4086): n is a, c, g, or t
  misc_feature (4099)..(4099): n is a, c, g, or t
  misc_feature (4120)..(4120): n is a, c, g, or t
  misc_feature (4122)..(4122): n is a, c, g, or t
  misc_feature (4127)..(4127): n is a, c, g, or t
  misc_feature (4136)..(4137): n is a, c, g, or t
  misc_feature (4139)..(4139): n is a, c, g, or t
  misc_feature (4144)..(4144): n is a, c, g, or t
  misc_feature (4158)..(4158): n is a, c, g, or t
  misc_feature (4167)..(4167): n is a, c, g, or t
  misc_feature (4171)..(4171): n is a, c, g, or t
  misc_feature (4174)..(4174): n is a, c, g, or t
  misc_feature (4182)..(4183): n is a, c, g, or t
  misc_feature (4187)..(4187): n is a, c, g, or t
tgccagaggagccgggacaccgagggaagaggccggagggagatcgcggaggggagggggcgggaggggggtggggtatcctgagtcgtccgtggtccggagtctggaaggccctagagcggcgccagtcgacccgcctcgccacaacttgcccagaccagacacgtttcatcctgcgccctgcaagaaggagccggcctgcctctctccgctttgctgctcctcggcctccgcgggcccggcccgcgtcagcagcgaccctggggtctgggtcccctgtgtcgcccccgcccgcctgcagcgcccggcacccgcccaggagcgcgcagctggggttctagggacgtatacttgagcaagagagaccacagctcttgttcccgctgatcctgcagcccagtggatggagtccagaatctacagacctgccaggaaagaaaaaaaaattcctgatgtctggtccaagcaggaattccccggtggattggggaatgtctggcttttcctcagcttattgatctctgtggtaaccactggaggcccccagaagacccatagaaatgagaggcctgaggtctacaagtcgctgctagaaatattttagcctctccaaagcccagaatgcagccccgacccaagtttgtaagggttctgggtgcacgctgaccctgcgcgggcagacgcgccctttgctccaggtccggacctgggcgctgctatagcaacgtcctggacgcccagaccttaggccgccgccgccgcggaagcgaggaacccggccttctcccgctcctgagggctgtggcggcggcggcccgggaggcggcccaggctgggtaaagaccgcccggctcctcctatgcaagctgaggcagcggattggttttcaagcatgcccttccagaagcatgtctactacccgctcgccagcggcccagaggggcccgacgtcgctgtggccgccgccgccgcgggtgcggcctccatggcctgtgcgccccccagcgcggcttcggggcccctgcccttcttccagttcaggccgcggctggagagtgtggactggcggcggctgagcgccatcgacgtggacaaggtggcgggggctgtggacgtgctgacgctgcaggagaacatcatgaacatcaccttctgcaagctggaagacgagaagtgcccacactgccagtcgggggtggacccggtgctgctgaagctcatccgtctggcgcagttcaccatcgagtacttgctgcactcacaagagttcctcacctcgcagctgcacaccctggaggagcggctgcgcctgagccactgcgacggcgagcagagcaagaagctgctcaccaagcaggcgggggagatcaagacgctcaaggaagagtgcaaacgccggaagaagatgatctccacccagcagctgatgatcgaggccaaagccaactattaccagtgccatttttgtgacaaggcctttatgaaccaagcttttctacaaagtcacattcaacgccgccacactgaagaaaattctcattttgagtatcagaaaaatgcacagattgagaagctccggagtgagatcgtcgtattgaaggaagagctgcagctcaccaggtctgagctagaggctgcacaccatgccagtgcagtcagattctccaaggaatatgaaatgcagaaaacaaaagaggaagactttttgaagttatttgacaggtggaaagaagaagaaaaggagaaactagttgatgaaatggaaaaagtcaaggagatgtttatgaaggaatttaaagaattaacttcgaagaattcagcattagaatatcaactgtcagaaatccagaagtccaatatgcagatcaagtccaacataggcacattaaaagatgcacacgagtttaaagaagaccgttctccatatccccaggatttccataatgtcatgcagcttcttgatagtcaggaaagcaaatggacagctcgagttcaagctattcatcaagaacacaagaaagagaagggtcggctcctgtcacatatagagaaacttcgaacctcaatgatagatgatctaaatgcaagcaatgttttctataagaaaaggatagaagagctagggcagagactccaggagcagaatgagctgattataactcagagacagcagattaaagactttacctgtaatccattaaacagtatcagtgaacccaaaggaaatcctttagcctggcaggcttttgaatctcagccagctgctccagctgtgcctatgaatgccccagccctgcacactttggaaactaaatcaagtctgccaatggtgcatggaagggaaaatgaacagaaattaaataacaacaaaatgcatttaaggaaagctttgaagagtaactcctccctcactaagggactaagaacaatggtggagcagaacttgatggagaaactggaaaccttggggattaatgcagatatacgtggcatttcaagtgatcagttgcatagagtactaaaaagtgtggaatcagaaagacataagcaagaaagagaaatacctaactttcatcaaattcgagaattccttgaacatcaagtcagctgtaaaattgaggagaaagcactactctcttcagatcagtgcagtgtttctcaaatggataccctttcaactggagaagtacccaaaatgatacaacttccttccaaaaacagacaactgattagacaaaaagctgtttctactgataggacatctgttccaaaaattaagaaaaatgtcatggaagatccttttcccagaaagtcttcaactattacgacccctccttttagttcagaggaggagcaggaggacgacgacctcatccgggcatacgcatccccaggcccacttcctgtgccgccaccacaaaacaagggcagcttcgggaagaacacagtgaaaagtgacgcggacgggaccgagggaagcgaaatcgaggacactgatgattctcccaagcccgcaggagtcgccgttaaaacacctactgaaaaagttgaaaagatgtttccacatcgcaaaaatgtgaacaaaccagtcggtggaactaatgtccctgagatgtttatcaaaaaagaagaattacaagaactaaagtgtgcggatgtggaggatgaagactgggacatatcatccctagaggaagagatatctttgggaaaaaaatctgggaaagaacagaaggaacctccacctgcgaaaaatgaaccacattttgctcatgtgctaaatgcctggggcgcatttaatcctaaggggccaaagggagaaggacttcaagaaaatgaatcaagcacattaaaaagcagcttagtaactgtgactgattggagcgacacttcagatgtctaattccacatgtcagaagattattccagaagccagcagtatttcagtatcacagtgtttcagtaatttgcctccatgattctagtgcttctgccttaccgtgtttcccacagcaacacagagactgattcaaagaacaatggtctctttaatggcacccaatacagtattgaaaatcagatcatcaacagtatttcgaagcatgtaaaggtgtttaagacttccgctgctgcttaaaaataacatgtcattgaagtcataaaaagttttttcttcagaaaggtactctagtgttaagtgtatttttttcaactaattttttagtgaattttttttaaacttacagcatgttttggtttgaattactaaaactttaaaaaatatttttcttatgtatgctgtcgtatcgtaggcgtttatattataaaattctgttagtagtcttaaaattgaattggtggaaccactaatccttaaaagttagtctggttatttttcatatagaagtaagtttaatccgagtgtggtggtgttcacctttaatcccagctacttgggaggctgaggtgggaggataacttgagcacaggagttcaagaccagcgtgggcaatatagcaagactccacccctccacaccccccccccccccccccnngncccncncncngccngnccccctncccnacccccccccccngagcccccccgcccccccccncnctgcncccccctanncncgtcncccccaaatggtcngcccccccncatngcncacccccnncccnggatattttatgaataaagtatagttattttaagtgccaattaatttatcagactaaatagaaaatatttgagccattactgaattcacatatgtatgtttttttttactatttaaaatacccaacatgtattatgaaatacctcaaaagtaatttagttacattcttaaacaatgacattgtcgaaagaaagttcttataagctgttttttgcatttttataacttggttatactatattctgtttccaagtaaccttttaactaaaagatttgttgggttttagatctcttttcatttgtcaaccttttcagtaaagccctctgttacatca

SEQ ID NO: 342796 - DNA, 1827 bp, Homo sapiens
gccccaaaggacttgtgcccactgagaattacctgagaaaggtgccaccactttaagaggcacatctcttaatattataaatcctaaagcgttacgaaaacagcgcccctatctcggtgttgatttgtgtaggacccctccttttagttcagaggaggagcaggaggacgacgacctcatccgggcatacgcatccccaggcccacttcctgtgccgccaccacaaaacaagggcagcttcgggaagaacacagtgaaaagtgacgcggacgggaccgagggaagcgaaatcgaggacactgatgattctcccaagcccgcaggagtcgccgttaaaacacctactgaaaaagttgaaaagatgtttccacatcgcaaaaatgtgaacaaaccagtcggtggaactaatgtccctgagatgtttatcaaaaaagaagaattacaagaactaaagtgtgcggatgtggaggatgaagactgggacatatcatccctagaggaagagatatctttgggaaaaaaatctgggaaagaacagaaggaacctccacctgcgaaaaatgaaccacattttgctcatgtgctaaatgcctggggcgcatttaatcctaaggggccaaagggagaaggacttcaagaaaatgaatcaagcacattaaaaagcagcttagtaactgtgactgattggagcgacacttcagatgtctaattccacatgtcagaagattattccagaagccagcagtatttcagtatcacagtgtttcagtaatttgcctccatgattctagtgcttctgccttaccgtgtttcccacagcaacacagagactgattcaaagaacaatggtctctttaatggcacccaatacagtattgaaaatcagatcatcaacagtatttcgaagcatgtaaaggtgtttaagacttccgctgctgcttaaaaataacatgtcattgaagtcataaaaagttttttcttcagaaaggtactctagtgttaagtgtatttttttcaactaattttttagtgaattttttttaaacttacagcatgttttggtttgaattactaaaactttaaaaaatatttttcttatgtatgctgtcgtatcgtaggcgtttatattataaaattctgttagtagtcttaaaattgaattggtggaaccactaatccttaaaagttagtctggttatttttcatatagaagtaagtttaatccgagtgtggtggtgttcacctttaatcccagctacttgggaggctgaggtgggaggataacttgagcacaggagttcaagaccagcgtgggcaatatagcaagactccacccctccacaccccaaaaaagtaagtttaggattagaatatagctaggtccaatgttaaatacattttcctggagtacatttgtcacattcagctttgagccactgtaagcatgttactattaaatggttggttattttatatagcatattctttatcttggatattttatgaataaagtatagttattttaagtgccaattaatttatcagactaaatagaaaatatttgagccattactgaattcacatatgtatgtttttttttactatttaaaatacccaacatgtattatgaaatacctcaaaagtaatttagttacattcttaaacaatgacattgtcgaaagaaagttcttataagctgttttttgcatttttataacttggttatactatattctgtttccaagtaaccttttaactaaaagatttgttgggttttagatctcttttcatttgtcaaccttttcagtaaagccctctgttacatca

SEQ ID NO: 342797 - DNA, 3547 bp, Homo sapiens
tgccagaggagccgggacaccgagggaagaggccggagggagatcgcggaggggagggggcgggaggggggtggggtatcctgagtcgtccgtggtccggagtctggaaggccctagagcggcgccagtcgacccgcctcgccacaacttgcccagaccagacacgtttcatcctgcgccctgcaagaaggagccggcctgcctctctccgctttgctgctcctcggcctccgcgggcccggcccgcgtcagcagcgaccctggggtctgggtcccctgtgtcgcccccgcccgcctgcagcgcccggcacccgcccaggagcgcgcagctggggttctagggacgtatacttgagcaagagagaccacagctcttgttcccgctgatcctgcagcccagtggatggagtccagaatctacagacctgccaggaaagaaaaaaaaattcctgatgtctggtccaagcaggaattccccggtggattggggaatgtctggcttttcctcagcttattgatctctgtggtaaccactggaggcccccagaagacccatagaaatgagaggcctgaggtctacaagtcgctgctagaaatattttagcctctccaaagcccagaatgcagccccgacccaagtttgtaagggttctgggtgcacgctgaccctgcgcgggcagacgcgccctttgctccaggtccggacctgggcgctgctatagcaacgtcctggacgcccagaccttaggccgccgccgccgcggaagcgaggaacccggccttctcccgctcctgagggctgtggcggcggcggcccgggaggcggcccaggctgggtaaagaccgcccggctcctcctatgcaagctgaggcagcggattggttttcaagcatgcccttccagaagcatgtctactacccgctcgccagcggcccagaggggcccgacgtcgctgtggccgccgccgccgcgggtgcggcctccatggcctgtgcgccccccagcgcggcttcggggcccctgcccttcttccagttcaggccgcggctggagagtgtggactggcggcggctgagcgccatcgacgtggacaaggtggcgggggctgtggacgtgctgacgctgcaggagaacatcatgaacatcaccttctgcaagctggaagacgagaagtgcccacactgccagtcgggggtggacccggtgctgctgaagctcatccgtctggcgcagttcaccatcgagtacttgctgcactcacaagagttcctcacctcgcagctgcacaccctggaggagcggctgcgcctgagccactgcgacggcgagcagagcaagaagctgctcaccaagcaggcgggggagatcaagacgctcaaggaagagtgcaaacgccggaagaagatgatctccacccagcagctgatgatcgaggccaaagccaactattaccagtgccatttttgtgacaaggcctttatgaaccaagcttttctacaaagtcacattcaacgccgccacactgaagaaaattctcattttgagtatcagaaaaatgcacagattgagaagctccggagtgagatcgtcgtattgaaggaagagctgcagctcaccaggtctgagctagaggctgcacaccatgccagtgcagtcagattctccaaggaatatgaaatgcagaaaacaaaagaggaagactttttgaagttatttgacaggtggaaagaagaagaaaaggagaaactagttgatgaaatggaaaaagtcaaggagatgtttatgaaggaatttaaagaattaacttcgaagaattcagcattagaatatcaactgtcagaaatccagaagtccaatatgcagatcaagtccaacataggcacattaaaagatgcacacgagtttaaagaagaccgttctccatatccccaggatttccataatgtcatgcagcttcttgatagtcaggaaagcaaatggacagctcgagttcaagctattcatcaagaacacaagaaagagaagggtcggctcctgtcacatatagagaaacttcgaacctcaatgatagatgatctaaatgcaagcaatgttttctataagaaaaggatagaagagctagggcagagactccaggagcagaatgagctgattataactcagagacagcagattaaagactttacctgtaatccattaaacagtatcagtgaacccaaaggaaatcctttagcctggcaggcttttgaatctcagccagctgctccagctgtgcctatgaatgccccagccctgcacactttggaaactaaatcaagtctgccaatggtgcatggaagggaaaatgaacagaaattaaataacaacaaaatgcatttaaggaaagctttgaagagtaactcctccctcactaagggactaagaacaatggtggagcagaacttgatggagaaactggaaaccttggggattaatgcagatatacgtggcatttcaagtgatcagttgcatagagtactaaaaagtgtggaatcagaaagacataagcaagaaagagaaatacctaactttcatcaaattcgagaattccttgaacatcaagtcagctgtaaaattgaggagaaagcactactctcttcagatcagtgcagtgtttctcaaatggataccctttcaactggagaagtacccaaaatgatacaacttccttccaaaaacagacaactgattagacaaaaagctgtttctactgataggacatctgttccaaaaattaagaaaaatgtcatggaagatccttttcccagaaagtcttcaactattacgacccctccttttagttcagaggaggagcaggaggacgacgacctcatccgggcatacgcatccccaggcccacttcctgtgccgccaccacaaaacaagggcagcttcgggaagaacacagtgaaaagtgacgcggacgggaccgagggaagcgaaatcgaggacactgatgattctcccaagcccgcaggagtcgccgttaaaacacctactgaaaaagttgaaaagatgtttccacatcgcaaaaatgtgaacaaaccagtcggtggaactaatgtccctgagatgtttatcaaaaaagaagaattacaagaactaaaggtgaaatcacttttacttgctagatatacataaatttgtctttggacagcaccttaatggtcacactttttgtagtgaaatataaaacagatagttagctggtagagtagaggttgagattttcacctttcttgttctcagtattgcatttctttccattccatagacaaagatattggagtgataactgtaacaatacataataagcatgacactttacaggttttcaagatcctgtcacatgtattatctgatacttgcagatatcaaatggtttgtacaaagaaatttgtgactggccagaattggggcccttcagatcttcttcactaccctggcatgagaccttaggtacttttgagggtttagctccacttgggagccgaagtgagggtggag

SEQ ID NO: 342798 - DNA, 746 bp, Homo sapiens
aattcacatatgtatgtttttttttactatttaaaatacccaacatgtattatgaaatacctcaaaagtaatttagttacattcttaaacaatgacattgtcgaaagaaagttcttataagctgttttttgcatttttataacttggttatactatattctgtttccaagtaaccttttaactaaaagatttgttgggttttagatctcttttcatttgtcaaccttttcagtaaagccctctgttacatcactgtgactgtggctgtgttattagagatgaattctgagttaaatttgtacttattaggggtcttacagagggagaatctggccttgattgctatgccatatgacattctgtcctaatggttagaacaaatctttatctgtttccacccaccctgggatcctttttacttgtagcccattcctgccctctaaaagaatccttccaacttcctataggggccatttcatgcagatatactcactttatatgtatgtttctaaaagctttagtgaaggctgaatccaagtttcatgtagtaggacagagaacagaaggccgaatccaagtttcatgtggtaggacagagaacggcaatctacaaaactacaccaagcctaagatggcccatgtgccactttgttcattcatttatttattcagcagatatttattgaaccacttggtctggtttggttttgaacacgcactaattcatttaattacaacaactttgc

SEQ ID NO: 342799 - DNA, 399 bp, Homo sapiens
cccacttctttccttatggttcagtgttagatgctcagtctaaccaataaaatgattgagggacaccatttttttctaagcaacattaattattctccatgcctttcttttagtgtgcggatgtggaggatgaagactgggacatatcatccctagaggaagagatatctttgggaaaaaaatctgggaaagaacagaaggaacctccacctgcgaaaaatgaaccacattttgctcatgtgctaaatgcctggggcgcatttaatcctaaggggccaaagggagaaggtttgctgctttcccctctaatacaagctcgatccattttcttattagttgtgtttcatctttataaatatctaattaacttatgctggtatatcatcagacaaaaaagct

SEQ ID NO: 342800 - DNA, 4521 bp, Homo sapiens
tgccagaggagccgggacaccgagggaagaggccggagggagatcgcggaggggagggggcgggaggggggtggggtatcctgagtcgtccgtggtccggagtctggaaggccctagagcggcgccagtcgacccgcctcgccacaacttgcccagaccagacacgtttcatcctgcgccctgcaagaaggagccggcctgcctctctccgctttgctgctcctcggcctccgcgggcccggcccgcgtcagcagcgaccctggggtctgggtcccctgtgtcgcccccgcccgcctgcagcgcccggcacccgcccaggagcgcgcagctggggttctagggacgtatacttgagcaagagagaccacagctcttgttcccgctgatcctgcagcccagtggatggagtccagaatctacagacctgccaggaaagaaaaaaaaattcctgatgtctggtccaagcaggaattccccggtggattggggaatgtctggcttttcctcagcttattgatctctgtggtaaccactggaggcccccagaagacccatagaaatgagaggcctgaggtctacaagtcgctgctagaaatattttagcctctccaaagcccagaatgcagccccgacccaagtttgtaagggttctgggtgcacgctgaccctgcgcgggcagacgcgccctttgctccaggtccggacctgggcgctgctatagcaacgtcctggacgcccagaccttaggccgccgccgccgcggaagcgaggaacccggccttctcccgctcctgagggctgtggcggcggcggcccgggaggcggcccaggctgggtaaagaccgcccggctcctcctatgcaagctgaggcagcggattggttttcaagcatgcccttccagaagcatgtctactacccgctcgccagcggcccagaggggcccgacgtcgctgtggccgccgccgccgcgggtgcggcctccatggcctgtgcgccccccagcgcggcttcggggcccctgcccttcttccagttcaggccgcggctggagagtgtggactggcggcggctgagcgccatcgacgtggacaaggtggcgggggctgtggacgtgctgacgctgcaggagaacatcatgaacatcaccttctgcaagctggaagacgagaagtgcccacactgccagtcgggggtggacccggtgctgctgaagctcatccgtctggcgcagttcaccatcgagtacttgctgcactcacaagagttcctcacctcgcagctgcacaccctggaggagcggctgcgcctgagccactgcgacggcgagcagagcaagaagctgctcaccaagcaggcgggggagatcaagacgctcaaggaagagtgcaaacgccggaagaagatgatctccacccagcagctgatgatcgaggccaaagccaactattaccagtgccatttttgtgacaaggcctttatgaaccaagcttttctacaaagtcacattcaacgccgccacactgaagaaaattctcattttgagtatcagaaaaatgcacagattgagaagctccggagtgagatcgtcgtattgaaggaagagctgcagctcaccaggtctgagctagaggctgcacaccatgccagtgcagtcagattctccaaggaatatgaaatgcagaaaacaaaagaggaagactttttgaagttatttgacaggtggaaagaagaagaaaaggagaaactagttgatgaaatggaaaaagtcaaggagatgtttatgaaggaatttaaagaattaacttcgaagaattcagcattagaatatcaactgtcagaaatccagaagtccaatatgcagatcaagtccaacataggcacattaaaagatgcacacgagtttaaagaagaccgttctccatatccccaggatttccataatgtcatgcagcttcttgatagtcaggaaagcaaatggacagctcgagttcaagctattcatcaagaacacaagaaagagaagggtcggctcctgtcacatatagagaaacttcgaacctcaatgatagatgatctaaatgcaagcaatgttttctataagaaaaggatagaagagctagggcagagactccaggagcagaatgagctgattataactcagagacagcagattaaagactttacctgtaatccattaaacagtatcagtgaacccaaaggaaatcctttagcctggcaggcttttgaatctcagccagctgctccagctgtgcctatgaatgccccagccctgcacactttggaaactaaatcaagtctgccaatggtgcatggaagggaaaatgaacagaaattaaataacaacaaaatgcatttaaggaaagctttgaagagtaactcctccctcactaagggactaagaacaatggtggagcagaacttgatggagaaactggaaaccttggggattaatgcagatatacgtggcatttcaagtgatcagttgcatagagtactaaaaagtgtggaatcagaaagacataagcaagaaagagaaatacctaactttcatcaaattcgagaattccttgaacatcaagtcagctgtaaaattgaggagaaagcactactctcttcagatcagtgcagtgtttctcaaatggataccctttcaactggagaagtacccaaaatgatacaacttccttccaaaaacagacaactgattagacaaaaagctgtttctactgataggacatctgttccaaaaattaagaaaaatgtcatggaagatccttttcccagaaagtcttcaactattacgacccctccttttagttcagaggaggagcaggaggacgacgacctcatccgggcatacgcatccccaggcccacttcctgtgccgccaccacaaaacaagggcagcttcgggaagaacacagtgaaaagtgacgcggacgggaccgagggaagcgaaatcgaggacactgatgattctcccaagcccgcaggagtcgccgttaaaacacctactgaaaaagttgaaaagatgtttccacatcgcaaaaatgtgaacaaaccagtcggtggaactaatgtccctgagatgtttatcaaaaaagaagaattacaagaactaaagtgtgcggatgtggaggatgaagactgggacatatcatccctagaggaagagatatctttgggaaaaaaatctgggaaagaacagaaggaacctccacctgcgaaaaatgaaccacattttgctcatgtgctaaatgcctggggcgcatttaatcctaaggggccaaagggagaaggacttcaagaaaatgaatcaagcacattaaaaagcagcttagtaactgtgactgattggagcgacacttcagatgtctaattccacatgtcagaagattattccagaagccagcagtatttcagtatcacagtgtttcagtaatttgcctccatgattctagtgcttctgccttaccgtgtttcccacagcaacacagagactgattcaaagaacaatggtctctttaatggcacccaatacagtattgaaaatcagatcatcaacagtatttcgaagcatgtaaaggtgtttaagacttccgctgctgcttaaaaataacatgtcattgaagtcataaaaagttttttcttcagaaaggtactctagtgttaagtgtatttttttcaactaattttttagtgaattttttttaaacttacagcatgttttggtttgaattactaaaactttaaaaaatatttttcttatgtatgctgtcgtatcgtaggcgtttatattataaaattctgttagtagtcttaaaattgaattggtggaaccactaatccttaaaagttagtctggttatttttcatatagaagtaagtttaatccgagtgtggtggtgttcacctttaatcccagctacttgggaggctgaggtgggaggataacttgagcacaggagttcaagaccagcgtgggcaatatagcaagactccacccctccacaccccaaaaaagtaagtttaggattagaatatagctaggtccaatgttaaatacattttcctggagtacatttgtcacattcagctttgagccactgtaagcatgttactattaaatggttggttattttatatagcatattctttatcttggatattttatgaataaagtatagttattttaagtgccaattaatttatcagactaaatagaaaatatttgagccattactgaattcacatatgtatgtttttttttactatttaaaatacccaacatgtattatgaaatacctcaaaagtaatttagttacattcttaaacaatgacattgtcgaaagaaagttcttataagctgttttttgcatttttataacttggttatactatattctgtttccaagtaaccttttaactaaaagatttgttgggttttagatctcttttcatttgtcaaccttttcagtaaagccctctgttacatca

SEQ ID NO: 342801 - DNA, 4867 bp, Homo sapiens
tgccagaggagccgggacaccgagggaagaggccggagggagatcgcggaggggagggggcgggaggggggtggggtatcctgagtcgtccgtggtccggagtctggaaggccctagagcggcgccagtcgacccgcctcgccacaacttgcccagaccagacacgtttcatcctgcgccctgcaagaaggagccggcctgcctctctccgctttgctgctcctcggcctccgcgggcccggcccgcgtcagcagcgaccctggggtctgggtcccctgtgtcgcccccgcccgcctgcagcgcccggcacccgcccaggagcgcgcagctggggttctagggacgtatacttgagcaagagagaccacagctcttgttcccgctgatcctgcagcccagtggatggagtccagaatctacagacctgccaggaaagaaaaaaaaattcctgatgtctggtccaagcaggaattccccggtggattggggaatgtctggcttttcctcagcttattgatctctgtggtaaccactggaggcccccagaagacccatagaaatgagaggcctgaggtctacaagtcgctgctagaaatattttagcctctccaaagcccagaatgcagccccgacccaagtttgtaagggttctgggtgcacgctgaccctgcgcgggcagacgcgccctttgctccaggtccggacctgggcgctgctatagcaacgtcctggacgcccagaccttaggccgccgccgccgcggaagcgaggaacccggccttctcccgctcctgagggctgtggcggcggcggcccgggaggcggcccaggctgggtaaagaccgcccggctcctcctatgcaagctgaggcagcggattggttttcaagcatgcccttccagaagcatgtctactacccgctcgccagcggcccagaggggcccgacgtcgctgtggccgccgccgccgcgggtgcggcctccatggcctgtgcgccccccagcgcggcttcggggcccctgcccttcttccagttcaggccgcggctggagagtgtggactggcggcggctgagcgccatcgacgtggacaaggtggcgggggctgtggacgtgctgacgctgcaggagaacatcatgaacatcaccttctgcaagctggaagacgagaagtgcccacactgccagtcgggggtggacccggtgctgctgaagctcatccgtctggcgcagttcaccatcgagtacttgctgcactcacaagagttcctcacctcgcagctgcacaccctggaggagcggctgcgcctgagccactgcgacggcgagcagagcaagaagctgctcaccaagcaggcgggggagatcaagacgctcaaggaagagtgcaaacgccggaagaagatgatctccacccagcagctgatgatcgaggccaaagccaactattaccagtgccatttttgtgacaaggcctttatgaaccaagcttttctacaaagtcacattcaacgccgccacactgaagaaaattctcattttgagtatcagaaaaatgcacagattgagaagctccggagtgagatcgtcgtattgaaggaagagctgcagctcaccaggtctgagctagaggctgcacaccatgccagtgcagtcagattctccaaggaatatgaaatgcagaaaacaaaagaggaagactttttgaagttatttgacaggtggaaagaagaagaaaaggagaaactagttgatgaaatggaaaaagtcaaggagatgtttatgaaggaatttaaagaattaacttcgaagaattcagcattagaatatcaactgtcagaaatccagaagtccaatatgcagatcaagtccaacataggcacattaaaagatgcacacgagtttaaagaagaccgttctccatatccccaggatttccataatgtcatgcagcttcttgatagtcaggaaagcaaatggacagctcgagttcaagctattcatcaagaacacaagaaagagaagggtcggctcctgtcacatatagagaaacttcgaacctcaatgatagatgatctaaatgcaagcaatgttttctataagaaaaggatagaagagctagggcagagactccaggagcagaatgagctgattataactcagagacagcagattaaagactttacctgtaatccattaaacagtatcagtgaacccaaaggaaatcctttagcctggcaggcttttgaatctcagccagctgctccagctgtgcctatgaatgccccagccctgcacactttggaaactaaatcaagtctgccaatggtgcatggaagggaaaatgaacagaaattaaataacaacaaaatgcatttaaggaaagctttgaagagtaactcctccctcactaagggactaagaacaatggtggagcagaacttgatggagaaactggaaaccttggggattaatgcagatatacgtggcatttcaagtgatcagttgcatagagtactaaaaagtgtggaatcagaaagacataagcaagaaagagaaatacctaactttcatcaaattcgagaattccttgaacatcaagtcagctgtaaaattgaggagaaagcactactctcttcagatcagtgcagtgtttctcaaatggataccctttcaactggagaagtacccaaaatgatacaacttccttccaaaaacagacaactgattagacaaaaagctgtttctactgataggacatctgttccaaaaattaagaaaaatgtcatggaagatccttttcccagaaagtcttcaactattacgacccctccttttagttcagaggaggagcaggaggacgacgacctcatccgggcatacgcatccccaggcccacttcctgtgccgccaccacaaaacaagggcagcttcgggaagaacacagtgaaaagtgacgcggacgggaccgagggaagcgaaatcgaggacactgatgattctcccaagcccgcaggagtcgccgttaaaacacctactgaaaaagttgaaaagatgtttccacatcgcaaaaatgtgaacaaaccagtcggtggaactaatgtccctgagatgtttatcaaaaaagaagaattacaagaactaaagtgtgcggatgtggaggatgaagactgggacatatcatccctagaggaagagatatctttgggaaaaaaatctgggaaagaacagaaggaacctccacctgcgaaaaatgaaccacattttgctcatgtgctaaatgcctggggcgcatttaatcctaaggggccaaagggagaaggacttcaagaaaatgaatcaagcacattaaaaagcagcttagtaactgtgactgattggagcgacacttcagatgtctaattccacatgtcagaagattattccagaagccagcagtatttcagtatcacagtgtttcagtaatttgcctccatgattctagtgcttctgccttaccgtgtttcccacagcaacacagagactgattcaaagaacaatggtctctttaatggcacccaatacagtattgaaaatcagatcatcaacagtatttcgaagcatgtaaaggtgtttaagacttccgctgctgcttaaaaataacatgtcattgaagtcataaaaagttttttcttcagaaaggtactctagtgttaagtgtatttttttcaactaattttttagtgaattttttttaaacttacagcatgttttggtttgaattactaaaactttaaaaaatatttttcttatgtatgctgtcgtatcgtaggcgtttatattataaaattctgttagtagtcttaaaattgaattggtggaaccactaatccttaaaagttagtctggttatttttcatatagaagtaagtttaatccgagtgtggtggtgttcacctttaatcccagctacttgggaggctgaggtgggaggataacttgagcacaggagttcaagaccagcgtgggcaatatagcaagactccacccctccacaccccaaaaaagtaagtttaggattagaatatagctaggtccaatgttaaatacattttcctggagtacatttgtcacattcagctttgagccactgtaagcatgttactattaaatggttggttattttatatagcatattctttatcttggatattttatgaataaagtatagttattttaagtgccaattaatttatcagactaaatagaaaatatttgagccattactgaattcacatatgtatgtttttttttactatttaaaatacccaacatgtattatgaaatacctcaaaagtaatttagttacattcttaaacaatgacattgtcgaaagaaagttcttataagctgttttttgcatttttataacttggttatactatattctgtttccaagtaaccttttaactaaaagatttgttgggttttagatctcttttcatttgtcaaccttttcagtaaagccctctgttacatcaaaaaaaaaaaaaaaaaaaaaaaaaaaaaaaaaaaaaaaaaaaaaaaaaaaaaaaaaaaaaaaaaaaaaaaaaaaaaaaaaaaggggggggggggcaaattttccccggggggggccccatgtcggcggcccacccccgttttttttttatccagagggggcctcaccattaaggggcggtgtctttataaacgagcagacggcgggcgcggctctttaaacaaccgcggtgctgagtgggacacacgctcgctgcgctgcggcaggcccttttgaggaagagaagcccacactttcgtggcgcggggggcacaatcattgggcagcaccctctcagcggaggtgtt

SEQ ID NO: 342802 - DNA, 3684 bp, Homo sapiens
tgccagaggagccgggacaccgagggaagaggccggagggagatcgcggaggggagggggcgggaggggggtggggtatcctgagtcgtccgtggtccggagtctggaaggccctagagcggcgccagtcgacccgcctcgccacaacttgcccagaccagacacgtttcatcctgcgccctgcaagaaggagccggcctgcctctctccgctttgctgctcctcggcctccgcgggcccggcccgcgtcagcagcgaccctggggtctgggtcccctgtgtcgcccccgcccgcctgcagcgcccggcacccgcccaggagcgcgcagctggggttctagggacgtatacttgagcaagagagaccacagctcttgttcccgctgatcctgcagcccagtggatggagtccagaatctacagacctgccaggaaagaaaaaaaaattcctgatgtctggtccaagcaggaattccccggtggattggggaatgtctggcttttcctcagcttattgatctctgtggtaaccactggaggcccccagaagacccatagaaatgagaggcctgaggtctacaagtcgctgctagaaatattttagcctctccaaagcccagaatgcagccccgacccaagtttgtaagggttctgggtgcacgctgaccctgcgcgggcagacgcgccctttgctccaggtccggacctgggcgctgctatagcaacgtcctggacgcccagaccttaggccgccgccgccgcggaagcgaggaacccggccttctcccgctcctgagggctgtggcggcggcggcccgggaggcggcccaggctgggtaaagaccgcccggctcctcctatgcaagctgaggcagcggattggttttcaagcatgcccttccagaagcatgtctactacccgctcgccagcggcccagaggggcccgacgtcgctgtggccgccgccgccgcgggtgcggcctccatggcctgtgcgccccccagcgcggcttcggggcccctgcccttcttccagttcaggccgcggctggagagtgtggactggcggcggctgagcgccatcgacgtggacaaggtggcgggggctgtggacgtgctgacgctgcaggagaacatcatgaacatcaccttctgcaagctggaagacgagaagtgcccacactgccagtcgggggtggacccggtgctgctgaagctcatccgtctggcgcagttcaccatcgagtacttgctgcactcacaagagttcctcacctcgcagctgcacaccctggaggagcggctgcgcctgagccactgcgacggcgagcagagcaagaagctgctcaccaagcaggcgggggagatcaagacgctcaaggaagagtgcaaacgccggaagaagatgatctccacccagcagctgatgatcgaggccaaagccaactattaccagtgccatttttgtgacaaggcctttatgaaccaagcttttctacaaagtcacattcaacgccgccacactgaagaaaattctcattttgagtatcagaaaaatgcacagattgagaagctccggagtgagatcgtcgtattgaaggaagagctgcagctcaccaggtctgagctagaggctgcacaccatgccagtgcagtcagattctccaaggaatatgaaatgcagaaaacaaaagaggaagactttttgaagttatttgacaggtggaaagaagaagaaaaggagaaactagttgatgaaatggaaaaagtcaaggagatgtttatgaaggaatttaaagaattaacttcgaagaattcagcattagaatatcaactgtcagaaatccagaagtccaatatgcagatcaagtccaacataggcacattaaaagatgcacacgagtttaaagaagaccgttctccatatccccaggatttccataatgtcatgcagcttcttgatagtcaggaaagcaaatggacagctcgagttcaagctattcatcaagaacacaagaaagagaagggtcggctcctgtcacatatagagaaacttcgaacctcaatgatagatgatctaaatgcaagcaatgttttctataagaaaaggatagaagagctagggcagagactccaggagcagaatgagctgattataactcagagacagcagattaaagactttacctgtaatccattaaacagtatcagtgaacccaaaggaaatcctttagcctggcaggcttttgaatctcagccagctgctccagctgtgcctatgaatgccccagccctgcacactttggaaactaaatcaagtctgccaatggtgcatggaagggaaaatgaacagaaattaaataacaacaaaatgcatttaaggaaagctttgaagagtaactcctccctcactaagggactaagaacaatggtggagcagaacttgatggagaaactggaaaccttggggattaatgcagatatacgtggcatttcaagtgatcagttgcatagagtactaaaaagtgtggaatcagaaagacataagcaagaaagagaaatacctaactttcatcaaattcgagaattccttgaacatcaagtcagctgtaaaattgaggagaaagcactactctcttcagatcagtgcagtgtttctcaaatggataccctttcaactggagaagtacccaaaatgatacaacttccttccaaaaacagacaactgattagacaaaaagctgtttctactgataggacatctgttccaaaaattaagaaaaatgtcatggaagatccttttcccagaaagtcttcaactattacgacccctccttttagttcagaggaggagcaggaggacgacgacctcatccgggcatacgcatccccaggcccacttcctgtgccgccaccacaaaacaagggcagcttcgggaagaacacagtgaaaagtgacgcggacgggaccgagggaagcgaaatcgaggacactgatgattctcccaagcccgcaggagtcgccgttaaaacacctactgaaaaagttgaaaagatgtttccacatcgcaaaaatgtgaacaaaccagtcggtggaactaatgtccctgagatgtttatcaaaaaagaagaattacaagaactaaagtgtgcggatgtggaggatgaagactgggacatatcatccctagaggaagagatatctttgggaaaaaaatctgggaaagaacagaaggaacctccacctgcgaaaaatgaaccacattttgctcatgtgctaaatgcctggggcgcatttaatcctaaggggccaaagggagaaggacttcaagaaaatgaatcaagcacattaaaaagcagcttagtaactgtgactgattggagcgacacttcagatgtctaattccacatgtcagaagattattccagaagccagcagtatttcagtatcacagtgtttcagtaatttgcctccatgattctagtgcttctgccttaccgtgtttcccacagcaacacagagactgattcaaagaacaatggtctctttaatggcacccaatacagtattgaaaatcagatcatcaacagtatttcgaagcatgtaaaggtgtttaagacttccgctgctgcttaaaaataacatgtcattgaagtcataaaaagttttttcttcagaaaggt

SEQ ID NO: 342803 - DNA, 3365 bp, Homo sapiens
tgccagaggagccgggacaccgagggaagaggccggagggagatcgcggaggggagggggcgggaggggggtggggtatcctgagtcgtccgtggtccggagtctggaaggccctagagcggcgccagtcgacccgcctcgccacaacttgcccagaccagacacgtttcatcctgcgccctgcaagaaggagccggcctgcctctctccgctttgctgctcctcggcctccgcgggcccggcccgcgtcagcagcgaccctggggtctgggtcccctgtgtcgcccccgcccgcctgcagcgcccggcacccgcccaggagcgcgcagctggggttctagggacgtatacttgagcaagagagaccacagctcttgttcccgctgatcctgcagcccagtggatggagtccagaatctacagacctgccaggaaagaaaaaaaaattcctgatgtctggtccaagcaggaattccccggtggattggggaatgtctggcttttcctcagcttattgatctctgtggtaaccactggaggcccccagaagacccatagaaatgagaggcctgaggtctacaagtcgctgctagaaatattttagcctctccaaagcccagaatgcagccccgacccaagtttgtaagggttctgggtgcacgctgaccctgcgcgggcagacgcgccctttgctccaggtccggacctgggcgctgctatagcaacgtcctggacgcccagaccttaggccgccgccgccgcggaagcgaggaacccggccttctcccgctcctgagggctgtggcggcggcggcccgggaggcggcccaggctgggtaaagaccgcccggctcctcctatgcaagctgaggcagcggattggttttcaagcatgcccttccagaagcatgtctactacccgctcgccagcggcccagaggggcccgacgtcgctgtggccgccgccgccgcgggtgcggcctccatggcctgtgcgccccccagcgcggcttcggggcccctgcccttcttccagttcaggccgcggctggagagtgtggactggcggcggctgagcgccatcgacgtggacaaggtggcgggggctgtggacgtgctgacgctgcaggagaacatcatgaacatcaccttctgcaagctggaagacgagaagtgcccacactgccagtcgggggtggacccggtgctgctgaagctcatccgtctggcgcagttcaccatcgagtacttgctgcactcacaagagttcctcacctcgcagctgcacaccctggaggagcggctgcgcctgagccactgcgacggcgagcagagcaagaagctgctcaccaagcaggcgggggagatcaagacgctcaaggaagagtgcaaacgccggaagaagatgatctccacccagcagctgatgatcgaggccaaagccaactattaccagtgccatttttgtgacaaggcctttatgaaccaagcttttctacaaagtcacattcaacgccgccacactgaagaaaattctcattttgagtatcagaaaaatgcacagattgagaagctccggagtgagatcgtcgtattgaaggaagagctgcagctcaccaggtctgagctagaggctgcacaccatgccagtgcagtcagattctccaaggaatatgaaatgcagaaaacaaaagaggaagactttttgaagttatttgacaggtggaaagaagaagaaaaggagaaactagttgatgaaatggaaaaagtcaaggagatgtttatgaaggaatttaaagaattaacttcgaagaattcagcattagaatatcaactgtcagaaatccagaagtccaatatgcagatcaagtccaacataggcacattaaaagatgcacacgagtttaaagaagaccgttctccatatccccaggatttccataatgtcatgcagcttcttgatagtcaggaaagcaaatggacagctcgagttcaagctattcatcaagaacacaagaaagagaagggtcggctcctgtcacatatagagaaacttcgaacctcaatgatagatgatctaaatgcaagcaatgttttctataagaaaaggatagaagagctagggcagagactccaggagcagaatgagctgattataactcagagacagcagattaaagactttacctgtaatccattaaacagtatcagtgaacccaaaggaaatcctttagcctggcaggcttttgaatctcagccagctgctccagctgtgcctatgaatgccccagccctgcacactttggaaactaaatcaagtctgccaatggtgcatggaagggaaaatgaacagaaattaaataacaacaaaatgcatttaaggaaagctttgaagagtaactcctccctcactaagggactaagaacaatggtggagcagaacttgatggagaaactggaaaccttggggattaatgcagatatacgtggcatttcaagtgatcagttgcatagagtactaaaaagtgtggaatcagaaagacataagcaagaaagagaaatacctaactttcatcaaattcgagaattccttgaacatcaagtcagctgtaaaattgaggagaaagcactactctcttcagatcagtgcagtgtttctcaaatggataccctttcaactggagaagtacccaaaatgatacaacttccttccaaaaacagacaactgattagacaaaaagctgtttctactgataggacatctgttccaaaaattaagaaaaatgtcatggaagatccttttcccagaaagtcttcaactattacgacccctccttttagttcagaggaggagcaggaggacgacgacctcatccgggcatacgcatccccaggcccacttcctgtgccgccaccacaaaacaagggcagcttcgggaagaacacagtgaaaagtgacgcggacgggaccgagggaagcgaaatcgaggacactgatgattctcccaagcccgcaggagtcgccgttaaaacacctactgaaaaagttgaaaagatgtttccacatcgcaaaaatgtgaacaaaccagtcggtggaactaatgtccctgagatgtttatcaaaaaagaagaattacaagaactaaagtgtgcggatgtggaggatgaagactgggacatatcatccctagaggaagagatatctttgggaaaaaaatctgggaaagaacagaaggaacctccacctgcgaaaaatgaaccacattttgctcatgtgctaaatgcctggggcgcatttaatcctaaggggccaaagggagaaggaccttcaagaaaaatgaatcaagcacattcttccaggttac

SEQ ID NO: 342804 - DNA, 625 bp, Homo sapiens
tgcctaatattccaggcatataatttgttggtgcaaggtacttagcagagtgtctggcacacagtaaatacccagtaccggtagctgcaattattaataatgttcaggggtttgtttcttctgcctgctcccacctttgaccctttctattgcttattagtttctcaaccactaaacaaaaacaatgaggaacggggtgaagagcagttaacccattgggcagggttaaatggcaaaataaattactgaaattaagttagagattatatatggatttaatttttctggtttttgcctgtctcctgtcataaataattgggagtttaatatattatcatcaatggcaacatcatcatcttcatcatggacctgatcacagggaccaaactgtatactatcaaaaactgacaaccctttcaggactccagtatataccctcattaaaacaaaaacaactacccctgaaaaggccccagagttattgatctcacatgtgagtgaactttttcctagaatttattgcacccgattacaatccaaattcatatcttcactaattgtaactaagaacatttgagatttttgcaaaatgtaatagactgtcctttcccgtcatctctcatat

SEQ ID NO: 342805 - DNA, 371 bp, Homo sapiens
ccctgcctccctccagccttgtcacctctctgcagggaccactccagtactatgcccccatttccccaaaccctgtcacagcccttactcatgtaaggacttgttgacttatttgcctcccctgctagactctagccctgagaactgaggaactactacatctgtttgtttcttccagggctcaagacggcgtgtagcaaacagaaggtgctcaacaaatgtctgtctgtggaatgactgaccacatgcacgaaaagcctttgatggaaaaaaaacaatgaaagagaaaagtgaaatgagagtaaaattcttcactgatgttaattcctatttgccatgaatccaatcaataaacatttagaacaaactta

SEQ ID NO: 342806 - DNA, 714 bp, Homo sapiens
aactgaaaataaaaaaagtgctatccatatgtggatggtagattcattagcaaagccccctttttcataacccctccccaaactgtctcctctgtaaaatgtttcttgctgatttcttccagggaaaataaagcatgtatttgcatatattttaacaggaatgagatcatgctgtactccttgttctgcacctcgcatttgatcacttcaaaatatatttttgagatgcctccatatgaacagttagaaccctgttatagaagattattatgtgtgtgtgtgtgtgtgtgtgtgtgtgtgtgtgtgtgtgtgtagaatgttatagtatatcctacaaatatagcatagtagtctaccaatggatgtattgttcagtcacacctataccggcagacctttgatcctttccagattgttaaactaagtacgttctccaccttccagaggtgtaagaaatactcagttttatttccttcagggttaataatccctctctgtgctcggaacactcttgagatgcaattagaaaaagacaaatctctaaatcaaagtggtgggacctaaaaaaagcctcgagggttatgaaggcttcgctttgtgatttgaaacaaggtaatttttttaaattggctttggtgatgtgtattggaacaccattgttttcagcataattacgcatttcacagcttaattcagccattacacgtgatgcag

SEQ ID NO: 342807 - DNA, 818 bp, Homo sapiens
aaaaaaaaaaaaaaaaaaaaaaagaacagttgatgaaggatggatagactaaaacaatgctgcattaatgaggctacgatagtgcgtatttgtataaaaagcattaatttgcatttgttggcattttgaagctctgttgttggatgcatacacatttagtatctatatgtcgttatgatttgtaaatcatgtaatgcgtctctttacataatgatttttaaattattttgtaatgtttctcattacgttatgtaatgcccttattaactttccttggaaatcttttttacccgttatccatacaaccactcttgctttcttaatactgatgttagcatgatataccttttttcttttgttcgttttttattttaactgtcaacttacctatgctgtgtttgaagtgaggttcttgtacgtggcatgtagttgggttatgttttattttatttaaactgccatctctgtcctttacatcaaaggtaaattgatgttcttagaccacgtacctttaaagtaattcttgatgtgttaaagcttaattctgccattttattatttgttttctgtttgtttcctgtttccctgttctagtcttccactggatacttgatcacttttaaaattccatcttgtttaatttatactgtatttgagtatatcacttacatagttcttttggtggttgctctaggtattacagtatatatctataacttagcctattgctatccacatttaagtacttgcagtgagccgagattatgccattgcactccatcctggacaacagagtgagactccttctcaaaaaaaaa

SEQ ID NO: 342808 - DNA, 5504 bp, Homo sapiens
  misc_feature (1037)..(1037): n is a, c, g, or t
  misc_feature (2082)..(2082): n is a, c, g, or t
  misc_feature (2456)..(2456): n is a, c, g, or t
  misc_feature (2621)..(2621): n is a, c, g, or t
  misc_feature (2736)..(2736): n is a, c, g, or t
  misc_feature (3317)..(3317): n is a, c, g, or t
  misc_feature (4004)..(4004): n is a, c, g, or t
  misc_feature (4170)..(4170): n is a, c, g, or t
  misc_feature (4613)..(4613): n is a, c, g, or t
atatcaacactctgccccctcttcctccagccctgtctccccagactcctctgtcagccccccacaagccactcccattcattctccctcaggggaagagccctgccaagatggccctgcagcttctctcaagatcctgctggcttgggctgggggaatacagactgaggtcaccctgggcccctgggctagtggtttctagcacttacggaggatttccctccatcgcgtgagttcttgggagaaggtggcaagatgctcaacttactgggcacaagagtcactgaatcggtgccctctagggttctttctcttttgccatcttatccatattttaaggggtttctctttttctggggaagaggagagtgagcgaattgggggtcaagggggaggtgataagagaaagaaaagaggacagggctgggcacagtggctcacatctgtagtctcagcgcttcgggaggccaaggcaggaggatcacttgagctcaggaattccagaccagcctgggcaacatagtgagacccccatctctactaaaagaaaaaaaaaagaagaaaagaggacaggaagaaatgaaacaatccctttagtcataattcagttttaaattggggtctgtcccccgcagccgtcattttatcctttgtaaaatatcttgtcctctactttctgaccccctttttggtcattttctgggatgaatgagcgcaggacagagaatttctgttgttaggaataatgacagtattctccgcagctctcctggcagtgataggtcctagtcctagcgcaggaatttgaagctcgattagatcaaaagaaatggggccaaagtgtttttgactcatgctcgatattgacacagtgggtgggtgtcagggttttgctgtccaggggcaacagttggaggtcgacacctgagaacgttaatttcaccctctgtggttgggtgatggatggtgggggttaggggattgggcaatgctcctgaaccccactgccagttccccttgacggcagaccccccacncactgtaccacagtgtggacagaggaaaaggtgtatctcgccctgaggatagcacagcattggctgttcaagctcctcctctctgcgccggtttttgcataggcggtctcttgagcatttcaagaaacttgttcttatggctttcctgctgcacccgggaagatgggctcattctgcagttggcaagccttgttgttgaacaggctaacaggtcaactcactgacacagcaagtatatctcaaaaggaaattattggccggccgccatggctcacgcctgtaatctcagtactttgggaagccgaggagagcagatcacttgaggtcaggagttcgagaccagcctggcaaacatggggaaacccagtctttactaaaaatacaaaaaaaaaaaaaaaaaaaaaaaacaataaccaagcatcgtggcaggcatctgtaatctcagctactagggaggctgagggaggagaattgcttgaacccaggaggcagaggttgcagtgagctgagatcacaccactgcactccagcgtggttgacagagtgagactccatctcagaaaaaaaaaaaaaaaagattattgtagataaattagcaacaagacgtgtcttttaggaggtaaaaccaaatgccccatagcattaggaatgtttcagctgtcccttttgtaaaagtaacccttggggactgaagaaaatgcccacgctcccagaaggagaaggagaacatttcccaggaagcctggcatgctcacagatgtcctagagccctcacacttctcacaggaaccagttccccagcctgcagtgacaggtgaggatcacaaccctctatgtgggaattggaggcctctgttttccagctctgggaccccgggtgggtctttcatccttggtgttttgctttccccaattagcagcaaaggaaattcctgacctcaattagtgattggtcagatggcaccacgtttgtgaaattgcttgaggaaatacgtgccatcttttactaatgtcatagttaatctagcatactatcactggccancacttgcatgaagtttaaattctctaaaaggcccgcaaattaaatcagagatgatgacgtaccctttgggaattacattacaacacctttctgtttctggaatgttctttatagaacagcgatgtgattgatctctgatgggcagcacggcctctgggtgagtgatggccgacagggctgggacagagagcttcgtaacatttctaggcagccagttctggctggtatcctggccactgctcacactctactgtactgggacatgccaaccattcctttctctgaagagcttcagcaaagcccaggcctcccaaatgatgtttatcaaccctagagagacaagtgaggtctagtggttcgagtcagcaagggtngggagccatgagggttcaggtgctcccctgacactcgggttttttcttctttcagggtcactgtgcaaatcatttaaggaaatctctccttctttctctctgcctgtctctccctccctccctccatcagctctccatgcatatacatcaagaaaccattctacnatctaagacagggcggagggaggctgtgctggttggttatttgtagctccttcagaatgagaagctgcacaggcaccaattataattggtaacttctatgctgaccccagagatnagaaacgttgtctgctagatcccagcagcctctgaagcccagagccaaggaacgtcttagagactttgcaggaaaatatttgaaagttcaaaatgtttagagtcgacattagacacttttccctctgaactcagagtggggacttcttgaattggcccccaatccaaacgtctttccttcttcctaatctttttttttctctccctgatgcagttcaccattttatttagagtcaaaggcagagtcaaagggggacagggacattgaagctttgttcccacaatatcagacagaagactgagtcacgtgtatcagccaagactcccagaccaaaatgttccagagtctggggactccttaaggtcagcccagagacctgactttgcaaagagagactctccccgacaatgcccatgtcctcccggtcctctccccaccgagtctgttaggtcgctgtgatattttccattctagaaagaatccggaccgggcgcagtggctcatgcctgtaatcccagcactttgggaggctgagtcgggcagatcacctaagatcaggggtttgacaccagcctggccancatggcaaaaccccgtatctactaaaaatagccaggcgtggtggaccacatgtgtggtcccagctactcaggaggctgagggaggagaatcgcttgaacccaggaggcagaggttgcagtgagctgagatcgtgccaccgcactcccccagcctaggcaacagtgtgaaactctgtctcaaaaaaaaaaaaaaaaaatccagtagtttgctaaagcttccataaggcttccaggaatctagtctcctttaggaaggatgccttttgatctcatatttttgttttaagaatgatgtgtggcaagagttctggtatgacaagggggataagtttttcatgtgattaatgaggtccccaaaatatctggttgggccatcaatctaacctcagttagcaaattacagccaggccctaatgcagatcctattcttattacgatggcctttacataaattatctactttagttatcacaactctgggatgtgggttttaagacctccattttacaaacatgtatctgagaatcaggaaggtgaagggtcaaagtccgatagtgattcactgggaagagccaagattctaattcaggtctttttttttagacagtctcactctagcacccagcctggaatgagatcaggcagtggcgtgatctcagctcactgcaacctccgcctcccgggttnaagcaattctcctgcctcagcctccagagtaactgggactacaggcgtgtgccatcacacaagtctaatttttgtatttttagtagagacagggttttgccatgttagccaggctgttctcaaatacctggcctcaagtgatccacccacctcggcctcccaaagngctgggatggacaggcttgagccaccatgcccagctctaattcaggtcattctgacttcagagcccagacccttcacccagcactgaattggtctaggccttcgtgagttattgttacatcaccgtttgggagtgggctactttttattaaaacctgggtctccataacagagcgatgtagaaagaaaggaagtcatgggttgtactcgccatgcttgcttagagggtaaaactcaaccagatgggcgcaaatgataggctgtgtcaaaatgaaataaaaagcccttttccttccttctgcggcaagccaaaatccttcgagggcctggcagccaggattgttttatgaacaaggaaattcgcctgaggaagtcgacttcagtctgaatgcaaggaaaaaagttgaggttagcaaggaagcataagtcgaggaaaggcccacngggtagggaggaggaggaggaggaagacaattcacaccaggtgaagaaaacaagcgccatgcctcagtgtttcctccagcccgcagacttccatcgtgttaacatgaggtcggaagtcgctgtccttgccagtgtggacagcaacgtcgagggcagaggaagggcagagctgcaggcattcagacagccctggctggacagtaagggcccccaggcacggaaggtaggctgtacacggggcatccaggagtggtgggtccacacccctccatggccttcaccaccgcccccatgcctgctttctcctgtgtgggaaagaccttgggttccacaggccaggcaggaagctacaatggtgaacctcgcccagtccgtgtgtgtgctgtagacagtggccacagaaaggacagatgagcaagtgaccgtttctagttgttttcacgaagttctgtgtactggcaaagcctgttgccttcagcacactcacaaaaagttgatttcctgaagaagaaaacaagcaaacattggacacacgtgtgggaaatgcaaacaaacacattgtcactaccgaaggtagaaactggagcagataccttataaaaaccactgctttagccaggcgcggtggctcacgcctgtaatcccagcactttgggaggctgcagcgggcggatcacctgaggtcaggagtttgagaccagcctggccaacatggcaaaaccccgtctctactaaaaatataaaaattagctgggcgtggtggtggacacctgtaatccccactactcaggaggctaaggcaggaaaaccacttcaacccaggaggcagaggttgcagagagtcaagactgggacactgcactccagcctgggtgactgagactctgtctc

SEQ ID NO: 342809 - DNA, 244 bp, Homo sapiens
ttcaggcctgaatacctcgagtgcctagtattggagtctgtcgtcccccaaacattgaagcctaggctcctgcggctcagagctggctcttcctagtgtctggggtggggggactggggtctagggtcccttgtgtctgggctgggggccccagggtttggggaaaggggtctggacttggcagaagtcagaaggaaaggtggtccctgggctgaggcctggggacctgggcatctgggaggag

SEQ ID NO: 342810 - DNA, 138 bp, Homo sapiens
tgtccccttactgctgatgccttgcccaaggttcatagtgcagccaagacttcagttcaaacctttttcttcctggccctctgaaaccctctttgcagcccccttttcccatgctgaggaggtagtgtgcccagcagt

SEQ ID NO: 342811 - DNA, 843 bp, Homo sapiens
taccgtcaaaaataattaaaaattgtatatttttaaataactaagagtataaatggattttttgtatcacaaaggataaatgtttgaggtgatagatatcccatttaccctgatgtaattattatctattgcatgcatgtatcaaaatatctcatgtaacccatgaatacataacacctaccatgcacccacaaaaattaaaaggaaaaaatcagacattggagtcaggaggagggaagtcagtactgaggagtgtcactggacatgaaagatgaagaatggataggaattaatcaggtgaagaagatagtgcgggtggagagagcattgcaggcagacagaaacatagccatcagtcagcagtaaaagcaaaaagagattagcagagacaatctatgttactggttataaaataaatgcaaattaaaacaaatacaagatatcattatatcatctattaagaaaggttttagttattatggcaatggtgtagtgatcattcaaggattcctactaggagtactaatccaactgttctggaaaataagttgacaatgtttcaaaagtcctaaaaaagatcatacctgttggtaaatgatttctcctcttaggaatctatcttaagcaaaaaagtttaaaacgcagatataaacttatgtacaaaaatttaaaatgttgaaaaattaggccaggtgtggtagctcacgcctgtaatcccagtgctttaagaggccaaggcgggtggatcacttgaggccaggagttcaagacccagccaacatgtcaaaaccccatctctacaaaaaatacaaaaattagccaggcatggtggcacacacctgt

SEQ ID NO: 342812 - DNA, 105 bp, Homo sapiens
gaagagaatcgcaacactaatttccaacccaggcttgacttttcacccagctaatgggtatgcggtacctcccggggacagaggcagctctgggcgctggggata

SEQ ID NO: 342813 - DNA, 1429 bp, Homo sapiens
ccctgtgccagccggctgtcgacccaggttaggaagcccgaggtcggggcgttaccccaagggccctcccgcttcccctccgagggcagagaggcgtccgcgcccggacgcactgcgggaacacctggagccccggcggagctcggctgtccccgcgggagggagcccgacgcgcatccttgggacccggacccggcgcccgcgcctcgggacggatttctgcctcggctgcaggcgcagcgcgcagacctgagcctgccccgcggaaccggggctcgagtcccggcccgagcgcggcgtcggggccagcggagaggggcggaagccgcaagggaccctcggcgcctcggcctggccgcgatgaagtccccgcccctcctcagcccgtgtctctcctggaagagaatggcgggcatctttttcctgccatttatctcatcaggttttgctcctcggtttaagcaggaagagaacttcatgcttggaagagcgcatccgtcccagcctaggtttaattggtctcatctgacccctctggagctgaagaatcgatctgtgggacttggaactgaaagcacaggtcggggtaagccccacttcacactggagggccacaagttcctgatcttcgggggctccatccactatttccgggtgcccagggagtactggagggaccgcctgctgaagctgaaggcctgtggcttcaatactgtcaccacctatgttccgtggaacctgcatgagccagaaagaggcaaatttgacttctctgggaacctggacctggaggccttcgtcctgatggccgcagagatcgggctgtgggtgattctgcgtccaggcccctacatctgcagtgagatggacctcgggggcttgcccagctggctcctgcaagacccccggttactgttgaggacaaccaacaagagcttcattgaagcagttgagaagtattttgaccacctgattcccagagtgattcctctccagtaccgccaggcaggccctgtcatcgcggtgcaagtggagaatgagtatggctcattcaataaggataaaacatacatgccgtatctccacaaggccctgctgagaagagggattgtggagcttctcttgacctctgatggtgagaaacatgtgctgagtggccacaccaaaggagtgttggccgccatcaatttgcaaaaacttcaccaggatactttcaatcagcttcataaagtccagggagccagtatagatgcaggactgctctcagatgcctcacaagcagcaacttcttcctccttatagttcttatctgtgattcttccataattttgtccttctaagcttctgatgcactgaattatgtaaagtgcattcccttcaccagcttgtgcaccctattctgtaactgataataaatggttggtattgc

SEQ ID NO: 342814 - DNA, 740 bp, Homo sapiens
tgggcgccagagcgagactccgtctcgaaaaaaaacaaaaacccagaaagactgaatatttggatggaagttttaccagaagcacaaatgccgttcacaggcacatgtatgcaacgaggaaagctaatttacaggcatcccattgaactgtgggaaatgctaggaaacttttaagaagcaaggaattataaggtaccgccaggcaggccctgtcatcgcggtgcaagtggagaatgagtatggctcattcaataaggataaaacatacatgccgtatctccacaaggccctgctgagaagagggattgtggagcttctcttgacctctgatggtgagaaacatgtgctgagtggccacaccaaaggaggtacacatttagagttagttcacaggagaacagggctctcagccagcccgtgtaaatcttgaacacactgcagagaaaaccaagtgcatctcgatacctccctttcccgtgtccactgggatggatcctggagttcgatgttacaataaatgaggactcaaggttaaggctcagggccactcacagctccctatcttggccttgctcctgccgtctttaaacacagcagcactggagctcctctgttctcaggacgcctttccatctcccatagtttttctgtggcaagaaatctgcattggtgctgcgcctggcttgggatcagggccgtctccactaacttgggaaaccacagggagaaccagaagatgg

SEQ ID NO: 342815 - DNA, 350 bp, Homo sapiens
tcatagaggaattcccaggcagagggagacattttatgccatgtatgatctcatcattgagttgaaaggcaatcttgtttcatttaggatactttcttatgtttatgtcttgataagggcacgtttgaatttccaagcaaataataattttgaattagcttttaatcattgacttctagcacagttatatgatcagaaacatgctgtgtgaaagataccgtaggctggaaaaggggagaacagaaaggacaaggcaaggctgctgtttctctgcttccatctggggaaactgagagtccaggagcagctgttcctgccctgttttcataagtccttggagatgcactgat

SEQ ID NO: 342816 - DNA, 142 bp, Homo sapiens
cataccttacctcacttccttagaccctttcgcaaataacttctctcagttaggccttccctgacctccttatttaaaaaggaaatcctgcaccctcctcccacaaagcagtatccccctttcctgcctaattcttcttttt

SEQ ID NO: 342817 - DNA, 703 bp, Homo sapiens
ggaccacagggaaaacattgtccaaacatggcaccagagtgttggagaggcagcctagagccgtggcagcacagaaaactgaagtaagagatccccacagaggatgggctcagggccaggctccagcttggaggtgcagggtttccctttaatcagggaggtgggattcctgatggcctattctataagtccaccccagagcccccagcccatcctcacagcatcacagccccacccgccttcagccaccatcttcccactgccttcctggcactcaccgtcaaagtccacatcttcatttggcaggctggcctcagcagcccggggtcgtctctctgtatccagctctgcaatgatggagtcaaagaaggcaatggcctcggccacatcagcactgaactgcgagtatttctttggggttgctttctgcaagaggtgaaggggagaagagagagttgcctgagccagtaagccagagactcagaaaagggtgaaatgttgctaaaacgaaatgcgcgtggggttagggatttgtgaggtttcaaaggtaactatgaataagtgccctgtggaaggaaggtagatactccaggtccataattgctgtaggtcaatggatttctaattgtctcaagaagggagagtgaaaggacaacaagatctacttctttcttcatcacagatttgctgtcagacattaggc

SEQ ID NO: 342818 - DNA, 580 bp, Homo sapiens
aaagggctggtgacacttgggttcttggggtttgtcaggggagggcaccaaattggtcttgaggaagcagttaggtgagccccagtgacagtcttaagcacagtgattggcagatagcaagtgaaggaggggcaaggctgccaccacttctggcttctggtgaaattttactggactgattcctaggaaactgctgtttgtctttgagacctttccacatcagatggcccatgaagcgttccacagggacctttggtacaatccatctgtcctacgtgggccatcagaatccccttctgcacatgggctggaagaggagagaagccctccagcctggggatgggagacctaggggtctcaggttcctgagaggtcgaaaggattaacatagtccagctctgtctgagcctcagaaaacctgccctccctgttagaggccatgggaagagtgttctttttaagcatgaagaactgactgtgggccaggtgtagtggctcacgcctgtaatcccaacactttgggaggccgaggtgggcagatcagctggggccaggagttctagaccagcctaacatggca

SEQ ID NO: 342819 - DNA, 439 bp, Homo sapiens
actggactgattcctaggaaactgctgtttgtctttgagacctttccacatcagatggcccatgaagcgttccacagggacctttggtacaatccatctgtcctacgtgggccatcagaatccccttctgcacatgggctggaagaggagagaagccctccagcctggggatgggagacctaggggtctcaggttcctgagaggtcgaaaggattaacatagtccagctctgtctgagcctcagaaaacctgccctccctgttagaggccatgggaagagtgttctttttaagcatgaagaactgactgtgggccaggtgtagtggctcacgcctgtaatcccaacactttgggaggccgaggtgggcagatcagctggggccaggagttctagaccagcctaacatggcaaaaccacatctctcctaaaaatacaaaa

SEQ ID NO: 342820 - DNA, 770 bp, Homo sapiens
gggtggggaggggggatacagagattgcagaataaagacaatgctatttttaaatgttgacaatgtttatcttcataggacaaagaatgtgaaggaaaaggtctttttggcagtgtttcatcttcttggttcatttttgggctttcttgatagctgaaaaaaaatctaactcaccttactattttgtttggggatgatggtttcagcctctctgcttgaacttgttctcagttttttgtctactgttagctcatattcttccaatgcacatttttgggcattattggttatagaaatggcagtctttggagatttttaaatcaagactcttgcttctggtcttattagcaagatcattggggtcacttcatctctgtctgtctttcctgattgattatcctattttcgaatgagactcatgtcctgttctgctttgcaaaatatagtttcacataagaaattaccttgggcaaggttgtgagaggatttggaatctaaatggagaaaagtgtagaggcatatttttcaatcttctacttctatgtcattttccctgtgtgttggattgctaagattatgtatctattgctggcagaaatatcatatcctaaattcttggagaatgatattggttgcccaagattgtatagaagattaaggagctaggactctgaagagctgggttttagaatcataaactctcaggtttggaaaggatgttaaatggtctggttcaatcaacacttctaataatttaatctcttacacaa

SEQ ID NO: 342821 - DNA, 716 bp, Homo sapiens
gggtggggaggggggatacagagattgcagaataaagacaatgctatttttaaatgttgacaatgtttatcttcataggacaaagaatgtgaaggaaaaggtctttttggcagtgtttcatcttcttggttcatttttgggctttcttgatagctgaaaaaaaatctaactcaccttactattttgtttggggatgatggtttcagcctctctgcttgaacttgttctcagttttttgtctactgttagctcatattcttccaatgcacatttttgggcattattggttatagaaatggcagtctttggagatttttaaatcaagactcttgcttctggtcttattagcaagatcattggggtcacttcatctctgtctgtctttcctgattgattatcctattttcgaatgagactcatgtcctgttctgctttgcaaaatatagtttcacataagaaattaccttgggcaaggttgtgagaggatttggaatctaaatggagtgttggattgctaagattatgtatctattgctggcagaaatatcatatcctaaattcttggagaatgatattggttgcccaagattgtatagaagattaaggagctaggactctgaagagctgggttttagaatcataaactctcaggtttggaaaggatgttaaatggtctggttcaatcaacacttctaataatttaatctcttacacaa

SEQ ID NO: 342822 - DNA, 391 bp, Homo sapiens
aagcaaaaatgaataaactgaagatcctcacaccttaaacataacatgcaagaaagctaaacgatgccaaatctagcttaacctagctggttaaaagattcaatttgaatacctatttctgagaaattgcagttaaccatatgcagacaatactaaacagatgtatcaaaggcacagaaaactaggatgcagtattgctttagaaggaatttagtctgaatgctggcccaagcctcccatgaatgattagcatcaacacaaactcttgtgctctcctgacagattcaaattttgaatccctatgttgttgaaatattttattaatatttatgaaaaagcaccaagattggttttctaaactaggaaaaaaaactctagctgatatcaagca

SEQ ID NO: 342823 - DNA, 616 bp, Homo sapiens
gatgatctttatatttcaagtgaccacagctctcttctccaggctgcaaatagatctattaagcaccaggcacatttctgggcactttccattcttttcttttcttttctttttctccccacaacactggtagtaaatacatgctgtttcatattcccatctcaccaatgagaacttaagcctcattcttcagtctcttccttcagccaatctgaaggaccaggcaccacactagtctgacgttggcttcctaaagctgtagtccacccaacaccatgatacaggggaggatcttaggtggcagagaggcaatatcaatccttctgcatcacacagtgggaaaagtttgtctcattgcagttctcttccaagccttctgacttatctcagtttgatgttcgatgatctttaacccctgtctagcaaatctgtgtagcaaagaaagagcgggccacaggctcagcctcttcatttgtggcacggttcaaatgtactacatagctttgttttcatcgtgtgtgcttttctggttggagccagtggtcctcgttgtttattcatggtggcaatctgaagtttccttacaaattctttcttgaagtaaaaaaaaaaaaaa

SEQ ID NO: 342824 - DNA, 252 bp, Homo sapiens
tagcaacactctaggtacaaaagtccaccaatccctaaactccacactttcctaaaatacttaagtgataggagctttctgttttgcttgataaagctgttttttggaatctggcttccaacatcagcatgcacctgcgatcatatctgcgattcatgcgcgttgtatcagggttctccagagagacggcacctataggatagatagttagatatatagatgattgataggtaaatagatagatagatagat

SEQ ID NO: 342825 - DNA, 633 bp, Homo sapiens
atccctccacatcaataccagcacaatatctgaaatatctctgtttacagcccggaaagattttatactgtgcaccaaagattaggattggtaggggtgtcttttttccctaaggaagaagaaaggcactgggaaaagtaagaaccagcaaaataaccagggctgataattttcaggaaagacatctataaatggaagcaagggatttgaaaattgactcccttaaaactactgctgattctgctagaaattatttgtatatcctgagggtatgaacaccttagtttttctactatgagatgctgaatttgataataagagtcagtttcatgtatctaactcagggagcaggaggaatgaaagaagggtaacaggcagtatagaaccacttattccagctaggaagttggggaagcatataactaaaactctctgcccagagtggatactggccatataccttcttctgttaaaggacctgatgggaaaatttcagatattgggtttttctcctagagcaacaaaagagacaagctgaagtaaaatggagtcagttttaaagcagataggcaggtcagtccctagaagggcatcaacctatgtaacttaactggaagtctgtgtgtgtgtgtg

SEQ ID NO: 342826 - DNA, 105 bp, Homo sapiens
aattttggttagtacacagagagtcctttatacatgatctgttatttaatatgaggattgtaaatattttaatctaataaaataagtgtggtttgattgataatt

SEQ ID NO: 342827 - DNA, 925 bp, Homo sapiens
ccctcgacaggatcctctaactggggtggagtcggggcagcaggccttggtgttttcagcctcacgagaccctctgctatacaagcatcactggagggtccatatgcccccacacctgacccattattgtcacagcctgaggggcaggaatgatggagctgtgctgccattgccactatgtccacagagtactggggccaggggacccctgcaatgcaggctgcagagaaggaacgagggaagaacattccctcaagcagacccttcagcccattctccccactttgaaaaacgtgtagagtttgtgattccctcctctctaaatgtctggcatcttcttcttgggtggcaagatgtagaacagcccctgggccaagacttgttagctttctctgcctttagttcacactacacataggatttcatgggaggatagggacaaaaggatagtggagagtgaggatttcccacttgagtagccatgagggaaaggtatgtgctgaactgtagcctggacaggcagagcctaccaccctgcaaggctgtagaatgctcaactcatagcaggtcggggccagtgttgtgcctgttgacacaaggaggtcaagggctgcagcttccagttatctcataatgctggggctttcgaaccagcatctgtgcttgtgtgtagagtccagagaagccagccctgcagaaacagcctgctatggggttcatacaccaaggcagtatcttgccttagatgaccacctgcaatccaggatgagactttggcttgatcaattgcactaaatccacccacactcattctcagttccctctttcaagagggaaaagaaaaggcactgacactgtaagatgatgaaagtagaaagtgaacaggcaaccctgttggatgagccattggtgaaatcatgtggtc

SEQ ID NO: 342828 - DNA, 224 bp, Homo sapiens
tcagctcctcccttccccggaccaaacagattctctctcagttacaaaagccctcgacaggatcctctaactggggtggagtcggggcagcaggccttggtgttttcagcctcacgagaccctctgctatacaagcatcactggagggtccatatgcccccacacctgacccattattgtcacagcctgaggggcaggaatgatggagctgtgctgccattgcc

SEQ ID NO: 342829 - DNA, 450 bp, Homo sapiens
cattgtatgactatcccatgatatatccatcttcctgttgatggcacatgggtttcttccaggttctgctattacaaatgatgctattatgaacattcctgtacgtgtttcctggtgaactttgagaatctatctagggggaatttgctggctcacaagatataaacgttcacttaacaagataatccaaactgcgttcgaagtggctgaaccatttttacattcctgccaatgaggcatttaaggggccctagcgatctatatccaacacttggtattgtctaggacagcactgtccaatacatagctactgaccacgtgtggctactgagcatgtgaaatgtggccagtgtaactaaaggactgaattttaaatttaaattgtattttggatagcactggtctagactcttgaatctttgctgcttgaatggatattaaatgtcttct

SEQ ID NO: 342830 - DNA, 416 bp, Homo sapiens
cagttctttaagctgccttgatgagggtgaccaatgatggggaggtcagagtaccagaatggtggcttgcaattggccacccatcctgactggcttctgtgcactctttttaagaaagtggggccaggcatggtggctcacgcctataatcccagcactttgggaggccgaggtgagtggatcacctgaggtcaggagttcaaaaccaacctggccaatgtggtgaaaccccgtctctactaaaaatacaaaaattagatgggtgtggtggctcgcgcttgtaatcccagctatttgggaggttgaggcaggagaatcgcttgaacccaggaggcggaggttgcagtgaactgagattgccccactgtactccagcctgggcaagagtgaagctctgtctcagaaaaaagaaaaaa

SEQ ID NO: 342831 - DNA, 176 bp, Homo sapiens
ccgcccttaaattaaaagattacgattttccataacagccagttgtgggccccctcctacgtgactttgctcaagcccatattgaactcttggtcacagggaccagggattcctggacccctggcccaagtgacaactacccatagtggcagacaagcagcagccatccaaacatt

SEQ ID NO: 342832 - DNA, 277 bp, Homo sapiens
atgcctctttgattggaatgatgaatgagtttctgttcccattattttacactgctgttgagttgaaatagcaacaaatcacatccctagttgtatttagtgattcaatatactgtacttgggatttcattgttagggtttgaagtcagtatttgtccatttctccaaaccttataccaacatcagatttggatcttgattgttctatattgagggagccaacatccttctcctgaacccagcctagagtctgtaagcctgagactgcttaaagaga

SEQ ID NO: 342833 - DNA, 1787 bp, Homo sapiens
ttaggggaggaacagatgatagagcaggttaatgatgaaaaaggagaacagaagcaaaaacaggaacaggtacaagatgtgatgcttgggagacaaggagaaagaatggggctcactggggagccagagggtctgaatgacggtgagtgggagcaggaggatatggagaggaaggctcagggtcagggaggtccagaacagggagaagagaggaagagggagctgcaggtgccagaagagaacagggcggactctcaggacgaaaagagtcaaacctttttgggaaaatcagaggaagtaactggaaagcaagaagatcatggtataaaggagaaaggggtgccagtcagcgggcaggaggcgaaagagccagagagttgggatgggggcaggctgggggcagtgggaagagcgaggagcagggaagaggagaatgagcatcatgggccttcaatgcccgctctgatagcccctgaggactctcctcactgtgacctgtttccaggtgcctcatatctcgtgactcagattcccgggactcagacagagtccagggctgaggaactgtcccccgcagctctgtctccctcgctagagcccatcaggtgctctcaccagcccatttctctactgggctcctttttgactgaggagtcacctgacaaggaaatagatcaaaacagccagcaagagggatccaggctgaggaagggaacagtgtccagccaagggactgaggtggtctttgccagtgcatctgtgactcctccaaggacaccagattcagctcctcccagtcctgctgaagcctaccccatcacacctgcctcggtatctgccaggcccccagttgcctttcccaggagggaaacctcttgtgctgcacgtgctccagaaactgccagtgcccctctctcaatggatgacccatctccctgtgggacttctgagatgtgcccggctgccctctatggcttcccctccaccgggaccagccctccgaggcccccagccaactccacaggcaccgtccagcacttacggagtgactccttccctggttctcacaggacagagcagactccagacctggtgggaatgttgctttcctactcccactcagagctgccccagaggccccccaaacctgccatctacagctctgtgaccccaagaagggacagaaggagtggtagggactacagcaccgtttcagcatcccctactgccttatccacgctgaagcaggactctcaagaatccatctcaaatctagagagacccagcagtcctcccagcatccagccctgggtctccccacataatccagcctttgccacagagtctcccgcctacggttcttccccatcctttgtctccatggaggatgtgaggatccacgaacctctgccccctcctcccccacagaggagggacacccatccctccgtggtggagacagatggccatgctcgtgtagtggttcccacgctgaagcagcatagccaccctcctccattggccctaggttcagggctgcatgccccccataaaggcccacttccccaagcctctgaccccgctgtggccaggcagcaccgacctctgccatctaccccagacagctcccaccatgctcaggccacccccaggtggagatacaacaagccgctaccccctacccctgatttgccgcagccccaccttcctcccatttctgctcctggtagctcaaggatctacaggcctctacccccactacccatcatagaccctcccaccgaacc

SEQ ID NO: 342834 - DNA, 520 bp, Homo sapiens
tcactacaacctggactacaacatgcactacctcttggtccacaggctgtactccagcctgggcaatagccacagagtctcccgcctacggttcttccccatcctttgtctccatggaggatgtgaggatccacgaacctctgccccctcctcccccacagaggagggacacccatccctccgtggtggagacagatggccatgctcgtgtagtggttcccacgctgaagcagcatagccaccctcctccattggccctaggttcagggctgcatgccccccataaaggcccacttccccaagcctctgaccccgctgtggccaggcagcaccgacctctgccatctaccccagacagctcccaccatgctcaggccacccccaggtggagatacaacaagccgctaccccctacccctgatttgccgcagccccaccttcctcccatttctgctcctggtagctcaaggatctacaggcctctacccccactacccatcatagaccctcccaccgaacc

SEQ ID NO: 342835 - DNA, 518 bp, Homo sapiens
acgctctctctgtggggggcatcgcctgctgcctcttaaacaggtccgtctctactgtgcttccgggccacagagtctcccgcctacggttcttccccatcctttgtctccatggaggatgtgaggatccacgaacctctgccccctcctcccccacagaggagggacacccatccctccgtggtggagacagatggccatgctcgtgtagtggttcccacgctgaagcagcatagccaccctcctccattggccctaggttcagggctgcatgccccccataaaggcccacttccccaagcctctgaccccgctgtggccaggcagcaccgacctctgccatctaccccagacagctcccaccatgctcaggccacccccaggtggagatacaacaagccgctaccccctacccctgatttgccgcagccccaccttcctcccatttctgctcctggtagctcaaggatctacaggcctctacccccactacccatcatagaccctcccaccgaacc

SEQ ID NO: 342836 - DNA, 653 bp, Homo sapiens
gcagtccatgttcttttcccaaggttctggatatacctagtgctcacttggcagagcccacccgtgtgccaaagactctggtggccccattactcagctggttagttgttaccacttggcagtcctcatgacctttgctgatataactttctgctgaacttttgttctctgctaagcctcctgttttcttctgaagtagtgtgtaccatggctaaatctccttgacttgtttgcacagggataaggcttgtctcagtattttggctgtggaatatcgttctctcactgactggcctcttatattgggttaactagaatagactacaggaggtgtgacattgtaagtgaacctggggtgaggcacagggcagacaactccagcaaggcatggaatggatcctgttttgccttccccttaactgagaggcagccacctaacctatgtggtaaatgcctttcctccaaggttaggttcccttagagccctcttcattcactttgtggaatacagagagccaaatacaaatgggcttagttacaatatgtttatacttcaaagttgtctctcaggtatttgacatcctctccctcactagcctcattcatcttggaaatagaaggagattcctagatatcattgaacattttgaggt

SEQ ID NO: 342837 - DNA, 707 bp, Homo sapiens
gcagtccatgttcttttcccaaggttctggatatacctagtgctcacttggcagagcccacccgtgtgccaaagactctggtggccccattactcagctggttagttgttaccacttggcagtcctcatgacctttgctgatataactttctgctgaacttttgttctctgctaagcctcctgttttcttctgaagtagtgtgtaccatggctaaatctccttgacttgtttgcacagggataaggcttgtctcagtattttggctgtaaaatgctatcctgaaaggatggcaataagcaatctttacattccactgataagggaatatcgttctctcactgactggcctcttatattgggttaactagaatagactacaggaggtgtgacattgtaagtgaacctggggtgaggcacagggcagacaactccagcaaggcatggaatggatcctgttttgccttccccttaactgagaggcagccacctaacctatgtggtaaatgcctttcctccaaggttaggttcccttagagccctcttcattcactttgtggaatacagagagccaaatacaaatgggcttagttacaatatgtttatacttcaaagttgtctctcaggtatttgacatcctctccctcactagcctcattcatcttggaaatagaaggagattcctagatatcattgaacattttgaggt

SEQ ID NO: 342838 - DNA, 710 bp, Homo sapiens
ggacaatgctgaggagacccccctgactcaaaggaaatagactgcagcactgattggatgactttggaatgaaaaaaagtagttttcctttacaatgaggcttggcccccagggcgatggtgccacaagccagatcactgggaccactcagagaaagggaacacagaagcctggcatgccagcaaaaagcagggtttttgtgagcagtgtcttgcaccaaactcctgtctcctcctgtgacttagaatgcctaacttcctgggaatgcagcacaggtctcagcctcattttgcccagcccctattcaagacggatttgctgtggttcaaatgcttctgacaatattcctcatggtgaatgctggattttgcatgcccgaggccctgggccacactgtatgtttgctttttgcaagggctgtatggctatgactagttatgtggaccctgcattcctatgtaaatgaccctccataaaaaccccagaaatgaatgcttgagtgaacttccctggcttgtattataatactgtgaacatcttgtcacacatctttgctgggggaattaagtgtgtccctatgtgaccgtaatgggagataacacccagagttttgtgcctgctttcatgtggacttcattctatgtgatttttccctttggtgatcctggtctatatccttttattgtaataaactataaccataacagctt

SEQ ID NO: 342839 - DNA, 765 bp, Homo sapiens
atagtagggaaattctcatgataacaggccataaaagcccctgcagaaccatacaccatgtatcattacatatgtgaacgatgagatgggaagggagaacaagggaagcagaagtccaagatgaaactgggctcttccccaaggctggccctaaatggcgaagtaaggcaacacatctgattcactttattaagggagtaacaacatgaacacttaagtctcataaagaatcagaatcacccccacctccatatctcaacatgcagcccagtaataagccagagtacagcctcctcatagaacagaaggggtgaggccaggcaacttcctcaggcttaggggatgacacgcatggcacgttagctccccaagctgggggaaaatctagcaaacactttcaagggggaactttccacttccaccttcaaacttagctgaaagggcaggctgtattcctggagtatcctgagatggctcccaagaagcttacatataaaaggggccaattttgcccaaatctctttcaaattgacttccaatttaaaagaggctgagggtgtgcacttgctggttgacagctgtgtgtgcacattaaggggcaccagtctcagggccttagacaggtgagtttgcccctgcctcagagaccctggcacaaccagcccccctgcctggctggcttcctcaatgtcagacctcagtcaagtgtctcctcaagaggcctcatgggccactctacataacaagtcagctgctccctgttat

SEQ ID NO: 342840 - DNA, 110 bp, Homo sapiens
atctggtaacttgtacacttatactaaggcttacattctaacctaacttttcatggggccttatctcccagttagactattaatatgtataaggatttgctgaacggttg

SEQ ID NO: 342841 - DNA, 401 bp, Homo sapiens
gctatacaagaaccatggcaccagcatctgcttctgatgagagcctcaggcccccttcatttgtggcagaaggcagagtgaagctggtgtatgcagaggtcacatggtgaagaagatgcaagagagagagctgggaggtgccaggctatttttaacaaccagcacttgcaggaactagcacagtgtgaactcactcattacaaagaggatggcaccaagacatttatgagggatctgctcccatgacccaaacatctcccactagaccccactcccaacactgggcttcaacattcaatatgagatttggaggggggcaaacaaatgaaactatagcaacaacatttcatatactttgtaaatttgcctaggaagataatacaatacatgctattcagtta

SEQ ID NO: 342842 - DNA, 372 bp, Homo sapiens
ttcattcaccttctttatgtttgggttctttgccaaattggggaagtttttagcccttaatttcttcaagtactttttcagtcctcccctccctttctcctctgcttctgggactccagtgaaacaaatgtttgatctttcatatagtctcactggtccttgaggatctgttcatttgttcttccacctgtgttcttgatattatcatgcaacttctactatattctattttattgatttcctttgtttgtgccctcattctgctttttatcccatttactgcacttttatttaattattgtattttttggttctaaagtttccatttggttcacttatattttctgtttgtttgccaagattgtctgtttt

SEQ ID NO: 342843 - DNA, 956 bp, Homo sapiens
ggggcctcccggccctcgggcggggtgtcacttccaggtaccgcgagcacttccgggtcgtcagctcagttctgcggtttctgcggcggctggagaggtggtcggagaagtaggaacctcctgccgggctcgtggcggcttctgtccgctccgcggagggaagcgccttccccacaggacatcaatgcaagcttgaataagaaaaacaaattcttcctcctaagccatggcatatcagttatacagaaatactactttgggaaacagtcttcaggagagcctagatgagctcatacagtctcaacagatcaccccccaacttgcccttcaagttctacttcagtttgataaggctataaatgcagcactggctcagagggtcaggaacagagtcaatttcaggggctctctaaatacgtacagattctgcgataatgtgtggacttttgtactgaatgatgttgaattcagagaggtgacagaacttattaaagtggataaagtgaaaattgtagcctgtgatggtaaaaatactggctccaatactacagaatgaatagaaaaaatatgacttttttacaccatcttctgttattcattgcttttgaagagaagcatagaagagactttttatttattctagaattgcagaaatgactacactgtgctataccagagaattccagtagaaagaaacttgtaactctgtagcctcttacatcacctttattatacagcatgaaaacttaattcttttaggcaaaagtgtggttctaagaactgtttaataatctctacactccaaacaaccaaaaacaacaaatgctcgcgctcgccaactttacccgggcgcccaagtcagctccgtctcgcggtcgcttggttccaacgggcgcggcccggggcctgtagacgcacacggcgttgtcagtgtcgccctatacggccctcccaca

SEQ ID NO: 342844 - DNA, 674 bp, Homo sapiens
ggggcctcccggccctcgggcggggtgtcacttccaggtaccgcgagcacttccgggtcgtcagctcagttctgcggtttctgcggcggctggagaggtggtcggagaagtaggaacctcctgccgggctcgtggcggcttctgtccgctccgcggagggaagcgccttccccacaggtagtgggttagggagggcagggttagggagggaagcagggccgcgctccctgccgcccccccggagtcggagtgcgttggtggggtagtctctgagggcccttcgctcctgggatctgcccgttaccgaccgttgccggcaaggccccgcggccggcaccggagaagggcggcgaggcggcggtgatggtcgcgtcccgtggcgggaggctcgtcgttcacggggcgcccacagaacccacctaggggaggtcttcagcccaccaccgtattttcagccaggtgaatgtcttaaagcatccactagcgccctgtgagttttgccgaatttcggagagcattttttaaatgtctcattcctgtgctttgtagcttgttgtttgaagtctgccttccaactttcttcgtgcgaactccgacaaaaggaacgaattttaaacttggtggtttaatcaaaaaatgctaggacgagttacttccgaatttgacttctaatt

SEQ ID NO: 342845 - DNA, 887 bp, Homo sapiens
ggggcctcccggccctcgggcggggtgtcacttccaggtaccgcgagcacttccgggtcgtcagctcagttctgcggtttctgcggcggctggagaggtggtcggagaagtaggaacctcctgccgggctcgtggcggcttctgtccgctccgcggagggaagcgccttccccacaggacatcaatgcaagcttgaataagaaaaacaaattcttcctcctaagccatggcatatcagttatacagaaatactactttgggaaacagtcttcaggagagcctagatgagctcatacaggtgggagactgaattaaaaatcaaacatttttatcttgatgggtttacagtaattcttgtcatatcacttaggcaaagagatatgaggtaaaatatcttggactatttgacccagcaagtcagtaacactgattaaattacctcaaattcttgtttattacactgtcctgacaacaggacacaaaacatgattgaatgatatcattaaatatagctaaatctgggtacatgcagtgtttcatgcctctaatcccagcactttaggaggacaaggtggaaggatcgcttgaggccagaagtttgagaccagcttaagcaacatagcaccacccatctccacaaaaaataaaaaaattagttcggtgtgggcgcatgcctatagtcccagttactcgggaggctgaggtgagaggatggcttgaacccaggagtttgaggcttaagtgcactatgatggtaccactgtactccagccttggtgacagagcaacatcctgcctctaaataaataaagttaaatcttcaaaaatttttgttcaacataaaaattgagattgttggtttcccccttctcaaatttagggaagaa

SEQ ID NO: 342846 - DNA, 1299 bp, Homo sapiens
  misc_feature (1200)..(1200): n is a, c, g, or t
  misc_feature (1279)..(1279): n is a, c, g, or t
ggggcctcccggccctcgggcggggtgtcacttccaggtaccgcgagcacttccgggtcgtcagctcagttctgcggtttctgcggcggctggagaggtggtcggagaagtaggaacctcctgccgggctcgtggcggcttctgtccgctccgcggagggaagcgccttccccacaggacatcaatgcaagcttgaataagaaaaacaaattcttcctcctaagccatggcatatcagttatacagaaatactactttgggaaacagtcttcaggagagcctagatgagctcatacagtctcaacagatcaccccccaacttgcccttcaagttctacttcagtttgataaggctataaatgcagcactggctcagagggtcaggaacagagtcaatttcaggggctctctaaatacgtacagattctgcgataatgtgtggacttttgtactgaatgatgttgaattcagagaggtgacagaacttattaaagtggataaagtgaaaattgtagcctgtgatggtaaaaatactggctccaatactacagaatgaatagaaaaaatatgacttttttacaccatcttctgttattcattgcttttgaagagaagcatagaagagactttttatttattctagaattgcagaaatgactacactgtgctataccagagaattccagtagaaagaaacttgtaactctgtagcctcttacatcacctttattatacagcatgaaaaaccataacttctttttaaggacaaaagttgttgccttcctaagaaccttctttaataaactcattttaaaactctgagtaataactggtgaagctattaaggtagcaatatgaagatattagataatgcattttcccatttcctttgcaaggaacatgatgccctttcagaatgcttatttcaataaagtcatgttttgtcaaaaaaaaaaaagacctgagaactagaaagaaatgccgactgatgacgtacctggggagaccttcagctgttctattccttcttagcttaacatgaactaaaaacaagcttgattcccgctgtaaaaaaacaacacccctacaaaataaagttggacgccattatggccggcatattttggggcacaatttcgcccctaatgcgggcggtttatttacacaaatattcggcgcggggtgattttataccatcgnctcggacaagggcgacccctgggtggagccccccaatttatataacccctcttcagagaatacatcctcttttatagancgcggctgtggtgcaaactg

SEQ ID NO: 342847 - DNA, 1397 bp, Homo sapiens
  misc_feature (1298)..(1298): n is a, c, g, or t
  misc_feature (1377)..(1377): n is a, c, g, or t
tgacacaaccacacacaccccaaccccccacacgaaaccacaaacaaattagagctacgtaagaggctcacgatgttaatcagagcacgaggggagaggtggtcggagaagtaggaacctcctgccgggctcgtggcggcttctgtccgctccgcggagggaagcgccttccccacagcctctggaatgacttccctcctctgcttggctaaagtctagcttaaagaacctggaagcttttctgagccagctcacttctacaggcagcctccatggacatcaatgcaagcttgaataagaaaaacaaattcttcctcctaagccatggcatatcagttatacagaaatactactttgggaaacagtcttcaggagagcctagatgagctcatacagtctcaacagatcaccccccaacttgcccttcaagttctacttcagtttgataaggctataaatgcagcactggctcagagggtcaggaacagagtcaatttcaggggctctctaaatacgtacagattctgcgataatgtgtggacttttgtactgaatgatgttgaattcagagaggtgacagaacttattaaagtggataaagtgaaaattgtagcctgtgatggtaaaaatactggctccaatactacagaatgaatagaaaaaatatgacttttttacaccatcttctgttattcattgcttttgaagagaagcatagaagagactttttatttattctagaattgcagaaatgactacactgtgctataccagagaattccagtagaaagaaacttgtaactctgtagcctcttacatcacctttattatacagcatgaaaaaccataacttctttttaaggacaaaagttgttgccttcctaagaaccttctttaataaactcattttaaaactctgagtaataactggtgaagctattaaggtagcaatatgaagatattagataatgcattttcccatttcctttgcaaggaacatgatgccctttcagaatgcttatttcaataaagtcatgttttgtcaaaaaaaaaaaagacctgagaactagaaagaaatgccgactgatgacgtacctggggagaccttcagctgttctattccttcttagcttaacatgaactaaaaacaagcttgattcccgctgtaaaaaaacaacacccctacaaaataaagttggacgccattatggccggcatattttggggcacaatttcgcccctaatgcgggcggtttatttacacaaatattcggcgcggggtgattttataccatcgnctcggacaagggcgacccctgggtggagccccccaatttatataacccctcttcagagaatacatcctcttttatagancgcggctgtggtgcaaactg

SEQ ID NO: 342848 - DNA, 1234 bp, Homo sapiens
ggggcctcccggccctcgggcggggtgtcacttccaggtaccgcgagcacttccgggtcgtcagctcagttctgcggtttctgcggcggctggagaggtggtcggagaagtaggaacctcctgccgggctcgtggcggcttctgtccgctccgcggagggaagcgccttccccacaggacatcaatgcaagcttgaataagaaaaacaaattcttcctcctaagccatggcatatcagttatacagaaatactactttgggaaacagtcttcaggagagcctagatgagctcatacagtctcaacagatcaccccccaacttgcccttcaagttctacttcagtttgataaggctataaatgcagcactggctcagagggtcaggaacagagtcaatttcaggggctctctaaatacgtacagattctgcgataatgtgtggacttttgtactgaatgatgttgaattcagagaggtgacagaacttattaaagtggataaagtgaaaattgtagcctgtgatggtaaaaatactggctccaatactacagaatgaatagaaaaaatatgacttttttacaccatcttctgttattcattgcttttgaagagaagcatagaagagactttttatttattctagaattgcagaaatgactacactgtgctataccagagaattccagtagaaagaaacttgtaactctgtagcctcttacatcacctttattatacagcatgaaaaaccataacttctttttaaggacaaaagttgttgccttcctaagaaccttctttaataaactcattttaaaacaaaaaaaaaaaaaaaaaaaaaaaacacttgtggcgcacgcgcctacgggccactcgcgaaaaagacgttttcctaaaacacacatatcgcggttgtgggcgcgcggcgggcgcccaaagtaggggtaaggtggaacacatgtgggccaataagcgtggtgccccaaaggagaaaacccggggccaatggcacataaggcgctcgggaattccttcgcgcgcagagatataaaaaaacgcccccgcggggggggggaacaaacgggaaagcgggttcaggggaaaaccaaaaatgcccgagaaagggagagctacgagagagggcacaatcaacggggggaaccgctaaacataacagaggggggactcccaaaagggagagaccccggagaaagctggaaacatttggacagacccg

SEQ ID NO: 342849 - DNA, 1033 bp, Homo sapiens
  misc_feature (12)..(12): n is a, c, g, or t
  misc_feature (23)..(23): n is a, c, g, or t
  misc_feature (934)..(934): n is a, c, g, or t
  misc_feature (1013)..(1013): n is a, c, g, or t
tccgctccgcgnggtaagcgctntccccacagtctcaacagatcaccccccaacttgcccttcaagttctacttcagtttgataaggctataaatgcagcactggctcagagggtcaggaacagagtcaatttcaggggctctctaaatacgtacagattctgcgataatgtgtggacttttgtactgaatgatgttgaattcagagaggtgacagaacttattaaagtggataaagtgaaaattgtagcctgtgatggtaaaaatactggctccaatactacagaatgaatagaaaaaatatgacttttttacaccatcttctgttattcattgcttttgaagagaagcatagaagagactttttatttattctagaattgcagaaatgactacactgtgctataccagagaattccagtagaaagaaacttgtaactctgtagcctcttacatcacctttattatacagcatgaaaaaccataacttctttttaaggacaaaagttgttgccttcctaagaaccttctttaataaactcattttaaaactctgagtaataactggtgaagctattaaggtagcaatatgaagatattagataatgcattttcccatttcctttgcaaggaacatgatgccctttcagaatgcttatttcaataaagtcatgttttgtcaaaaaaaaaaaagacctgagaactagaaagaaatgccgactgatgacgtacctggggagaccttcagctgttctattccttcttagcttaacatgaactaaaaacaagcttgattcccgctgtaaaaaaacaacacccctacaaaataaagttggacgccattatggccggcatattttggggcacaatttcgcccctaatgcgggcggtttatttacacaaatattcggcgcggggtgattttataccatcgnctcggacaagggcgacccctgggtggagccccccaatttatataacccctcttcagagaatacatcctcttttatagancgcggctgtggtgcaaactg

SEQ ID NO: 342850 - DNA, 1179 bp, Homo sapiens
  misc_feature (1080)..(1080): n is a, c, g, or t
  misc_feature (1159)..(1159): n is a, c, g, or t
tgacacaaccacacacaccccaaccccccacacgaaaccacaaacaaattagagctacgtaagaggctcacgatgttaatcagagcacgaggggagaggtggtcggagaagtaggaacctcctgccgggctcgtggcggcttctgtccgctccgcggagggaagcgccttccccacagtctcaacagatcaccccccaacttgcccttcaagttctacttcagtttgataaggctataaatgcagcactggctcagagggtcaggaacagagtcaatttcaggggctctctaaatacgtacagattctgcgataatgtgtggacttttgtactgaatgatgttgaattcagagaggtgacagaacttattaaagtggataaagtgaaaattgtagcctgtgatggtaaaaatactggctccaatactacagaatgaatagaaaaaatatgacttttttacaccatcttctgttattcattgcttttgaagagaagcatagaagagactttttatttattctagaattgcagaaatgactacactgtgctataccagagaattccagtagaaagaaacttgtaactctgtagcctcttacatcacctttattatacagcatgaaaaaccataacttctttttaaggacaaaagttgttgccttcctaagaaccttctttaataaactcattttaaaactctgagtaataactggtgaagctattaaggtagcaatatgaagatattagataatgcattttcccatttcctttgcaaggaacatgatgccctttcagaatgcttatttcaataaagtcatgttttgtcaaaaaaaaaaaagacctgagaactagaaagaaatgccgactgatgacgtacctggggagaccttcagctgttctattccttcttagcttaacatgaactaaaaacaagcttgattcccgctgtaaaaaaacaacacccctacaaaataaagttggacgccattatggccggcatattttggggcacaatttcgcccctaatgcgggcggtttatttacacaaatattcggcgcggggtgattttataccatcgnctcggacaagggcgacccctgggtggagccccccaatttatataacccctcttcagagaatacatcctcttttatagancgcggctgtggtgcaaactg

SEQ ID NO: 342851 - DNA, 1246 bp, Homo sapiens
  misc_feature (1147)..(1147): n is a, c, g, or t
  misc_feature (1226)..(1226): n is a, c, g, or t
tgacacaaccacacacaccccaaccccccacacgaaaccacaaacaaattagagctacgtaagaggctcacgatgttaatcagagcacgaggggagaggtggtcggagaagtaggaacctcctgccgggctcgtggcggcttctgtccgctccgcggagggaagcgccttccccacaggacatcaatgcaagcttgaataagaaaaacaaattcttcctcctaagccatggcatatcagttatacagaaatactactttgggaaacagtcttcaggagagcctagatgagctcatacaggctataaatgcagcactggctcagagggtcaggaacagagtcaatttcaggggctctctaaatacgtacagattctgcgataatgtgtggacttttgtactgaatgatgttgaattcagagaggtgacagaacttattaaagtggataaagtgaaaattgtagcctgtgatggtaaaaatactggctccaatactacagaatgaatagaaaaaatatgacttttttacaccatcttctgttattcattgcttttgaagagaagcatagaagagactttttatttattctagaattgcagaaatgactacactgtgctataccagagaattccagtagaaagaaacttgtaactctgtagcctcttacatcacctttattatacagcatgaaaaaccataacttctttttaaggacaaaagttgttgccttcctaagaaccttctttaataaactcattttaaaactctgagtaataactggtgaagctattaaggtagcaatatgaagatattagataatgcattttcccatttcctttgcaaggaacatgatgccctttcagaatgcttatttcaataaagtcatgttttgtcaaaaaaaaaaaagacctgagaactagaaagaaatgccgactgatgacgtacctggggagaccttcagctgttctattccttcttagcttaacatgaactaaaaacaagcttgattcccgctgtaaaaaaacaacacccctacaaaataaagttggacgccattatggccggcatattttggggcacaatttcgcccctaatgcgggcggtttatttacacaaatattcggcgcggggtgattttataccatcgnctcggacaagggcgacccctgggtggagccccccaatttatataacccctcttcagagaatacatcctcttttatagancgcggctgtggtgcaaactg

SEQ ID NO: 342852 - DNA, 924 bp, Homo sapiens
  misc_feature (825)..(825): n is a, c, g, or t
  misc_feature (904)..(904): n is a, c, g, or t
tttagaggatcaccaacaatcgttcaggggctctctaaatacgtacagattctgcgataatgtgtggacttttgtactgaatgatgttgaattcagagaggtgacagaacttattaaagtggataaagtgaaaattgtagcctgtgatggtaaaaatactggctccaatactacagaatgaatagaaaaaatatgacttttttacaccatcttctgttattcattgcttttgaagagaagcatagaagagactttttatttattctagaattgcagaaatgactacactgtgctataccagagaattccagtagaaagaaacttgtaactctgtagcctcttacatcacctttattatacagcatgaaaaaccataacttctttttaaggacaaaagttgttgccttcctaagaaccttctttaataaactcattttaaaactctgagtaataactggtgaagctattaaggtagcaatatgaagatattagataatgcattttcccatttcctttgcaaggaacatgatgccctttcagaatgcttatttcaataaagtcatgttttgtcaaaaaaaaaaaagacctgagaactagaaagaaatgccgactgatgacgtacctggggagaccttcagctgttctattccttcttagcttaacatgaactaaaaacaagcttgattcccgctgtaaaaaaacaacacccctacaaaataaagttggacgccattatggccggcatattttggggcacaatttcgcccctaatgcgggcggtttatttacacaaatattcggcgcggggtgattttataccatcgnctcggacaagggcgacccctgggtggagccccccaatttatataacccctcttcagagaatacatcctcttttatagancgcggctgtggtgcaaactg

SEQ ID NO: 342853 - DNA, 1195 bp, Homo sapiens
  misc_feature (1096)..(1096): n is a, c, g, or t
  misc_feature (1175)..(1175): n is a, c, g, or t
tgacacaaccacacacaccccaaccccccacacgaaaccacaaacaaattagagctacgtaagaggctcacgatgttaatcagagcacgaggggagaggtggtcggagaagtaggaacctcctgccgggctcgtggcggcttctgtccgctccgcggagggaagcgccttccccacaggacatcaatgcaagcttgaataagaaaaacaaattcttcctcctaagccatggcatatcagttatacagaaatactactttgggaaacagtcttcaggagagcctagatgagctcatacagggctctctaaatacgtacagattctgcgataatgtgtggacttttgtactgaatgatgttgaattcagagaggtgacagaacttattaaagtggataaagtgaaaattgtagcctgtgatggtaaaaatactggctccaatactacagaatgaatagaaaaaatatgacttttttacaccatcttctgttattcattgcttttgaagagaagcatagaagagactttttatttattctagaattgcagaaatgactacactgtgctataccagagaattccagtagaaagaaacttgtaactctgtagcctcttacatcacctttattatacagcatgaaaaaccataacttctttttaaggacaaaagttgttgccttcctaagaaccttctttaataaactcattttaaaactctgagtaataactggtgaagctattaaggtagcaatatgaagatattagataatgcattttcccatttcctttgcaaggaacatgatgccctttcagaatgcttatttcaataaagtcatgttttgtcaaaaaaaaaaaagacctgagaactagaaagaaatgccgactgatgacgtacctggggagaccttcagctgttctattccttcttagcttaacatgaactaaaaacaagcttgattcccgctgtaaaaaaacaacacccctacaaaataaagttggacgccattatggccggcatattttggggcacaatttcgcccctaatgcgggcggtttatttacacaaatattcggcgcggggtgattttataccatcgnctcggacaagggcgacccctgggtggagccccccaatttatataacccctcttcagagaatacatcctcttttatagancgcggctgtggtgcaaactg

SEQ ID NO: 342854 - DNA, 990 bp, Homo sapiens
ggggcctcccggccctcgggcggggtgtcacttccaggtaccgcgagcacttccgggtcgtcagctcagttctgcggtttctgcggcggctggagaggtggtcggagaagtaggaacctcctgccgggctcgtggcggcttctgtccgctccgcggagggaagcgccttccccacaggacatcaatgcaagcttgaataagaaaaacaaattcttcctcctaagccatggcatatcagttatacagaaatactactttgggaaacagtcttcaggagagcctagatgagctcatacagtctcaacagatcaccccccaacttgcccttcaagttctacttcagtttgataaggctataaatgcagcactggctcagagggtcaggaacagagtcaatttcaggggctctctaaatacgtacagattctgcgataatgtgtggacttttgtactgaatgatgttgaattcagagaggtgacagaacttattaaagtggataaagtgaaaattgtagcctgtgatggtaaaaatactggctccaatactacagaatgaatagatcaccccccaacttgcccttcaagttctacttcagtttgataaggctataaatgcagcactggctcagagggtcaggaacagagtcgatttcaggggctctctgaatacgtacagattctgcgataatgtgtggacttttgtactggatgacctgttgacttcagagaggtgactagaacttattaaagtgggatatcgtgcaaactgtcgcctgtgagggtaaaacatactggtccaatacttcagaatggttgaacaactgtgacgttttaccaccacttctgtatccatgcctttggcgagagctaaagagactttcattatctcgaatggaatgacacatggggttgcgagattcagcagagaaagggactgggcccttatacgttaaaggggacaattttgggatgtgcccaagccaaaactca

SEQ ID NO: 342855 - DNA, 1172 bp, Homo sapiens
  misc_feature (1073)..(1073): n is a, c, g, or t
  misc_feature (1152)..(1152): n is a, c, g, or t
ggggcctcccggccctcgggcggggtgtcacttccaggtaccgcgagcacttccgggtcgtcagctcagttctgcggtttctgcggcggctggagaggtggtcggagaagtaggaacctcctgccgggctcgtggcggcttctgtccgctccgcggagggaagcgccttccccacaggacatcaatgcaagcttgaataagaaaaacaaattcttcctcctaagccatggcatatcagttatacagaaatactactttgggaaacagtcttcaggagagcctagatgagctcatacagtctcaacagatcaccccccaacttgcccttcaagttctacttcagtttgataaggctataaatgcagcactggctcagagggtcaggaacagagtcaatttcaggatactggctccaatactacagaatgaatagaaaaaatatgacttttttacaccatcttctgttattcattgcttttgaagagaagcatagaagagactttttatttattctagaattgcagaaatgactacactgtgctataccagagaattccagtagaaagaaacttgtaactctgtagcctcttacatcacctttattatacagcatgaaaaaccataacttctttttaaggacaaaagttgttgccttcctaagaaccttctttaataaactcattttaaaactctgagtaataactggtgaagctattaaggtagcaatatgaagatattagataatgcattttcccatttcctttgcaaggaacatgatgccctttcagaatgcttatttcaataaagtcatgttttgtcaaaaaaaaaaaagacctgagaactagaaagaaatgccgactgatgacgtacctggggagaccttcagctgttctattccttcttagcttaacatgaactaaaaacaagcttgattcccgctgtaaaaaaacaacacccctacaaaataaagttggacgccattatggccggcatattttggggcacaatttcgcccctaatgcgggcggtttatttacacaaatattcggcgcggggtgattttataccatcgnctcggacaagggcgacccctgggtggagccccccaatttatataacccctcttcagagaatacatcctcttttatagancgcggctgtggtgcaaactg

SEQ ID NO: 342856 - DNA, 829 bp, Homo sapiens
gtaagtgcttgccttatttctgtgaaagctacttgaaaccttgtttttatgagcctttagaagatctgcatccatatgaaaagcctaacgggtaaaatggccctatgatcaattcccagataagcccaggcttttatctccactaaattctgattacatatctcaaacagtgctcttactttgtgacttaataacatatagactgcttacacaggttggatttgtgtgggtaaaataagcaaattaataagcatttgttccctatttccattacaaattttaagtgtttatcaggcttttcagacaccttttactttaaggaataatttttacaatcctatggtttctatgttgctggagacccatatatttaaagagttattttaaacaggattttaattagccataagaactttggagtcatgatggtaaatattcatctaatctgttaaatatgacatgtgcaagtgaacttttcacaccagacctaggaacttcttcaggtccttaaatgtttcaaaaactatacacctaatttctgtttcatgattagtttatttcctttttgctaattatattattttaaatatacttcataatctgaaccatttgtgttaagagcagctattccagaaagtaaatagaaaagactgctgctctttgacacagggagttttgaaaagcaagagaaagatatgtagaaagtaaccccctccatttccctgtttgagtcggatttgttttatatattttgcatttccaaagaaatagctaatcaatcaatcactgaaaaaatgtagagaatacaaaaaagcacatggaagaaaaa

SEQ ID NO: 342857 - DNA, 626 bp, Homo sapiens
agggaaaattgacaaagttttgttctggctttgtaacatcactgcatgttttctcttcaagattgtttgtgtcaagatagtacaaaagatgtcttcaagcttggtgcttcatcatcagttatggcaaaggagataaaggaattctagtttagaggctttggttaacctcagttaaattttagatgataatttgtatatttttatttactttgtctttaatgttcttccttaacgggatttatgacctttaccttttctcagttctcaacagatcaccccccaacttgcccttcaagttctacttcagtttgataaggctataaatgcagcactggctcagagggtcaggaacagagtcaatttcagggtaaggatattttcctgaatctagaagcctgtaccaatggttgttaaaacactgatttttttttaggacccctacatatttattaatcataagaggaagaggtggcttagtcaatttttggaacttgttttatagtaactaaattatacttttcaatcaactataaactaagttgatccacttaatgtgagatacagagatgtttttagatttttatttcattgtttcacaaatcagcctttgtatgtttggctacctt

SEQ ID NO: 342858 - DNA, 848 bp, Homo sapiens
cccacgcgtcgcggacggccggggtcgacccacgcgtccgggctctctaaatacgtacagattctgcgataatgtgtggacttttgtactgaatgatgttgaattcagagaggtgacagaacttattaaagtggataaagtgaaaattgtagcctgtgatggtaaaaatactggctccaatactacagaatgaatagaaaaaatatgacttttttacaccatcttctgttattcattgcttttgaagagaagcatagaagagactttttatttattctagaattgcagaaatgactacactgtgctataccagagaattccagtagaaagaaacttgtaactctgtagcctcttacatcacctttattatacagcatgaaaaaccataacttctttttaaggacaaaagttgttgccttcctaagaaccttctttaataaactcattttaaaacacgtcaagaaaagcaagagacacgacaaaagggagaaaggaacagcagcagggcggaaagcgcaggacggagaaccgaaggggggcgagcaagacaggagggagagagagggggaccagaggagggcggagaagaaagcggcggggaggagagagggggccaggaggggggggagagcgtcaacggaaacgactcagatacacgcaacgcaaaacggagaaagaaaagataagtcacgggaaaaaaagacgccgagcagatgtggagaacccacagagacaacaacggaatgcagaaaaatagagagatagagtatagccgagacacagaggaaaagagacacggggagagaaaagagcggggaccacgagaacaccaaacaacaccacggagg

SEQ ID NO: 342859 - DNA, 1300 bp, Homo sapiens
  misc_feature (1201)..(1201): n is a, c, g, or t
  misc_feature (1280)..(1280): n is a, c, g, or t
tgacacaaccacacacaccccaaccccccacacgaaaccacaaacaaattagagctacgtaagaggctcacgatgttaatcagagcacgaggggagaggtggtcggagaagtaggaacctcctgccgggctcgtggcggcttctgtccgctccgcggagggaagcgccttccccacaggacatcaatgcaagcttgaataagaaaaacaaattcttcctcctaagccatggcatatcagttatacagaaatactactttgggaaacagtcttcaggagagcctagatgagctcatacagtctcaacagatcaccccccaacttgcccttcaagttctacttcagtttgataaggctataaatgcagcactggctcagagggtcaggaacagagtcaatttcaggggctctctaaatacgtacagattctgcgataatgtgtggacttttgtactgaatgatgttgaattcagagaggtgacagaacttattaaagtggataaagtgaaaattgtagcctgtgatggtaaaaatactggctccaatactacagaatgaatagaaaaaatatgacttttttacaccatcttctgttattcattgcttttgaagagaagcatagaagagactttttatttattctagaattgcagaaatgactacactgtgctataccagagaattccagtagaaagaaacttgtaactctgtagcctcttacatcacctttattatacagcatgaaaaaccataacttctttttaaggacaaaagttgttgccttcctaagaaccttctttaataaactcattttaaaactctgagtaataactggtgaagctattaaggtagcaatatgaagatattagataatgcattttcccatttcctttgcaaggaacatgatgccctttcagaatgcttatttcaataaagtcatgttttgtcaaaaaaaaaaaagacctgagaactagaaagaaatgccgactgatgacgtacctggggagaccttcagctgttctattccttcttagcttaacatgaactaaaaacaagcttgattcccgctgtaaaaaaacaacacccctacaaaataaagttggacgccattatggccggcatattttggggcacaatttcgcccctaatgcgggcggtttatttacacaaatattcggcgcggggtgattttataccatcgnctcggacaagggcgacccctgggtggagccccccaatttatataacccctcttcagagaatacatcctcttttatagancgcggctgtggtgcaaactg

SEQ ID NO: 342860 - DNA, 1168 bp, Homo sapiens
  misc_feature (1069)..(1069): n is a, c, g, or t
  misc_feature (1148)..(1148): n is a, c, g, or t
ttttttttgctagttttgtctttttggcaaataggagtccctcagaatctacacttgctctgaaatgtagaaaaacaaattcttcctcctaagccatggcatatcagttatacagaaatactactttgggaaacagtcttcaggagagcctagatgagctcatacagtctcaacagatcaccccccaacttgcccttcaagttctacttcagtttgataaggctataaatgcagcactggctcagagggtcaggaacagagtcaatttcaggggctctctaaatacgtacagattctgcgataatgtgtggacttttgtactgaatgatgttgaattcagagaggtgacagaacttattaaagtggataaagtgaaaattgtagcctgtgatggtaaaaatactggctccaatactacagaatgaatagaaaaaatatgacttttttacaccatcttctgttattcattgcttttgaagagaagcatagaagagactttttatttattctagaattgcagaaatgactacactgtgctataccagagaattccagtagaaagaaacttgtaactctgtagcctcttacatcacctttattatacagcatgaaaaaccataacttctttttaaggacaaaagttgttgccttcctaagaaccttctttaataaactcattttaaaactctgagtaataactggtgaagctattaaggtagcaatatgaagatattagataatgcattttcccatttcctttgcaaggaacatgatgccctttcagaatgcttatttcaataaagtcatgttttgtcaaaaaaaaaaaagacctgagaactagaaagaaatgccgactgatgacgtacctggggagaccttcagctgttctattccttcttagcttaacatgaactaaaaacaagcttgattcccgctgtaaaaaaacaacacccctacaaaataaagttggacgccattatggccggcatattttggggcacaatttcgcccctaatgcgggcggtttatttacacaaatattcggcgcggggtgattttataccatcgnctcggacaagggcgacccctgggtggagccccccaatttatataacccctcttcagagaatacatcctcttttatagancgcggctgtggtgcaaactg

SEQ ID NO: 342861 - DNA, 1211 bp, Homo sapiens
ggggcctcccggccctcgggcggggtgtcacttccaggtaccgcgagcacttccgggtcgtcagctcagttctgcggtttctgcggcggctggagaggtggtcggagaagtaggaacctcctgccgggctcgtggcggcttctgtccgctccgcggagggaagcgccttccccacaggacatcaatgcaagcttgaataagaaaaacaaattcttcctcctaagccatggcatatcagttatacagaaatactactttgggaaacagtcttcaggagagcctagatgagctcatacagtctcaacagatcaccccccaacttgcccttcaagttctacttcagtttgataaggctataaatgcagcactggctcagagggtcaggaacagagtcaatttcaggggctctctaaatacgtacagattctgcgataatgtgtggacttttgtactgaatgatgttgaattcagagaggtgacagaacttattaaagtggataaagtgaaaattgtagcctgtgatggtaaaaatactggctccaatactacagaatgaatagaaaaaatatgacttttttacaccatcttctgttattcattgcttttgaagagaagcatagaagagactttttatttattctagaattgcagaaatgactacactgtgctataccagagaattccagtagaaagaaacttgtaactctgtagcctcttacatcacctttattatacagcatgaaaaaccataacttctttttaaggacaaaagttgttgccttcctaagaaccttctttaataaactcattttaaaacacgtcaagaaaagcaagagacacgacaaaagggagaaaggaacagcagcagggcggaaagcgcaggacggagaaccgaaggggggcgagcaagacaggagggagagagagggggaccagaggagggcggagaagaaagcggcggggaggagagagggggccaggaggggggggagagcgtcaacggaaacgactcagatacacgcaacgcaaaacggagaaagaaaagataagtcacgggaaaaaaagacgccgagcagatgtggagaacccacagagacaacaacggaatgcagaaaaatagagagatagagtatagccgagacacagaggaaaagagacacggggagagaaaagagcggggaccacgagaacaccaaacaacaccacggagg

SEQ ID NO: 342862 - DNA, 1086 bp, Homo sapiens
  misc_feature (987)..(987): n is a, c, g, or t
  misc_feature (1066)..(1066): n is a, c, g, or t
tcgacggggaacgggaggagtctccaggagacccggggacagcatcgcccaggcccctgtttgcaggcctttcagatatatccatctcacaagacatccccgtagaaggagaaatcaccattcctatgagatctcgcatccgggagtttgacagctccacattaaatgaatctgttcgcaataccatcatgcgtgatctaaaagctgttgggaaaaaattcatgcatgttttgtacccaaggaaaagtaatactcttttgagagattgggatttattaaagtggataaagtgaaaattgtagcctgtgatggtaaaaatactggctccaatactacagaatgaatagaaaaaatatgacttttttacaccatcttctgttattcattgcttttgaagagaagcatagaagagactttttatttattctagaattgcagaaatgactacactgtgctataccagagaattccagtagaaagaaacttgtaactctgtagcctcttacatcacctttattatacagcatgaaaaaccataacttctttttaaggacaaaagttgttgccttcctaagaaccttctttaataaactcattttaaaactctgagtaataactggtgaagctattaaggtagcaatatgaagatattagataatgcattttcccatttcctttgcaaggaacatgatgccctttcagaatgcttatttcaataaagtcatgttttgtcaaaaaaaaaaaagacctgagaactagaaagaaatgccgactgatgacgtacctggggagaccttcagctgttctattccttcttagcttaacatgaactaaaaacaagcttgattcccgctgtaaaaaaacaacacccctacaaaataaagttggacgccattatggccggcatattttggggcacaatttcgcccctaatgcgggcggtttatttacacaaatattcggcgcggggtgattttataccatcgnctcggacaagggcgacccctgggtggagccccccaatttatataacccctcttcagagaatacatcctcttttatagancgcggctgtggtgcaaactg

SEQ ID NO: 342863 - DNA, 1227 bp, Homo sapiens
  misc_feature (1128)..(1128): n is a, c, g, or t
  misc_feature (1207)..(1207): n is a, c, g, or t
ggggcctcccggccctcgggcggggtgtcacttccaggtaccgcgagcacttccgggtcgtcagctcagttctgcggtttctgcggcggctggagaggtggtcggagaagtaggaacctcctgccgggctcgtggcggcttctgtccgctccgcggaggacatcaatgcaagcttgaataagaaaaacaaattcttcctcctaagccatggcatatcagttatacagaaatactactttgggaaacagtcttcaggagagcctagatgagctcatacagtctcaacagatcaccccccaacttgcccttcaagttctacttcagtttgataaggctataaatgcagcactggctcagagggtcaggaacagagtcaatttcaggggctctctaaatacgtacagattctgcgataatgtgtggacttttgtactgaatgatgttgaattcagagaggtgacagaacttattaaagtggataaagtgaaaattgtagcctgtgatggtaaaaatactggctccaatactacagaatgaatagaacatagaagagactttttatttattctagaattgcagaaatgactacactgtgctataccagagaattccagtagaaagaaacttgtaactctgtagcctcttacatcacctttattatacagcatgaaaaaccataacttctttttaaggacaaaagttgttgccttcctaagaaccttctttaataaactcattttaaaactctgagtaataactggtgaagctattaaggtagcaatatgaagatattagataatgcattttcccatttcctttgcaaggaacatgatgccctttcagaatgcttatttcaataaagtcatgttttgtcaaaaaaaaaaaagacctgagaactagaaagaaatgccgactgatgacgtacctggggagaccttcagctgttctattccttcttagcttaacatgaactaaaaacaagcttgattcccgctgtaaaaaaacaacacccctacaaaataaagttggacgccattatggccggcatattttggggcacaatttcgcccctaatgcgggcggtttatttacacaaatattcggcgcggggtgattttataccatcgnctcggacaagggcgacccctgggtggagccccccaatttatataacccctcttcagagaatacatcctcttttatagancgcggctgtggtgcaaactg

SEQ ID NO: 342864 - DNA, 322 bp, Homo sapiens
tcttcagcttgtgctgagacaggcctcaaagtagcagtgcagcgcaaagcttggagagctaagatttcatcactgtcgaagtgttgcactgccctctgaagggcttatgcatggaacaggcccaaagccacatagcaaaggatttgaattaagtgtagaacttccatccaccaaaaacaaggcaccacatgtagtctgaacctaactggggtgattacctgctgaaaacatctgtactctcctgaaaattaagcagaggctgtgcagcatcacattcacagtacaatccagaattagtcaacacagctgaagagacctggaa

SEQ ID NO: 342865 - DNA, 134 bp, Homo sapiens
tacaacatttgcccaaagtcagagctgataaatggtgtgggttaggcatgaatcctcaaccactactcactgaattttcacaaaaattctacaaaaggtgtactatcaaccccacttttttttttttttttttt

SEQ ID NO: 342866 - DNA, 321 bp, Homo sapiens
cttggccaggctggtcttgaactcctgacctcatgatccacccacctcaggttcctaaagtgctgggattacaggcttgagccactgcaaccagcctttaacatttattaaacatgccaactttttgatatatggggggagtaaagacatcttaatcacttttacagattttacaaagaatatattttggctattagcagaaatagaaaagagggcacagaattctagctagaaggaacggaatcaggaaaggcagggagatgtgacttcatagcacacagggaaactgaaaaaggtgaacaggactgagaactgtgacag

SEQ ID NO: 342867 - DNA, 390 bp, Homo sapiens
agctcactgcaacctccgcctcccggattcaagctattctcatgcctcagcctcccaggtagctgggattacaggtgcccactaccacacccagctaatttttgtatttttagtagaggtggggtttctccatgttggccagactggtctcgaattcctgacctcgagtgatccacctgcctcagcttcccgaaatgctgggattacagatgtgagcccagccctacctaagatttttatcttaaacattaaaacctatttagacatatttaggcatggattattttcattgtattatacttttaaatacattaaaatgaaaataaaagcagaaattgattaaggtattcctaaaacttctttatatttactcctctaaatcactttttg

SEQ ID NO: 342868 - DNA, 393 bp, Homo sapiens
tgcacttgctaaaacattctcctctctgggtctggaagcctagagtctatatccatatgaggcactgggcaggtattccagacttctgagtcatggatgaaaaatgccatcttgcaactgacacagcaattcctttgccaagaaatcatcatatccttagtttcttatgttgaggaaaagtgatgaattaattacaaatttctgcaaatggaagttcattcatttatttggccaccaaatattttttgagtttggagatcaaagcagtagagtctcaactctgaagtcagacagacctgggtggaatcctggccataccattttcaagctatgtaacctcgaagaaattctgtaatctctctaaacctcaataaaatgaaaatgttcacagtg

SEQ ID NO: 342869 - DNA, 370 bp, Homo sapiens
tggagtgctttttccagagaggatctgtttatttctcctgagacaatgacaacacccacctctgtgtatattttactgcttttaagggttcccgttcaatcctgatctctgactcagatctcccactagagcactgatatggccatctgccctcagggcaacccagcttagagtgtttaaaattctctataagcacaacagtacattaatcagaagggcccattagaggatctagttttccctacttctaaaagtggaagttcaaacctgtgtttcaattttacatacactcttatataatgtaccctcccttagagtgcaaagtatcagtactatcctttatcatcagtttaggagttatatgtagtat

SEQ ID NO: 342870 - DNA, 324 bp, Homo sapiens
gttctgtgaaaaacaatatggcagttcctgaagaagctaaccacagcgaattacaaaaacaacccagcaattccattccaaggaacatacccagatgaattgcaaatagggacttaaaccaataattgtatgccaatgttcactgcagtatccagtttagccaaaaggtgcaaaatgtccacctgaatagagtattactgagcattaaaaaggaatgaaattctggtacatactgcaacacagatgaaccttgaaaatattatactaaatgaaagtagtcagacacaaaaatacaaatattttattattccacttacattaaat

SEQ ID NO: 342871 - DNA, 417 bp, Homo sapiens
tttctctccagtgaataacacaatgtagttattcactggaaaacatcatttgcatttgaaagagttactaactaaattctaaagaatgtaccaaagccttgcttaactgtagaatgaggccacacggctgctgggataccaggtactctccctgagcctattgatggcaaatttcatcctgtgaaaaatgggaacaagacacccacttcataggactattatatggttgaaattaaatatgtgtaaaatgcataacatggtgcctggcacacagtaaacacaaaacagatttcttcctctatagcatttaaatgggaagtatttagcgtttacttgccatgtgcatgagtgaatttgggaaaagtggggggaggatatggggcaaagaaggacagaaagggcctaagagtaggaaga

SEQ ID NO: 342872 - DNA, 157 bp, Homo sapiens
ggcaggacttagtatataaatgattgttcaatgaaaggtggaatgaaggagaagagaattatttgagacctccatttatttgtacatgtatatattagatttgtgtgtatttgcctaaaattttggtcagtctcattcctatgccttcatgtagctt

SEQ ID NO: 342873 - DNA, 227 bp, Homo sapiens
aattaaataatgtttataaaaaaagtgagataatgcttgtctgacttcagtttaagcagtcaataaaacatttccattaccactgctattatcactttattcccagtgaagattcctataacaaagacactgggaattcctccagcaaaggaacctgttgacatttttaaaaccatgtacatcgtgtgtgtgtgtgtgtgtgtgtgtgtgtgtgtgtgtgtgtgtgt

SEQ ID NO: 342874 - DNA, 638 bp, Homo sapiens
aaaaaaaaaaaaaaaaaaaacggcaactctttggcaaatagagctctggaagatgcgctggctggcgccgacataaactgctatcctgatctccatcaaagatgtgggccttctcatgctgcagtttcctcaactgcagaacagggagattcttccaatgataattttacctcgaagtgatgttgtaataaagatggtggtaaaagcattttgcaagaccaatttctgaggaaaccctctggtctaagattctagagagtctacagaggttgataactgggattggcttttaagatcttttctggaatggctgttccctttacctcattattactttaaacaactttggcaggagatatcagtaatgccaataacaataatgatgatgatgatgatggttactgagtagttactgatgagcccagcactgtgctaaacacttgaaggacctttttttttttttttttttgacagagtcttgctctgtcaccaggctggagtgcagtggtgtaatctcagctcacagcaacctccgcctcccaggttcaagcaattctcctgcctcagccttccgtgtagcttggactacaggcacgcaccaccacgcccagctaatttttgtatttttagtagagacg

SEQ ID NO: 342875 - DNA, 692 bp, Homo sapiens
aaaaaaaaaaaaaaaaaaaacggcaactctttggcaaatagagctctggaagatgcgctggctggcgccgacataaactgctatcctgatctccatcaaagatgtgggccttctcatgctgcagtttcctcaactgcagaacagggagattcttccaatgataattttacctcgaagtgatgttgtaataaagatggtggtaaaagcattttgcaagaccaaaaaaagaaacacctactaaacaggcatgctgtctatatctggtgtttgttagaatttctgaggaaaccctctggtctaagattctagagagtctacagaggttgataactgggattggcttttaagatcttttctggaatggctgttccctttacctcattattactttaaacaactttggcaggagatatcagtaatgccaataacaataatgatgatgatgatgatggttactgagtagttactgatgagcccagcactgtgctaaacacttgaaggacctttttttttttttttttttgacagagtcttgctctgtcaccaggctggagtgcagtggtgtaatctcagctcacagcaacctccgcctcccaggttcaagcaattctcctgcctcagccttccgtgtagcttggactacaggcacgcaccaccacgcccagctaatttttgtatttttagtagagacg

SEQ ID NO: 342876 - DNA, 402 bp, Homo sapiens
aaaaaaaaaaaaaaaaaaaacggcaactctttggcaaatagagctctggaagatgcgctggctggcgccgacataaactgctatcctgatctccatcaaagatgtgggccttctcatgctgcagtttcctcaactgcagaacagggagattcttccaatgataattttacctcgaagtgatgttgtaataaagatggtggtaaaagcattttgcaagacctgagcaagccaggcctggcttgctcaggtctggcccccaccctcagccagctggaccgcaacctagacagagaaatgaaaccagacccgacactcctagtgacgtctcgacacaacgtcttccagaatgacgagtttaatgtgttcagcagggactcagtaaacctgagcaaccagggggat

SEQ ID NO: 342877 - DNA, 302 bp, Homo sapiens
gtggcaggaggggatggcttatagtacttgtatacaaatttatttgcttgtttattaattacggggtctctctctgttgcccaggctggagtacaggggcacaatcgtaactcctgggctcaagtgatcctcctgcctcaggctcctgagtaacttggattacaggcacatgccaccaggcccagctgattttttcaaattgtctcactatgttgcccaggctggtctccaacttctgggctcaagtgatacttccaccttagcctcctattagtttttcccttacagcaattcctgcaata

SEQ ID NO: 342878 - DNA, 440 bp, Homo sapiens
ttctctgtagcaagtatcttttctcttgcacacactcaactttctcccagacggaattagtatgtattccatagccattactgtggttgcaaaatgtagactttcacagacccggaagatatctacgttttgacagatacatagattccttccagacccaaagaacgataggtagaactggtgaagtagaagaggttaaaggtggaaattatgcagaaaaacagctacctatccacaaattaaccattttgatatctacttcaaagactacatcaacatgccaattcttatttaaaaagagatgcttgtaaaaaggtccgaaaatggctaggtacagtggctcatgcctgtaaatcccagcaccctgagagaccgatgctggtagatcacttgaggccaggagttcaagaccatcttggccacgtagcgaaatcccatct

SEQ ID NO: 342879 - DNA, 292 bp, Homo sapiens
ataggctcttgaatagtttttatagtctagtcagaggtaaagcacatggatgaacactgtggcagttactttcctatccagttttagattttcagcttacttttatgtctaaagttgtattccaaagaatttgaactattaagtagtctgtacgctagctaaatagaagattatgtactacaatattacagaggttccttaagggtagtgctgactctccaagtagtcaaaattttagaatctctgccacttctctgtagcaagtatcttttctcttgcacacactcaactt

SEQ ID NO: 342880 - DNA, 119 bp, Homo sapiens
tgcctgccttcctccccaccccctccttcccgtggttcagcaccgcatttcggagcgtgagctgggagcaatcaactcgacctgacctggaaagtgttggtcagcccccgcgcgcttga

SEQ ID NO: 342881 - DNA, 299 bp, Homo sapiens
agtggggactaataacagtgacctccccgccaggtcctgtgtgttgccggctgaagaagggtagctgaaaaattcagacccagcacagtgtttatgttggtcaaaaatagaaaactatgtctggcgtggccgaggcgggaggacccttcaggccaagagcagcctagcaacatggcgcaaccccatctctgtagtcctacctcagacccccagctacttgaacccaaaggttcaaggctccagtgagctatgatcccaccacagcattccagcctgcgagattgaggtaaaccctgtct

SEQ ID NO: 342882 - DNA, 381 bp, Homo sapiens
catttctgttttcagctctagggagcaattgattatgagatgtcatgaggagcaactctgaagactctgttccagcttaagggaatcagccagtccatccctgtttctctgtcattgagcctaattaagtagggtgtgtgtgtgtgtgtgtgtgtgtgtgtgtgtgtggcaaaactccaactacaattgagagaatacctcagtttggcaggcttgagatgcatatacctgttattagccatagttgggagtggcttttccaaagatgacatcacttggtgtgtcttagatggaaaggaggtcctgtgatgcttttgataaaaaatctgtataaagagttgcttgagggccaacttgaataccagactagaaaaacatggt

SEQ ID NO: 342883 - DNA, 474 bp, Homo sapiens
gtgcccttccttcaggccccaattctctctctctcaagatagaaacaggtaagggaaatttcctcagaaacataaatataacttaactgagttatctgaacccaaagaccacccttgatggccaccatgtatgtagctcaatggaggggaaagaagatatttcaggaagctgctttatcagtgggatttctctacaaattagaaaaacctgcacactattaactcacaacgtggaagaagcggccaatcactgggttctgttttagacacaaaaagaaaagagggcagggccataagaaagggggagaaaaatgagagaaacaaatgtctctggagatttataccatcagaaaggccagcccctcctcccatagcccctacacccacagggcaggaagtagctcgactggaagtaaatagcaaataagtggaaagtttggggtaggggacacagtgagaagaggaagaagaaag

SEQ ID NO: 342884 - DNA, 351 bp, Homo sapiens
tctgtcacccaggctggagtgcagtggcacaatctctgctcactgcagtctccgtctcctgggttcaagagattctcctgcctcagccaccctagtagctgggattacaggtatgcatcatcacgccaggctaatttttgtatttttaggagagatggggtttcaccatgttggccaggctggtcccaaactcctgacctcatcaagtgatccgcccatctcagccttgcaaagtgctgggaagatctggcttttaattttgcagtgcccatttgcccaccaagtgagggagatggtgggatatatgtgttgggattaatcagaaaggttgatactggagacaaatttgct

SEQ ID NO: 342885 - DNA, 2823 bp, Homo sapiens
  misc_feature (34)..(34): n is a, c, g, or t
  misc_feature (2106)..(2106): n is a, c, g, or t
  misc_feature (2823)..(2823): n is a, c, g, or t
gcttatctgtctcgaagcacacacagacaaaatncttttaaaaaagaagggtccactctcgctctactgcaaatcctgaaactccaaactcaaccatctccagagaggccagcacccagtcctcatcagctgcaaccagccaaggctatattttaccagaaggcaaaatcatgccaaacactgtttttgttggaggaattgatgttaggatggatgaaactgagattagaagcttctttgctagatatggttcagtgaaagaagtgaagataatcactgatcgaactggtgtgtccaaaggctatggatttgtttcattttttaatgacgtggatgtgcagaagatagtagaatcacagataaatttccatggtaaaaagctgaagctgggccctgcaatcaggaaacaaaatttatgtgcttatcatgtgcagccacgtcctttggtttttaatcatcctcctccaccacagtttcagaatgtctggactaatccaaacactgaaacttatatgcagcccacaaccacgatgaatcctataactcagtatgttcaggcatatcctacttacccaaattcaccagttcaggtcatcactggatatcagttgcctgtatataattatcagatgccaccacagtggcctgttggggagcaaaggagctatgttgtacctccggcttattcagctgttaactaccactgtaatgaagttgatccaggagctgaagttgtgccaaatgaatgttcagttcatgaagctactccaccctctggaaatggcccacaaaagaaatctgtggaccgaagcatacaaacggtggtatcttgtctgtttaatccagagaacagactgagaaactctgttgttactcaagatgactacttcaaggataaaagagtgcatcactttagaagaagtcgggcaatgcttaaatctgtttgatcctcctggcttatctagttacatgggaagttgctggttttgaatattaagctaaaaggtttccactattatagaaattctgaattttggtaaatcacactcaaactttgtgtataagttgtattattagactctctagttttatcttaaactgttcttcattagatgtttatttagaaactggttctgtgttgaaatatagttgaaagtaaaaaaataattgagactgaaagaaactaagatttatctgcaaggattttttaaaaattggcattttaagtgtttaaaagcaaatactgattttcaaaaaaatgtttttaaaaacctattttgaaaggtcagaattttgttggtctgaatacaaacatttcacttctccaacaagtacctgtgaacagtacagtatttacagtattgagctttgcatttatgatttctccagaaatttaccacaaaagcaaaatttttaaaactgcatttttaatcagtggaactcaatatatagttagctttattgaagtcttcttatctaaacccagcaaaacagattcaaagcgaacagtccaatcagtgggtcatatgtttattcaaaatattttatcttttagctagaatccacacatatatatcctatttgattagggtagtaattaggataactaaaattctgggcctaattttttaaagaatccaagacaaactaaactttactaggtacataagcttctcaatgagtcaccattcttcttttttgtaaaaacttttttctttgaaatgctaaacttggctgtatgtcaaattgtgcaaaatattggtattaaagaatgctgcaacttttttatgtctcttagaggttaatcagagtatctgaagggaattgtttttataaaaacattgaaatattagttacttgctataaatagatttagtctgttatatttccttttgtaaagtaaaatatgtccagaagagtcaaagtagttagttttggttatttctaaaccacaaaagttgtttaataagtatatcttaagaatgtgctagagttaaaagttagcattgtttctagattagctggtgtcttcattttacattgtgacaaacagctagagcatcagagcccttttgctatacccacagtctttcgtttccagccttngtcactagtctttgaggaggtttgctcctagaactggtgatataaagaatgaaagtagctgtatgagcagagcagttcaagggccaaaccctggaacggtagcaatgggatataatacctttctaagggaaaaagttgtatcagtaccatttgatctgccatggacatgagtttaaagcggctttctggcccttctttcagtgacttcttccctaaaatgtagaaattctaacttaatgtagttactgtgagccatattactagtgccccctagggtctataattccttaaaattttcattctgaatctgaaggagagagtcttttaactttagaattcccaagagggctttattacacctcagaaattgaaagcactatgaatttgtccatttaaaaatgatctgtagtttttttggtgctataacattctgacacatatcattctgtgattaaatctccagcttactataaatgatatctatattctaaagagctacttctaattattccaatatgaccttaaggaaaagtaagggaataaatttttgtctttgttggagtgaagcatttaaaagagtaagggtaaaaaagataaagtcctgaacctttcaaaatggaaaattaattctaaacttagaaatatgcttctgcctattgctgatactgtctttgcatacatgaataaaaataaactttttttcttcaaaaaaaaaan

SEQ ID NO: 342886 - DNA, 2088 bp, Homo sapiens
  misc_feature (1371)..(1371): n is a, c, g, or t
  misc_feature (2088)..(2088): n is a, c, g, or t
cgccattctttttttgccttgcttttcattatgctttttttttcgtggttcctcgtcttcgtaggcacgggccgacacttcaaacggtggtatcttgtctgtttaatccagagaacagactgagaaactctgttgttactcaagatgactacttcaaggataaaagagtgcatcactttagaagaagtcgggcaatgcttaaatctgtttgatcctcctggcttatctagttacatgggaagttgctggttttgaatattaagctaaaaggtttccactattatagaaattctgaattttggtaaatcacactcaaactttgtgtataagttgtattattagactctctagttttatcttaaactgttcttcattagatgtttatttagaaactggttctgtgttgaaatatagttgaaagtaaaaaaataattgagactgaaagaaactaagatttatctgcaaggattttttaaaaattggcattttaagtgtttaaaagcaaatactgattttcaaaaaaatgtttttaaaaacctattttgaaaggtcagaattttgttggtctgaatacaaacatttcacttctccaacaagtacctgtgaacagtacagtatttacagtattgagctttgcatttatgatttctccagaaatttaccacaaaagcaaaatttttaaaactgcatttttaatcagtggaactcaatatatagttagctttattgaagtcttcttatctaaacccagcaaaacagattcaaagcgaacagtccaatcagtgggtcatatgtttattcaaaatattttatcttttagctagaatccacacatatatatcctatttgattagggtagtaattaggataactaaaattctgggcctaattttttaaagaatccaagacaaactaaactttactaggtacataagcttctcaatgagtcaccattcttcttttttgtaaaaacttttttctttgaaatgctaaacttggctgtatgtcaaattgtgcaaaatattggtattaaagaatgctgcaacttttttatgtctcttagaggttaatcagagtatctgaagggaattgtttttataaaaacattgaaatattagttacttgctataaatagatttagtctgttatatttccttttgtaaagtaaaatatgtccagaagagtcaaagtagttagttttggttatttctaaaccacaaaagttgtttaataagtatatcttaagaatgtgctagagttaaaagttagcattgtttctagattagctggtgtcttcattttacattgtgacaaacagctagagcatcagagcccttttgctatacccacagtctttcgtttccagccttngtcactagtctttgaggaggtttgctcctagaactggtgatataaagaatgaaagtagctgtatgagcagagcagttcaagggccaaaccctggaacggtagcaatgggatataatacctttctaagggaaaaagttgtatcagtaccatttgatctgccatggacatgagtttaaagcggctttctggcccttctttcagtgacttcttccctaaaatgtagaaattctaacttaatgtagttactgtgagccatattactagtgccccctagggtctataattccttaaaattttcattctgaatctgaaggagagagtcttttaactttagaattcccaagagggctttattacacctcagaaattgaaagcactatgaatttgtccatttaaaaatgatctgtagtttttttggtgctataacattctgacacatatcattctgtgattaaatctccagcttactataaatgatatctatattctaaagagctacttctaattattccaatatgaccttaaggaaaagtaagggaataaatttttgtctttgttggagtgaagcatttaaaagagtaagggtaaaaaagataaagtcctgaacctttcaaaatggaaaattaattctaaacttagaaatatgcttctgcctattgctgatactgtctttgcatacatgaataaaaataaactttttttcttcaaaaaaaaaan

SEQ ID NO: 342887 - DNA, 3301 bp, Homo sapiens
  misc_feature (2584)..(2584): n is a, c, g, or t
  misc_feature (3301)..(3301): n is a, c, g, or t
aactgcagcctagacacattagattatcatttttgtaaactataccatacatttcagtatgcatacttattttaggggtgttttgggggtgatgtgtgtgtctgtgggtctatgtgagcgcggcgccttcctgggactgaggcaccggacctgcgcacacgcgctgcgtaccctacgcccccgccgcgtgggcgccgtcgtcccccgcagcccccccacgcagggggcggggcgctgccacccattggctgaggccgataccacgcgccccgatacccggcgcaggagccacctccctgagccccgcggaccacgcctcagtccgcctgcgctcctcagcctgacggtccgcctttcggggctcctcagccttgtcacccgctcttggttttccttttctcttcatctttggctcctttgaccactcgaagccgcgcagcgggttccagcggacctcacagcagccccagaagtggtgcgccaagcacagcctctgctcctcctggagccggtcgggaactgctgcctgccgccatcatgtctactgcaaatcctgaaactccaaactcaaccatctccagagaggccagcacccagtcctcatcagctgcaaccagccaaggctatattttaccagaaggcaaaatcatgccaaacactgtttttgttggaggaattgatgttaggatggatgaaactgagattagaagcttctttgctagatatggttcagtgaaagaagtgaagataatcactgatcgaactggtgtgtccaaaggctatggatttgtttcattttttaatgacgtggatgtgcagaagatagtagaatcacagataaatttccatggtaaaaagctgaagctgggccctgcaatcaggaaacaaaatttatgtgcttatcatgtgcagccacgtcctttggtttttaatcatcctcctccaccacagtttcagaatgtctggactaatccaaacactgaaacttatatgcagcccacaaccacgatgaatcctataactcagtatgttcaggcatatcctacttacccaaattcaccagttcaggtcatcactggatatcagttgcctgtatataattatcagatgccaccacagtggcctgttggggagcaaaggagctatgttgtacctccggcttattcagctgttaactaccactgtaatgaagttgatccaggagctgaagttgtgccaaatgaatgttcagttcatgaagctactccaccctctggaaatggcccacaaaagaaatctgtggaccgaagcatacaaacggtggtatcttgtctgtttaatccagagaacagactgagaaactctgttgttactcaagatgactacttcaaggataaaagagtgcatcactttagaagaagtcgggcaatgcttaaatctgtttgatcctcctggcttatctagttacatgggaagttgctggttttgaatattaagctaaaaggtttccactattatagaaattctgaattttggtaaatcacactcaaactttgtgtataagttgtattattagactctctagttttatcttaaactgttcttcattagatgtttatttagaaactggttctgtgttgaaatatagttgaaagtaaaaaaataattgagactgaaagaaactaagatttatctgcaaggattttttaaaaattggcattttaagtgtttaaaagcaaatactgattttcaaaaaaatgtttttaaaaacctattttgaaaggtcagaattttgttggtctgaatacaaacatttcacttctccaacaagtacctgtgaacagtacagtatttacagtattgagctttgcatttatgatttctccagaaatttaccacaaaagcaaaatttttaaaactgcatttttaatcagtggaactcaatatatagttagctttattgaagtcttcttatctaaacccagcaaaacagattcaaagcgaacagtccaatcagtgggtcatatgtttattcaaaatattttatcttttagctagaatccacacatatatatcctatttgattagggtagtaattaggataactaaaattctgggcctaattttttaaagaatccaagacaaactaaactttactaggtacataagcttctcaatgagtcaccattcttcttttttgtaaaaacttttttctttgaaatgctaaacttggctgtatgtcaaattgtgcaaaatattggtattaaagaatgctgcaacttttttatgtctcttagaggttaatcagagtatctgaagggaattgtttttataaaaacattgaaatattagttacttgctataaatagatttagtctgttatatttccttttgtaaagtaaaatatgtccagaagagtcaaagtagttagttttggttatttctaaaccacaaaagttgtttaataagtatatcttaagaatgtgctagagttaaaagttagcattgtttctagattagctggtgtcttcattttacattgtgacaaacagctagagcatcagagcccttttgctatacccacagtctttcgtttccagccttngtcactagtctttgaggaggtttgctcctagaactggtgatataaagaatgaaagtagctgtatgagcagagcagttcaagggccaaaccctggaacggtagcaatgggatataatacctttctaagggaaaaagttgtatcagtaccatttgatctgccatggacatgagtttaaagcggctttctggcccttctttcagtgacttcttccctaaaatgtagaaattctaacttaatgtagttactgtgagccatattactagtgccccctagggtctataattccttaaaattttcattctgaatctgaaggagagagtcttttaactttagaattcccaagagggctttattacacctcagaaattgaaagcactatgaatttgtccatttaaaaatgatctgtagtttttttggtgctataacattctgacacatatcattctgtgattaaatctccagcttactataaatgatatctatattctaaagagctacttctaattattccaatatgaccttaaggaaaagtaagggaataaatttttgtctttgttggagtgaagcatttaaaagagtaagggtaaaaaagataaagtcctgaacctttcaaaatggaaaattaattctaaacttagaaatatgcttctgcctattgctgatactgtctttgcatacatgaataaaaataaactttttttcttcaaaaaaaaaan

SEQ ID NO: 342888 - DNA, 249 bp, Homo sapiens
aaccagagatgttaagtcgtttttcaaggtcaaacatctagttggtagtagaggtaatgagttgttttattctttgctcttatcgaagaaaggaaattatagaattaatggaattttatgaagttgggggttttctttatcgttatcattaaaagaacgcagtgtggttttatgaaagcctcacacaggctgtcttctcagcccttttcagacccgcactctttcctccatccacatcctctcccttct

SEQ ID NO: 342889 - DNA, 382 bp, Homo sapiens
cagaacggactttatccacatcactgtaacctgagcccagacttcatcctagacagtcacacagctagggccacaggtggcacaccatggtaaaaacgtgagaccatctgattatccatcaaaacagagggcctactgcacatagacatagatgtgagttggagtagtgtggtcttcccatttctgatgttgccatctatttcctcgagatgacagacagctcatatattttgctcaaagggttgctagagctgtatcctcctttaaggtgaatcctcatttctactcccacaacagaagtggtcctcaacctctttggcaccagggaccagttttgtagacgactttttttccatggaccaggggtggagagatggtttca

SEQ ID NO: 342890 - DNA, 502 bp, Homo sapiens
gtttttttttgagatggagtctccctctgtcacccaggctggagtgcagtggcacaatctcgctcggctcactgcaacctctgcctcccaggttcaagcgattctcgtgtctcagccttccaagtagctgggactacaggcgcatgccaccatgcctgactaatttttgtatttttagtagagacgggatttcaccatgtttcccaggctagtctcaaactcctgacttcaagtgatttgacgacctcggcctcccgaagtcctgggattacaggcgcgagccaccgcacccagcctggagtttgcttttaaagccaatttttataaagtataaaagtataacatacatgcagaaaaactggtcaattacgaggatgtagctagtgaattttcatggagtgagcacctcccttattttgaatttatttccccccacttattgttaacaaacagtggcttgtcatttacaggcctgtgtccttcccaagctagaccattgagg

SEQ ID NO: 342891 - DNA, 454 bp, Homo sapiens
actgaaaacaacaggccaggcctggatgtcctgacagcctagacctaaatagagaggtttttagtgtcctggtaggtcatttcagcctgcttgcaagtgaatgggtcttagggtgtaaggtacatattcaatcatgagcttgaaaactgagaattacttatgtgaatctggaagtggatgtagttttaaattcaatttagacaaaacaaattcctcaatttttcccaagtgtaaattataaccctatattacagaactgtcagttaaattcatgaaagtactctttaccaagcctgaagcaaattggtgcttttgagtgctattacttatcgagaaataaatatataaatcagaaagctgagctttggaaaaaagaaataaatatgaagtcacccaataatccattctgagtagatgaatgattaaagatatgtgaggtgaggttgctttagag

SEQ ID NO: 342892 - DNA, 513 bp, Homo sapiens
accaacctggacaacatagtaagaccccatctctactaaaaataaaaataaaaattagtctagcatggcagcacacacctctagtcccagcatactcaggagggtgagacaggaaggtcacctgagtctggaaggttgagactgcagtgagctgtgatcgcactgctgtacttcagcctagacaacagaaagagaccctgtctcaaaaaaaaaaaaaaaaaacgtctgatgccagcaacttgggacaggcgaggttaagaaatcctgcctctcctggcatttatatcatgttggaaggctcaatcatttacatgcttataagccttagaggagagggactctcttgtcactgcccgcaacctcctggaattcagactagactttccctttagcatttgagaacttcatcttcaacctacatggcaggaaatcagttaaagcttattaaaatgtctttaattagatggaagccaactcagtggttgactatcaaccttcagaatttggaacatc

SEQ ID NO: 342893 - DNA, 494 bp, Homo sapiens
aatgcttgtgaagggcctggtgctgtgcccagcacataggaagtgttcaataaagtagtctgcatggtggtgcagtggaaggatcccaggctttggagccagaaagacctcagttccaggcacagatggaccattaccaactgtatgaccttgagcaagtcattgtgtcacttttgagattacccatgtgtaaaacaggaatgataatacctgcccagactacctcagggaatggttatggggttcagatgagctgatgaaccaagaaggtatttggagttcacttccagtcttaggagacaaaccatacaacaggttgactgaaagagaccatgggaaagctgttttgagtatagccttgcctcccttgagatactaaccctagttgaaattcttccctgaaaggtgtaagtaataaatgggctctaagtagtgttttctgctcatgagacttaataggaggggactttcacgtttaccgggcctgttgtgtt

SEQ ID NO: 342894 - DNA, 1313 bp, Homo sapiens
atgaatgcatgatatctcttggtaaaatggcccagaagaacacagaaaggagttatgaaaagataacacccgtaagtgtgactacacattttgtgatccagtcatcatttctgtggctgaagccatactattttatagaattaatggaaagcagaaaagacatcacaaaccaagaagaaatttggaaaatgaagcctaggagaaatttagaagacaacgattatttgcatgaggacacgggagagaccagcatgctaaaaagacctgtgcttttgcatttgcagcaaacagcccatgctgatgaatttgactgcccttcagaacttcagcacgcacaggaactctttccacagtggcacttgccaattaaaatagctgctgttatggcatctctgacttttctttacactcttctgagggaagtaattcaccctttagcaacttcccatcaacaatatttttataaaattccaatcctggtcatcaacaaagtcttgccaatggtttccatcactctcttggcattggtttacctaccaggtgtgatagcagcaattgtccaagttcataatggaaccaagtataagaagtttccacattggttggataagtggatgttaacaagaaagcagtttgggcttctcagtttgttttttgctgtactgcatgcaatttatactctgtcttacgcaatgaggcgatcctacagatacaagttgctaaactgggcatatcaacaggtccaacaaaataaagaagatgcctggattgagcatgatgtttggagaatggagatttatgtgtctctgggaattgtgggactggcaatactggctctgttggctgtgacatctattccatctgtgagtgactctttgacatggagagaatttcactatattcaggtacatggtaggatcaacttcctgaccttgtgacagatcctgccagtaacatgagaggaaatgagaacgaggctttggagcacagcattggattgctcatgcagaacaccacccagtgccctttccctctgtcacaatgaacagccatgctgcaggtgacggctgctctgtcaacatggatccggcagggcagatgagtggatcccccagcggactcatgagagagcaaacaaaaagtccatatgtgttgtgctaatccactgagattgtgttggttgttacggagcctaacctagcctatcccgacacgaggatcagacatgataatcaaatgtgtttataaagtgttggatggaaatattctgacaacattaaaagactctacccaaggaaggaatttgcatctct

SEQ ID NO: 342895 - DNA, 1234 bp, Homo sapiens
gcgctctggaggctcaggcgccgcgtggggccggcacctcccggcagcagcggcagctgagactcacggtcaagctacggcgaggagtgggtggctgaagccatactattttatagaattaatggaaagcagaaaagacatcacaaaccaagaagaaatttggaaaatgaagcctaggagaaatttagaagacaacgattatttgcaaacagcccatgctgatgaatttgactgcccttcagaacttcagcacgcacaggaactctttccacagtggcacttgccaattaaaatagctgctgttatggcatctctgacttttctttacactcttctgagggaagtaattcaccctttagcaacttcccatcaacaatatttttataaaattccaatcctggtcatcaacaaagtcttgccaatggtttccatcactctcttggcattggtttacctaccaggtgtgatagcagcaattgtccaagttcataatggaaccaagtataagaagtttccacattggttggataagtggatgttaacaagaaagcagtttgggcttctcagtttgttttttgctgtactgcatgcaatttatactctgtcttacgcaatgaggcgatcctacagatacaagttgctaaactgggcatatcaacaggtccaacaaaataaagaagatgcctggattgagcatgatgtttggagaatggagatttatgtgtctctgggaattgtgggactggcaatactggctctgttggctgtgacatctattccatctgtgagtgactctttgacatggagagaatttcactatattcaggtacatggtaggatcaacttcctgaccttgtgacagatcctgccagtaacatgagaggaaatgagaacgaggctttggagcacagcattggattgctcatgcagaacaccacccagtgccctttccctctgtcacaatgaacagccatgctgcaggtgacggctgctctgtcaacatggatccggcagggcagatgagtggatcccccagcggactcatgagagagcaaacaaaaagtccatatgtgttgtgctaatccactgagattgtgttggttgttacggagcctaacctagcctatcccgacacgaggatcagacatgataatcaaatgtgtttataaagtgttggatggaaatattctgacaacattaaaagactctacccaaggaaggaatttgcatctct

SEQ ID NO: 342896 - DNA, 1314 bp, Homo sapiens
atgaatgcatgatatctcttggtaaaatggcccagaagaacacagaaaggagttatgaaaagataacacccgtaagtgtgactacacattttgtgatccagtcatcatttctgtggctgaagccatactattttatagaattaatggaaagcagaaaagacatcacaaaccaagaagaaatttggaaaatgaagcctaggagaaatttagaagacaacgattatttgcatgaggacacgggagagaccagcatgctaaaaagacctgtgcttttgcatttgcagcaaacagcccatgctgatgaatttgactgcccttcagaacttcagcacgcacaggaactctttccacagtggcacttgccaattaaaatagctgctgttatggcatctctgacttttctttacactcttctgagggaagtaattcaccctttagcaacttcccatcaacaatatttttataaaattccaatcctggtcatcaacaaagtcttgccaatggtttccatcactctcttggcattggtttacctaccaggtgtgatagcagcaattgtccaagttcataatggaaccaagtataagaagtttccacattggttggataagtggatgttaacaagaaagcagtttgggcttctcagtttgttttttgctgtactgcatgcaatttatactctgtcttacgcaatgaggcgatcctacagatacaagttgctaaactgggcatatcaacaggtccaacaaaataaagaagatgcctggattgagcatgatgtttggagaatggagatttatgtgtctctgggaattgtgggactggcaatactggctctgttggctgtgacatctattccatctgtgagtgactctttgacatggagagaatttcactatattcagcgtcttctccaggaatagatttcatctcaagaaaccactttctttgatcatctatgaaaagcaactcctcacttgttcaagttttatcatgaaattgcagcaactcagtcacagcttcaggctgtactcagaattccagttctcttgctgctatttctatacatctgcattgactttttccactgaagtcttgaacccctcaaagtcatccatgaggactggaatcaacttcttctaaacgcctatgaatgttgataatgttgatttctttccacaaatcacaaatatttttaatggcatctaaaatggtaaatctttccagaagattctcaattgactttgcccagatccattaagaggaatcattacctatggcatctctggccttataaaatatacttcaaaaaat

SEQ ID NO: 342897 - DNA, 1291 bp, Homo sapiens
gcgctctggaggctcaggcgccgcgtggggccggcacctcccggcagcagcggcagctgagactcacggtcaagctacggcgaggagtgggtggctgaagccatactattttatagaattaatggaaagcagaaaagacatcacaaaccaagaagaaatttggaaaatgaagcctaggagaaatttagaagacaacgattatttgcatgaggacacgggagagaccagcatgctaaaaagacctgtgcttttgcatttgcagcaaacagcccatgctgatgaatttgactgcccttcagaacttcagcacgcacaggaactctttccacagtggcacttgccaattaaaatagctgctgttatggcatctctgacttttctttacactcttctgagggaagtaattcaccctttagcaacttcccatcaacaatatttttataaaattccaatcctggtcatcaacaaagtcttgccaatggtttccatcactctcttggcattggtttacctaccaggtgtgatagcagcaattgtccaagttcataatggaaccaagtataagaagtttccacattggttggataagtggatgttaacaagaaagcagtttgggcttctcagtttgttttttgctgtactgcatgcaatttatactctgtcttacgcaatgaggcgatcctacagatacaagttgctaaactgggcatatcaacaggtccaacaaaataaagaagatgcctggattgagcatgatgtttggagaatggagatttatgtgtctctgggaattgtgggactggcaatactggctctgttggctgtgacatctattccatctgtgagtgactctttgacatggagagaatttcactatattcaggtacatggtaggatcaacttcctgaccttgtgacagatcctgccagtaacatgagaggaaatgagaacgaggctttggagcacagcattggattgctcatgcagaacaccacccagtgccctttccctctgtcacaatgaacagccatgctgcaggtgacggctgctctgtcaacatggatccggcagggcagatgagtggatcccccagcggactcatgagagagcaaacaaaaagtccatatgtgttgtgctaatccactgagattgtgttggttgttacggagcctaacctagcctatcccgacacgaggatcagacatgataatcaaatgtgtttataaagtgttggatggaaatattctgacaacattaaaagactctacccaaggaaggaatttgcatctct

SEQ ID NO: 342898 - DNA, 847 bp, Homo sapiens
cgtggtagcggaaaagaccatgaagtaagtgtttgcatctgtgtgtacgacatcctggtattaaagtaatactttaacgttgctggtatttttatggtcaacaccaacaatcaacaagttaattcacacataatgtctaagggaacactttcataattttttaaactgctaaactccttaagatgtcataaaaatagaagaattcccaaaacaactgacataagagcaactcaacaacatcaagatctttttgaggggaccaccaatcacattctattttactgacttctctttctatccttacaaaactccaagtccctggaaggaaaaataatttgttagtcctctttacagccacagtaccccaataaagtatcttgtattcagatggtgcataattattgtctaacagaattctgctcagccaaacaagctgcatttcaataaacaaaaggcattctgctccaagatctttaatctccttttaaacaaataagtaattaggaacagaaaagcaagtgtcaaatttagtcattatctatttgtacgtggttgttaaatattatacaaatactaacagagtttacttcaactctgtaaagttaaaaatatatatttaaaagctccagataggccgagcatcatggctcatgcctataatcccagtactttggaaggctaaggtgggaggatcatttgggcccaggagttggagaccagcctgggcaacatagtgagatcccatctctacaaagagaaacttttttaattggccaggtgtggctgcatgtgcttatagtcccagctactcaggaggctggggcaggaggatcacttgagccatgag

SEQ ID NO: 342899 - DNA, 582 bp, Homo sapiens
tggctggtgatgggcagtgcatcatggaggtctgtagacctctgtatgaaagccagggccagtggctatccagaggacatgtttatatgttgatagaatgttctagaagctttaaaatatacatttcctaatctttctctcaatttctcatacttttcaagagctcttgtgcctgtcccctctgctttcttttaggccccttcttcttcctgttcttcccttccctttgtgtttttccctcttcctttcttgcttcttccccacagtctagaaacacgttcgagttcttcccatctctacacaaacagatgcagagcctcgggtggcttctgcccccctgtcactctggcttctgtgccccttctgttccatcgcagtgaagctttgtggaggaagtgtctgtgctcactgcctctatccccacctcctggtcactcccctcgccctggctgtctgtccccaccccttctccagactggccaacagaggtcacctatgtatgacctgtgtgttgctaagtccacggctctcaggagttcctacctcacctctccccagcatcggacagtctctaccacttcc

SEQ ID NO: 342900 - DNA, 173 bp, Homo sapiens
aaaaaaaaattagaaaggaaaagcaaatttttgtgaaaaatgtttcagaaaatgtctggttatcagttttaggaaaatatggtaaatagataaaagaacaaagaatgcaaaaaaaaatccctgcttctttaatggttatgctatttgaatataccctttctgccacctcctag

SEQ ID NO: 342901 - DNA, 458 bp, Homo sapiens
atcatcttaacaatataaagtcttccaatccacaaacatggaatgtttttcttttatttagatcttatttaatctctttgaacagtgttttagctccaggtaagttttttgtaaaatgtattcttaagtattttattatttttgatgctattgtaaatgaaattgtcttgttaatttcatttttggattgttcattgtaagtttatataaatagacttatttttgtatattaactttatatcctgcaacattgttgaactgatttattagtttaaaaagtttttagtgaattccttaggatttgctatatataaaatcatattatctgtgcataggtatagttttccttccaattatgtggtctattttagaataagtgccatgcggtgctgagaagaatgtatattctgttgatttgtggtggagagttctatagctgtctattaggtctgcttggt

SEQ ID NO: 342902 - DNA, 432 bp, Homo sapiens
caccactcctatagatcagttcaggtataaggttcctctgcagccagacttttttatcttttaaaaaagaatgccgggcgcagaggctcaagcctgtaatcccagcacttcgggaggccaaagtgggtggatcagttgaagccaggagttcaaaaccatcttaaagttcagctcatttctcattctgaagtttccttttttcacacttctcagattatactgatggattttcacttcctttacattttctccttcctctcaatagtgaatattagtctccagtggctgggtagtagcaagtaaatttatgaagaatcatagttgtgtttgccaagtgactggaaatcagcttccccagtacctcttcaccacaaacacaattaaaggtggggccgaggatcaaaatggaatgcttccttaggactggtacag

SEQ ID NO: 342903 - DNA, 180 bp, Homo sapiens
agatgtccattataatgatacttaatgtggtgggtctatgtatttggtacatattctaagtaggaggaaaataaccgaagttataactgtttctccttatcactgatcatttgtaagggactatgcttggtacagtactataaacccttgatttgttggtggggcagaataaccatggtt

SEQ ID NO: 342904 - DNA, 243 bp, Homo sapiens
tgctaatttttttggtgtgacaatggtatcatagttgatgatgagtgtttatgtattctatttttgtgcatgtgtgaaatgtttcataaagtttcataagaaaaaaagattttaacttaatgaatatttgagtggactgcaattgtgcactcactaccataatggccctgtaatacaaaagcttccaggtgaatcaatgtagagtgatgtggatgtgatctatcctgtcagcaccttgaagat

SEQ ID NO: 342905 - DNA, 406 bp, Homo sapiens
cagtggggtcagaggctcccgcgggaacccgtgtgggctgccccgcatggcatcccaggaacagtggggtcagaggctccctcaggaacctgtgtgggctgccccgcatggcatcccaggaacagtggggtcagaggctccctcgggaacccgcgtgggctgccccgcatggcatcccaggaacagtggggtcagaggctcccgcaggaaccggcacaggctgcacagcatggtgtcccatcgtcagtgcaattagaggttcccgtggtctcagcgccctggggagtggtggtagttctcactatattggacggtgaggttggagaggaatgcagagctaacactggtggagaggcaggagggcaggcaggacggcacacacacaggacgtttaaaacacacagag

SEQ ID NO: 342906 - DNA, 288 bp, Homo sapiens
tgttgactacatcatatacataaggagagtttgaataaaaggcgaatttcagtcagccatctgctgtaaaagcatggtctgctgtacctgagaatgcgagaaaattaagttcaagatcacctgatgaagtaccttcatcaattttcaacttcaagcattggcagaattcatcaactgttatgtggtacgctgtttatttaatgaagacttgtacatatcttccttgtctcttacaatttattacatctttgtgatattttcttcttaataaaagttgcttaatcaatt

SEQ ID NO: 342907 - DNA, 631 bp, Homo sapiens
tgttgactacatcatatacataaggagagtttgaataaaaggcgaatttcagtcagccatctgctgtaaaagcatggtctgctgtacctgagaatgcgagaaaattaagttcaagatcacctgatgaagtaccttcatcaattttcaacttcaagcattggcagaattcatcaactgttatgtggtacgctgtttatttaatgaagacttgtacatatcttccttgtctcttacaatttattacatctttgtgatattttcttcttaataaaagttgcttaatcaattattttttataatgctcttaatattttgggcattccttgaattttcagttattagattgttaattacttaatacagacagaaactagtgtccaaagaggcttaaaacttaagatcaacctgaaatgaagataatttattgacaataagttaaaagaaaaataagaattaaaaaattaaatttcttcaacttcctctttaaagtatcactccaagtgatgcacactaagatattcaaagctaacattatggcctaaaatagtacaactgagcaatttataatcacttctaactgtatgaaatcactctcaatataatcaaaataaagttggcatctgtattgctg

SEQ ID NO: 342908 - DNA, 538 bp, Homo sapiens
tgttgactacatcatatacataaggagagtttgaataaaaggcgaatttcagtcagccatctgctgtaaaagcatggtctgctgtacctgagaatgcgagaaaattaagttcaagatcacctgatgaagtaccttcatcaattttcaacttcaagcattggcagaattcatcaactgttatgtggtgccagctaaggatcttctaagctgtccagctgaatgtgtccctcaccatcatttgttagaatctcttgcaccagcctaatgcacttgaagtaaggcttttttcttcattattcacagcttagtcaatcatacccaggacattctcttttgaatacatatagacataacttttaatctccttccttttcttttctaacttctacctggttatatttatgacactacgttgactggtttccaatgttatttctgttaaaagggtttcttatgagacctgtcactgtaaccatgattctatgggaaaaagcattattggttttaaactgaaataaaaatgaacttctataacaca

SEQ ID NO: 342909 - DNA, 2772 bp, Homo sapiens
acatctggatcgagtctctgaggacctcgttctcgcagtcgcggtactcggtggtgcagagcctcctgcgggacttcagctccatcagagaggaggagtacaacgaggagctggtgaccgagggcttgcagctcatgttcgacatcctcaagaccagcaaaaacgactccgttcatccagcaactggctaccatcttcacccactgctatggcagcagtcccatccccagcatcccagagatccggaagaccctgccggccaggctagatccacactttttgaacaataaggagatgtcagatgtgaccttcctggtggaaggaaagctgttttatgcacataaagtcctgctggtgacagcttctaacaggtaggcagcctcagataacaaactcccagcccaggggcacagaagcaccttgtttcagattccaggtgacagagagtgactcgctggggctgtaccctgcagcctctgcccctcagactgcagtcacattgcagcagagccccactcgccccacagcgggatgagacggggtggacccagggcagcaggaaaggggggctctgaggtggtgttctttctggcctagttattgcttttattattagaaaacataaatatcctggaatgaagagtcagcattctggccacaggcgtcaggtcgcttgtagggtgggtggtggggacagaattgggctcagctcagatgtcttcctaagatggtgtaaaatggcacttgctgaaaattattttaggagcacagcagtaatttttaaaatgttccgtcttgtggtagccggtcaggtgacagatggtgccatcgccacacagtggtgaagtaaaaggttcaaaacccaccttgctttgtctcctttgctccaggttcaagacactaatgaccaataaatcagaacaggatggggacagcagcaagaccatcgagatcagcgacatgaagtaccacatttttcagatgatgatgcagtatctgtactacggaggaacagaatccatggagatccccaccactgacatcctggagctgctgtcagctgccagcctgttccagctggatgccctgcagaggcactgcgagatcctgtgctcccagaccctcagcatggagagtgccgtgaacacctacaaatatgccaagatccacaatgccccagaactggccctgttctgtgagggcttcttcctcaagcacatgaaggccctactggagcaggatgccttccggcagctcatctacggccgcagcagcaaagtgcagggcctggatccactgcaggacctgcagaacaccctggcagagcgcgtgcactctgtctacatcacctcccgggtgtgaggcagggggcggaggctgccgaggccagggcctgtggaggtgccagggcccaccatgtcggggtatggttgtaggccctcttggagccaggttcacggggctgtttcctcctcctcccccagatgtcccccctgtcaccgggcagctcaccctcatctcctctgccctagagctgtttgttcaatcactgatgggcaaaggggagatgtagctaactggtggccctcctccccatctcagtttgcaactcaagggcagccatgcactccccctgggtgtcgctctcccctcctgcaggtcagcagctgatcctgatccacctccgcccaggccctccaagctctactcacccctagggcctcagtaaactcagaccatcccaactggggctcctgggggtacaggaatccttatgaatgtatagaatgcatactgcctaggcccccagtcgtctgcagtaattcaaaagctggtatttttcttcctaaatgtcacatagcaaaggctgcccaaatccccaaacttgttcttcaaaggtttgacaggcttaatgtgggcatccagtggcctgtggacccccccctgccaccacgactgctgccacccggagttcccccattgtctttggtgcctgggcttccagagtccctcccatcaggactaccagcttgctcagttagcagcagagggcagttccccagcttgatggtttctgagctaagtctggcatggaggggcaaggggtaggggatggggtgctgtgtaggaatggcctcagctcttgttttgctgctggttttaggggccaaagtaaatgggtggattctggaacctcaggcctagactaggttgcctttgtgggggcgatgaagcagagtcccctggtcaagtctctcggctcctttaatgtaggattgagagctgggcaaacaggtcccactggggactgtgactcttggagattaaaggacagggcattgatggaaggtaagggccaggagaagaggcctttctgctgtgtcccctcacggccttgccctcgaattctgcaggccctgggctcccctgacacctgtcatatttatggaccagacactggggcagcatcaggcacagtctgtctgggtgcaacttcttcagctgtctggccgcaccttaaaaactatttattcaccaaaagccccaggcatttcagaaggtggcactcaggtcaccctgaaaagcccccaggggcttgcaattctggaaaatattttgactagctgcttggctggatgtacaaagaaataggcattattttattgctgtaatattgtatgatactttaactgtacaataatgttgtcacttactgtaaatgtactatggttttattaacaataaacactcattaacaatgaaaaacttggc

SEQ ID NO: 342910 - DNA, 1951 bp, Homo sapiens
atactacagcatggaccagcgggggcagaagcctggagacctgtacagtcctgacagcagcccccaggccaacacacaaatgagcagcagccctgtcacatctcctacccagtctccagcaccctctcctgtcaccagcctcagcagtgtctgcacaggactcagtcccctgcctgtcctcacacagttcccccggcctggctagatccccaccactgacatcctggagctgctgtcagctgccagcctgttccagctggatgccctgcagaggcactgcgagatcctgtgctcccagaccctcagcatggagagtgccgtgaacacctacaaatatgccaagatccacaatgccccagaactggccctgttctgtgagggcttcttcctcaagcacatgaaggccctactggagcaggatgccttccggcagctcatctacggccgcagcagcaaagtgcagggcctggatccactgcaggacctgcagaacaccctggcagagcgcgtgcactctgtctacatcacctcccgggtgtgaggcagggggcggaggctgccgaggccagggcctgtggaggtgccagggcccaccatgtcggggtatggttgtaggccctcttggagccaggttcacggggctgtttcctcctcctcccccagatgtcccccctgtcaccgggcagctcaccctcatctcctctgccctagagctgtttgttcaatcactgatgggcaaaggggagatgtagctaactggtggccctcctccccatctcagtttgcaactcaagggcagccatgcactccccctgggtgtcgctctcccctcctgcaggtcagcagctgatcctgatccacctccgcccaggccctccaagctctactcacccctagggcctcagtaaactcagaccatcccaactggggctcctgggggtacaggaatccttatgaatgtatagaatgcatactgcctaggcccccagtcgtctgcagtaattcaaaagctggtatttttcttcctaaatgtcacatagcaaaggctgcccaaatccccaaacttgttcttcaaaggtttgacaggcttaatgtgggcatccagtggcctgtggacccccccctgccaccacgactgctgccacccggagttcccccattgtctttggtgcctgggcttccagagtccctcccatcaggactaccagcttgctcagttagcagcagagggcagttccccagcttgatggtttctgagctaagtctggcatggaggggcaaggggtaggggatggggtgctgtgtaggaatggcctcagctcttgttttgctgctggttttaggggccaaagtaaatgggtggattctggaacctcaggcctagactaggttgcctttgtgggggcgatgaagcagagtcccctggtcaagtctctcggctcctttaatgtaggattgagagctgggcaaacaggtcccactggggactgtgactcttggagattaaaggacagggcattgatggaaggtaagggccaggagaagaggcctttctgctgtgtcccctcacggccttgccctcgaattctgcaggccctgggctcccctgacacctgtcatatttatggaccagacactggggcagcatcaggcacagtctgtctgggtgcaacttcttcagctgtctggccgcaccttaaaaactatttattcaccaaaagccccaggcatttcagaaggtggcactcaggtcaccctgaaaagcccccaggggcttgcaattctggaaaatattttgactagctgcttggctggatgtacaaagaaataggcattattttattgctgtaatattgtatgatactttaactgtacaataatgttgtcacttactgtaaatgtactatggttttattaacaataaacactcattaacaatgaaaaacttggc

SEQ ID NO: 342911 - DNA, 722 bp, Homo sapiens
cggggcccgggacccccggccttggactggctggtcggctatccgcctgattgtgagaggacagccggagagtacatcttgggctcactagaccgtcctggtctgacttaccctgacagtggtctgggcagcctgcagacagacgtgcaaggacagatacaagccacacagctggggtgtgagtccttgttatcagggtgggctcccagccaatgggcattactgagagcttgttggaaatgcagagccccaggccccaccccagccctcctgcatcttcacaagctccccaggtggccatgtgctcagtgcagtttaggaagtgctggtggaggctgcgtcacttctcccaagcatcaaaccccggccacattggtcaaacacgtggccgtgaggcacacatcctgactgtagatcaaagtcaggtctttcgggctttaagctttgcagaacatacaaggttacatactagaaactccagtcagggcagacaaggtccagaggaagacctggctgggatctcagctgaaccccactgagaggagctttctagaaagtagcaactgcaggtctccaggctgtgtggtgggctcagggctgcaagagctgacccttatgggctgggactgaggccaggaggcagctggcaggtgggtctagggccttgccctgcacaggagtggtttgtgatataataggagagattgcaaaccccagagtct

SEQ ID NO: 342912 - DNA, 2253 bp, Homo sapiens
acatctggatcgagtctctgaggacctcgttctcgcagtcgcggtactcggtggtgcagagcctcctgcgggacttcagctccatcagagaggaggagtacaacgaggagctggtgaccgagggcttgcagctcatgttcgacatcctcaagaccagcaaaaacgactccgttcatccagcaactggctaccatcttcacccactgctatggcagcagtcccatccccagcatcccagagatccggaagaccctgccggccaggctagatccacactttttgaacaataaggagatgtcagatgtgaccttcctggtggaaggaaagctgttttatgcacataaagtcctgctggtgacagcttctaacaggttcaagacactaatgaccaataaatcagaacaggatggggacagcagcaagaccatcgagatcagcgacatgaagtaccacatttttcagatgatgatgcagtatctgtactacggaggaacagaatccatggagatccccaccactgacatcctggagctgctgtcagctgccagcctgttccagctggatgccctgcagaggcactgcgagatcctgtgctcccagaccctcagcatggagagtgccgtgaacacctacaaatatgccaagatccacaatgccccagaactggccctgttctgtgagggcttcttcctcaagcacatgaaggccctactggagcaggatgccttccggcagctcatctacggccgcagcagcaaagtgcagggcctggatccactgcaggacctgcagaacaccctggcagagcgcgtgcactctgtctacatcacctcccgggtgtgaggcagggggcggaggctgccgaggccagggcctgtggaggtgccagggcccaccatgtcggggtatggttgtaggccctcttggagccaggttcacggggctgtttcctcctcctcccccagatgtcccccctgtcaccgggcagctcaccctcatctcctctgccctagagctgtttgttcaatcactgatgggcaaaggggagatgtagctaactggtggccctcctccccatctcagtttgcaactcaagggcagccatgcactccccctgggtgtcgctctcccctcctgcaggtcagcagctgatcctgatccacctccgcccaggccctccaagctctactcacccctagggcctcagtaaactcagaccatcccaactggggctcctgggggtacaggaatccttatgaatgtatagaatgcatactgcctaggcccccagtcgtctgcagtaattcaaaagctggtatttttcttcctaaatgtcacatagcaaaggctgcccaaatccccaaacttgttcttcaaaggtttgacaggcttaatgtgggcatccagtggcctgtggacccccccctgccaccacgactgctgccacccggagttcccccattgtctttggtgcctgggcttccagagtccctcccatcaggactaccagcttgctcagttagcagcagagggcagttccccagcttgatggtttctgagctaagtctggcatggaggggcaaggggtaggggatggggtgctgtgtaggaatggcctcagctcttgttttgctgctggttttaggggccaaagtaaatgggtggattctggaacctcaggcctagactaggttgcctttgtgggggcgatgaagcagagtcccctggtcaagtctctcggctcctttaatgtaggattgagagctgggcaaacaggtcccactggggactgtgactcttggagattaaaggacagggcattgatggaaggtaagggccaggagaagaggcctttctgctgtgtcccctcacggccttgccctcgaattctgcaggccctgggctcccctgacacctgtcatatttatggaccagacactggggcagcatcaggcacagtctgtctgggtgcaacttcttcagctgtctggccgcaccttaaaaactatttattcaccaaaagccccaggcatttcagaaggtggcactcaggtcaccctgaaaagcccccaggggcttgcaattctggaaaatattttgactagctgcttggctggatgtacaaagaaataggcattattttattgctgtaatattgtatgatactttaactgtacaataatgttgtcacttactgtaaatgtactatggttttattaacaataaacactcattaacaatgaaaaacttggc

SEQ ID NO: 342913 - DNA, 1816 bp, Homo sapiens
acatctggatcgagtctctgaggacctcgttctcgcagtcgcggtactcggtggtgcagagcctcctgcgggacttcagctccatcagagaggaggagtacaacgaggagctggtgaccgagggcttgcagctcatgttcgacatcctcaagaccagcaaaaacgactccgttcatccagcaactggctaccatcttcacccactgctatggcagcagtcccatccccagcatcccagagatccggaagaccctgccggccaggctagatccacactttttgaacaataaggagatgtcagatgtgaccttcctggtggaaggaaagctgttttatgcacataaagtcctgctggtgacagcttctaacaggtaggcagcctcagataacaaactcccagcccaggggcacagaagcaccttgtttcagattccaggtgacagagagtgactcgctggggctgtaccctgcagcctctgcccctcagactgcagtcacattgcagcagagccccactcgccccacagcgggatgagacggggtggacccagggcagcaggaaaggggggctctgaggtggtgttctttctggcctagttattgcttttattattagaaaacataaatatcctggaatgaagagtcagcattctggccacaggcgtcaggtcgcttgtagggtgggtggtggggacagaattgggctcagctcagatgtcttcctaagatggtgtaaaatggcacttgctgaaaattattttaggagcacagcagtaatttttaaaatgttccgtcttgtggtagccggtcaggtgacagatggtgccatcgccacacagtggtgaagtaaaaggttcaaaacccaccttgctttgtctcctttgctccaggttcaagacactaatgaccaataaatcagaacaggatggggacagcagcaagaccatcgagatcagcgacatgaagtaccacatttttcaggtgtgtgggtcttggtgccgccctcttctcagagggatgaccctcccccaggagcccaccttgtgggcagctgtgcattggttgtcattgttcactctattcccagtgccttctgtattctgttgaatgaatagagcatccaggtctttccctgtgcagaggtagccatccgttgtggggctgcagcttcagagcctgtcacatgggtcctgagctctaaccgctggacaggtggtctgggcagcctgcagacagacgtgcaaggacagatacaagccacacagctggggtgtgagtccttgttatcagggtgggctcccagccaatgggcattactgagagcttgttggaaatgcagagccccaggccccaccccagccctcctgcatcttcacaagctccccaggtggccatgtgctcagtgcagtttaggaagtgctggtggaggctgcgtcacttctcccaagcatcaaaccccggccacattggtcaaacacgtggccgtgaggcacacatcctgactgtagatcaaagtcaggtctttcgggctttaagctttgcagaacatacaaggttacatactagaaactccagtcagggcagacaaggtccagaggaagacctggctgggatctcagctgaaccccactgagaggagctttctagaaagtagcaactgcaggtctccaggctgtgtggtgggctcagggctgcaagagctgacccttatgggctgggactgaggccaggaggcagctggcaggtgggtctagggccttgccctgcacaggagtggtttgtgatataataggagagattgcaaaccccagagtct

SEQ ID NO: 342914 - DNA, 498 bp, Homo sapiens
tgcaggaagccaagagagcagatttggacaatgtagaatttctccacgctcctcctactgtccccatcttaggcctggctactgcgggactgacaggcatggctggctgtccatccgttccttagtttgattgcatggcagacatgaggaaggaaggtgagaactgagctagaaagttggcatttggtgctctggtttctcaatgcaagaaagtaacactttggcttttatagaataaccttctgaggaaattaacaacccgggcgtttcagccccctgtgaacttgattggagcatggtcacaatttgtaacgaaatgtgcttgcatgcccagtgctaaagatttctctctgtctaccctctaggctgtggaaaggtctgttctaaccattagcttgtatctggagctcagatggtgccggacactccgtaggagctcagatctgttgatagaagccactagagaatgggacaagcaacaggaggtgttttgctgcc

SEQ ID NO: 342915 - DNA, 359 bp, Homo sapiens
acacagggcaaaagctttataatattggatttggcagtgatttcttgggatatgacaccaaagacacagacaataaaaggaaaaccagacaaactgtacttcgtcaaaatttgaagcttgtacatcaaaggatactatcaacagagtaaaaaggcaacccatagaattagacaaaataattgcaagtcacctgtctgagaagaaactaatattcagaatatatagagaatgcctaactactgtgtaaaacagggcagttccttaaaaaaacaaacagaattacctgtttcattcagcagtcccacttctgagtatattcacaaatgaattgaaggcagggaattgaaagatatgtttac

SEQ ID NO: 342916 - DNA, 280 bp, Homo sapiens
cccacttgcagttgggtggggccatgtgaccagttctgccaagtgagcagtgagtggcagtgacacacagaagaatattgaagagtggtgtgccgtcttccagctttctcttctgcagctgcaatcctagaggccatgtgttgagacagcagaaccgcacaatggagtaacctggattgctgagtcagcacatggaggacagctgtctttagaaacttgcttgatggtgcatgagtgggaaataaacatttgtggtgttaagccactgaaattcaagaca

SEQ ID NO: 342917 - DNA, 242 bp, Homo sapiens
ccacaccaataatataatggcaggtcattattataaagcccttcatccttgccacaaccccagaagatgggccttactggtattctcattgaaagatgaggaaattgaggctcagagaggtgaagtcacttgctaagaacaccaggtaaggctgcgcatgatggctcgtgcccgaaatcccagcactttgggaagctgaagcaggtggatcacctgaggtcaccaacatggtgaaaccccat

SEQ ID NO: 342918 - DNA, 560 bp, Homo sapiens
ctggagttaatttttatatatggtgaaagataggggtccagtttcattctttggcatatgctctgcccatttttgaactgggttgtttgttttcttgagttttaggagttctctatatattctggatattaacatcagagatatgatttggaaatattttctcctattctgtgggttgcctttttactctgttgatgttgcttttgatgcacaaaagtttaaaagtttcaggatgtctaatttgtctattatttcttttcgtgcctgtgcctttggtgaactaatcactgccaaatccagtgccatgaagggtttgttccatgttttcttctatgagttttatagtttcagtggctacatttaggtctttgatccattttgagttaatttttgtataaggtattaggtaagggcacagctttattcttttgcatgcaaatattcagttttcccagcaccatttgttggaaaactaaaacaaaaactatcctttccccatttcatagtcttggcatcgttgtcaaaattatttgaccatatatgtgagggtttatttctgg

SEQ ID NO: 342919 - DNA, 205 bp, Homo sapiens
atgctccgttgtgattgctcttctttttccagcttttttaaggtggagggttaggtcactgatttgagatagttctttaacgcaggcatatacagctacgaatttccctttaagtatgctttagctggatctcataagtactgttatgttgtgcttttatttgaaagtattttctaatttctgttgtgatttctcccctcaattt

SEQ ID NO: 342920 - DNA, 1826 bp, Homo sapiens
aggtgtttacctggcactcaggtgagtggtgcgctctggctgttttctgtcggagccgcccgcctcttccttcagcgcgtcccacaaatcccgacggcacggaggggccccaggccaagggcgatgggcccctgagccctgacaccgcttcgccgctgctgcaggtgcccctggccggcagcgccgccgtggtcccggagcgcggcgacatgccggagctggtggtgaccgcgctgctggcgccgtcgcgcctgtcgctgaagctgctgcgcgccttcatgtggagcctggtgttctcggtggcgctggtggccgcggcggtctacggctgcatagcgctcacgcacgtgctgtgccggccccggcgcggctgctgcgggcgccgtcggagcgcgtcccccgcctgcctgagcgacccctcgctgggtgagcacggtttcctgaacctcaagagctcgggcctgcgtctgcactatgtctcggctggacgaggtaacggacccctcatgctgtttctgcacggcttccctgagaactggttctcctggcgttaccagctccgggagttccagagccgcttccatgttgtggctgtggacttgcgaggctatggcccctcggatgcacctcgggatgtggactgctacacaatcgacctgctgctggtggacatcaaagatgtcatcctaggcctgggttactcgaagtgcatccttgtggcccatgactggggtgccctccttgcctggcatttctccatctactacccatccctggtcgagcggatggttgtggtcagtggtgcccccatgtcggtgtaccaagactattccctgcaccacatcagccagttcttccgttcccactacatgttcctgttccagctgccctggctgcccgagaagctgctgtctatgtctgactttcagattctgaagaccaccctcacccaccgcaagacaggcatcccatgcttgacccccagcgagctcgaggccttcctttataacttctcacagcctggtggcctcactgggcccctcaactactaccgaaacctcttcaggaacttccccctggaaccccaggagctgaccacacccacattgctgctgtggggggagaaggacacttacttggagctggggctggtggaagccatcggcagccgctttgtgccgggccgcttggaggcccacatcctgccaggcatagggcattggatcccacagagcaacccccaggagatgcaccagtacatgtgggccttcttgcaagacctgctggactagtggtccttgctggcctgcccaggaggcatggatactcaggaaggaacacacacccattatctgtgtgtgcctgggagtccatacaatgtccatacatgggtgaactcttgaatcgctcataggcatgggactcctggatcccacacaagcgcacctatgggtgcctcgggacacaccaacccctatactcacacacaggcatggatgcatgtgtgtgtaacaaacactttgaccctgggaactgggtatacctctcttccagtggagccagatgccgagaccgagtgtcccacctcctcccttcctggggcctcactctgcgctttgccaaagtcgcttctctgccatagctgcacagaccttaaaccctgaccttcctgtccctgccttcgacctcctgcctgggtcttcagctcagtgctactctgaatacaatactgctgaccacatttggctacttcaacttaaatgtatgttaattgaaatgaaatacaatgaaaatgcagtgctcagtcccaccagctgtatttcatt

SEQ ID NO: 342921 - DNA, 1182 bp, Homo sapiens
aggtgtttacctggcactcaggtgagtggtgcgctctggctgttttctgtcggagccgcccgcctcttccttcagcgcgtcccacaaatcccgacggcacggaggggccccaggccaagggcgatgggcccctgagccctgacaccgcttcgccgctgctgcaggtgcccctggccggcagcgccgccgtggtcccggagcgcggcgacatgccggagctggtggtgaccgcgctgctggcgccgtcgcgcctgtcgctgaagctgctgcgcgccttcatgtggagcctggtgttctcggtggcgctggtggccgcggcggtctacggctgcatagcgctcacgcacgtgctgtgccggccccggcgcggctgctgcgggcgccgtcggagcgcgtcccccgcctgcctgagcgacccctcgctgggtgagcacggtttcctgaacctcaagagctcgggcctgcgtctgcactatgtctcggctggacgaggtaacggacccctcatgctgtttctgcacggcttccctgagaactggttctcctggcgttaccagctccgggagttccagagccgcttccatgttgtggctgtggacttgcgaggctatggcccctcggatgcacctcgggatgtggactgctacacaatcgacctgctgctggtggacatcaaagatgtcatcctaggcctgggttactcgaagtgcatccttgtggcccatgactggggtgccctccttgcctggcatttctccatctactacccatccctggtcgagcggatggttgtggtcagtggtgcccccatgtcggtgtaccaagactattccctgcaccacatcagccagttcttccgttcccactacatgttcctgttccagctgccctggctgcccgagaagctgctgtctatgtctgactttcagattctgaagaccaccctcacccaccgcaagacaggcatcccatgcttgacccccagcgagctcgaggccttcctttataacttctcacagcctggtggcctcactgggcccctcaactactaccgaaacctcttcaggtgagaccagttgccaagcataagctcaggagatttgcaggggcaggggggtgggagggttgggggagagatataatttttgtttttggggggggccggtgccccctgccccctcc

SEQ ID NO: 342922 - DNA, 1026 bp, Homo sapiens
aggtgtttacctggcactcaggtgagtggtgcgctctggctgttttctgtcggagccgcccgcctcttccttcagcgcgtcccacaaatcccgacggcacggaggggccccaggccaagggcgatgggcccctgagccctgacaccgcttcgccgctgctgcaggtgcccctggccggcagcgccgccgtggtcccggagcgcggcgacatgccggagctggtggtgaccgcgctgctggcgccgtcgcgcctgtcgctgaagctgctgcgcgccttcatgtggagcctggtgttctcggtggcgctggtggccgcggcggtctacggctgcatagcgctcacgcacgtgctgtgccggccccggcgcggctgctgcgggcgccgtcggagcgcgtcccccgcctgcctgagcgacccctcgctgggtgagcacggtttcctgaacctcaagagctcgggcctgcgtctgcactatgtctcggctggacgaggtaacggacccctcatgctgtttctgcacggcttccctgagaactggttctcctggcgttaccagctccgggagttccagagccgcttccatgttgtggctgtggacttgcgaggctatggcccctcggatgcacctcgggatgtggactgctacacaatcgacctgctgctggtggacatcaaagatgtcatcctaggcctgggttactcgaagtgcatccttgtggcccatgactggggtgccctccttgcctggcatttctccatctactacccatccctggtcgagcggatggttgtggtcagtggtgcccccatgtcggtgtaccaagactatgttttcacataagattagggtccttttggaaagaatagttgcagtgtttataggatagttgtggtaagaatctagtttattttgcatttggctaattggtctgtgctgcatggttatatactcctggattatagattaaaagtctctgtagacatctctgtgaagagcaagctatcattaaacatgtctgtttatc

SEQ ID NO: 342923 - DNA, 783 bp, Homo sapiens
gctagtcttgaactcctgacctcaagttatctgcccgcctcggcctcccagtgctgggattacaggtgttagccactgtgcctggccaacctcacatattttgatgctgttgttaggcccatacacctcaagatctgttatgttttgtgtctaaagtagtaagatatttccgctttctttggattactatctttctccatcccttttgtgtttttatgtttaaagtgggcttcttttctttttttttgttcatggcaagatcttgtcatgagacagcaggtttcttttttctttgcaatggggtcttgctctgttgcccaggctgcagagcagtggtgcaatcacagctcactacaacctcaacttcctgggctcaagcgatcctaccacatcagcctcttgagtagctgagacttataggtacacaacaccacaccaagctaatttttttaactttttgatgagatgatttctcactatgttgtttaggctggtctcaaactcccaggctcaagggatcctcccatctcggcctcccaaagtgctggaattacaggagccatcactcctggccgaagcaggttccttatagaaaacacagttggggccaggcactgtggcctgtaataccagtgctttaggaggccaaagcaggaggactgcttgaggctcaagagtttgagaccaacctgggcaaaatagtgagacctgatctctacaaaaataaaaaaagagctggatgtggtgacatgcacctgtagtcccagctgcccgggatgctga

SEQ ID NO: 342924 - DNA, 633 bp, Homo sapiens
ccctctttctcagtcttttggaatagtttcagtaggattggtaccaattcttatttgaatgtctggtagaatttggctggaattcatctggccctggtctttattgttggcattttttatactgatttaacctcattgcttgttactggctgttcaggatttttgcttcttcctgattcaagctaggagggttgtgtctttccaagaatgtatctattttctttagactttctagtttatgtgcatagaagtctttatagtaatctcaaatgatataaagtctcactttggattttgtttgttcatgtttctctagttccttgaggtatgacattaggttttcaatttctgatttttcagactttctgatgtaggtacttagcactattaactttcctcttagcactgcttttgctgtacaccaaagagattgataacttatgacactatagtcaatcattttgaagaagttttacattttcatcttgatttcatttttagtccaaaaatcattcaggagcagattgtctaatttccatgtatttgtatagttttaggagttccctttggagttgattcctgtctttattccactgtgcactgagaagatacttgacataattttgatattta

SEQ ID NO: 342925 - DNA, 687 bp, Homo sapiens
ccctctttctcagtcttttggaatagtttcagtaggattggtaccaattcttatttgaatgtctggtagaatttggctggaattcatctggccctggtctttattgttggcattttttatactgatttaacctcattgcttgttactggctgttcaggatttttgcttcttcctgattcaagctaggagggttgtgtctttccaagaatgtatctattttctttagactttctagtttatgtgcatagaagtctttatagtaatctcaaatgatataaagtctcaaaaagaactttattcagttcttctctgactttgttatttattttcttccgctagctttggattttgtttgttcatgtttctctagttccttgaggtatgacattaggttttcaatttctgatttttcagactttctgatgtaggtacttagcactattaactttcctcttagcactgcttttgctgtacaccaaagagattgataacttatgacactatagtcaatcattttgaagaagttttacattttcatcttgatttcatttttagtccaaaaatcattcaggagcagattgtctaatttccatgtatttgtatagttttaggagttccctttggagttgattcctgtctttattccactgtgcactgagaagatacttgacataattttgatattta

SEQ ID NO: 342926 - DNA, 580 bp, Homo sapiens
tacattgacattttaattaacaagttcttacttaaattttaactccaaagagtctagcacaatatatttaagtagtcaactacacagtcagtgtaaaatgttgacttctgtccatctaacacagttgtataggaacggttttacctgcaaagcactaataatacttattggcgtatggcctttgactcatttataccatttcctaaaagaggcatgaaggacacagagagcttttccatgtaactcagagcccataaatggtagctcctcttagaatattatgtctactctcttattcaattattcaataaagattgttaactctccctctaaagtggccttcaaattaagtaaaaagttgtgagttgtttgaatcatattcacatccagcactgtttgattaaaaaaaaaaaaaatagcctttctgaaaccagacttggagtcctaatcacccagaatagttccagacaagattcagaatcagaactctgactctgcccaacaattccactaaattaattcactctgcactctcttgaatggatttggaaggcaaatcatgagcttgctttagagtatt

SEQ ID NO: 342927 - DNA, 721 bp, Homo sapiens
tttattttctctaactctacattctcttctcagtactcaattcttcatcaattccagagtctctgtccattatttaaaccaatattttattaaaaccctcatactcttgtccttctccctaattcagccttctatctcatgtgctcaatgaaatcccaaatttggatcaatctaactaactgcatttactgcacctttatttctgctgctgggttctaaaatcacatacaaaaaattaaatcatacgaattaaaagtctccttcttcacctgggcccgcaatgctacatacagtccctccacatgtgcttagtcagcatcctctctcaaagaactatttcaaattttaaccacttgtcaggcccgaatctttaccacatctcttcttctcactctcaggagataagcttacatgctgtttcacagagaaggcaaaaatcattaaatggaaattatcttgtcacaaaaaatgtatccacatttaaactcacctagatcaatttacctagtaaaaagcatcactcctattaaagagtaatccttccactacgtactgtttcctagactctattcacaccttgagaaccttatgctccattaactatgcttgcttctttttttgtgttttttgtttatttggagacagggtctcactcctgtcacctaggctggggtgcagtggtgcgatcacagttcactgcagcctccttgggctcaggtga

SEQ ID NO: 342928 - DNA, 323 bp, Homo sapiens
aaaatggtgctgtaggagaatacaagggacctggccaagatgagggtcaggaaagaccttctgagggaaataatgttaaagccgaaactgatgtctacacaagtcaaaaagttgtatatacacaagtcaaaaagtaggatggagcatattccatttgaagaaatggaatatgtatgcaatatatatttatttcatctggagaaaggaaagcaaaggggagggtggtatgtaacgaggctagaaagacacgcagggcagtgctgtggaaagatttgtaataattattttatctaacaattatttgttaagtacctcctatatcc

SEQ ID NO: 342929 - DNA, 417 bp, Homo sapiens
tgggattatgggtgtgagccaccacgcccggccctgttgtcctattgtggtaccaaatactgtatcttattccttctaattaactgtatttttatactcattagccagcccctctttatttccctctccccactacctgtcccatgtcctgagggcagtattttttagctctcagatatggatgagaacatgagatatttgtctttctatacctgacttacttcacttaatgtaatgtcctccaggtatatccatttatatccatgtcattacaaatgacagcatttttgtggttggataatatcccattgtgtgtatgtaccatagtttttttattcatttattcgttaatggatgctgacaaggatgtggagaaaggggaaccctcgtacactattagtgggaaagtaaattagt

SEQ ID NO: 342930 - DNA, 926 bp, Homo sapiens
  misc_feature (785)..(785): n is a, c, g, or t
tatgtccagaaggtccttcttaacaaacactaattagtacagggaaaggtctctttaagtgaatgcatttaaaatagggagtccacctttgtggtaaatagtgtgcacgaggtgagtctggatcaggacttcacacttgataacggaattcaatttctcaaaatacctttatttcagatttaatgaaattccatgtttgttgaatcattaagaacgagcatttgtgttgtactcatggtggacagccaccattctaatgcttgactttacataattaacgcatgtaatctgcaaaggagccacaaggcgagatctattattattcccattgtgccgctggagaaattaaggcagagaggttaagttgcttgccaccaaactagcgaggggcagagctgggatgtgtagcatccaggtaggttggctccagagcccatgagcctaactactactgtgcccaacctttgtgccaatccccacaacagtcaaaggatggatcaagtactggttttgggggtgggggcaggggactctgggcagtatgttttctgatcacatcacatgacagtaggacattcttcatttcaccatggctttcactgcccaacaataaaaaggtcatgggcactttgggaggccgagggggggggatcacgaggtcaggagatcgagaccatcctggccaacacggtgaaaccccgtctctactaaaaatacaaaaaattagccaggcatggtggcgctgagccaggtactcgagctagcagagatgctgactcgagganactgcatgagtggaccgcatgactcaaactggcaaaacagaatcgttcaaaaaaaaaaggaaaccgggtccactaaacttggaatacctttcactgcgattacaagccaccgtgccttaaattgcaccagggaaggattag

SEQ ID NO: 342931 - DNA, 667 bp, Homo sapiens
aaaaaaaaacatttactaagtaggtaaccttgggtaggttggttaaaatttctctagagcagactggctaccttatctataaaatgtggaagtaacaacatgtacttcctaaggttgttatgagaattcaacaagttacgtataggcttaatctataataaatgctctacttaatctacaataaatgcctataaattctagcaattattatcaatgtgaattatgaaatgccatctacaggacaggaagggtcggggaaatgagaggtacaacagaaagagaaaaggaaaagagttgagactggtttactgaaacaaaaggaaatgaacattaagttacaggaaaatttcaagggagagaaaaggtagtcactgattcataatatactgaagaattctgagaaaagatacttctatgttagggtaacacattttttggagagggcagtgagatatgggagccagcgtcaaataatgcttttaaggcatccacagccttcttagaagaagaccatgaactaccactccaagaagtctgcaactgttttttttttttttttttaaagctgactttctggagttaggaaaaacccacatacagctaagtgtgttcatatccttaatcattcaacaaccattgagtgccctgtgtgtttcaggatgttgac

SEQ ID NO: 342932 - DNA, 501 bp, Homo sapiens
agagagagagagagagagagagagagagatttattttaaggaactggcagatgtggttgttggggccggcaagtctgaaatctgcagggcaggccggcaggctggagacctagggaagggttggtgttgcagcttgagtccaaaggcagactgaaggcagaattccctcttccttgggatccactttttctcttaaggccttcaactgactggatgaggccaacccacattatgaaaggtaacgtgctttactcaaaatctactgatttaaatgccatcttaaaaatacattcaaagtggcaactagactggtgtttgaccccccagtctagatgtccaaatatgtgaatatccaaatatgtggatagcatggatagccaagttgacatataaaattaacaattatacccacttatgtggggaagttagtacagtaattttaattttttattccaatttggctatcaactgttgagagcagagaaagagcaggccaactgt

SEQ ID NO: 342933 - DNA, 204 bp, Homo sapiens
tgtcattgcttttgctcttttgtggacatgagcaaaaacaggcaacgagaagtgaaaactgtgagtgttctgacctgaggtccaacagttgccgttctgcgtccctgttccagctcacactgtaaacaagggtcctttgcccagggtatctggttttgtgtttttttgtttgtttgttttgttttgttttttgttttgaggtgg

SEQ ID NO: 342934 - DNA, 2067 bp, Homo sapiens
agtagagatggggtttcaccatgttggccaggctggtcttgaattcctgacctcaggtgatccacctgcctcagcctcccaaagtgttgggattacaggtgtgagccatcgcacccagctggggctatctttagtagcagatggtaactgagctgggcaattgttctttgacatttccagttcttatctgttaacatggacagtgatttaaataggcagctgcatggacggcctctccctaactgctgctatcttgtatctcctcattggtaattatttttcctagcccaaattccacgtcaaacactatcaatattctggggaccaccctttcatacactgctctgtacacatacctgtttatacatattttaacaaaagtggaatatttacatactgttgttatcatagccaagctcaacagcatcaaaagcatttttaggtacttaattcaagtggctgtaaaatttaaaaaaaatcattttttctgatactatatcatctttgtacccgtatatttcaatttcttgaatgttcattacaattttatttttactttttattctttcttgagacagagtctcactctatcacccaggctggagtgcatggtatggtctcagctcactgcaacctctaccttctgggttcaagcaatcctcccacctcagccttcagagtagctgggaacacaggcgtgcaccaccacgcccggcttatttttgaatttttttgtagagacggggtttctccgtgttgcccagtctggtcttaaagtcctgagctcaagcaatctgcctgcctcggcctcctgaagtgctgggattagaggcaagccactgcgcccagcctttattacaattttaaatgtttttctctgtgttagcgaacctttgatggactgttttaaagagtgttaaagagtgtttaaatcactgtgaaatgcacattctgtcttaatatttataattattagggtaccttcattaatagtgtacattgcatagtgccaaacgagatcaccacatcacttctaaaggattcctggaagtctgagtcacaagcatgagacaacagctgcaggactgggtggtgaaggttgtgaaaacttcctggcttaaacaggaatttgacccaaaacaagaagtcttagggaagatagcttagggcttgtctggtggcaccacaatgccatcaaatgcccagcctctttacagttttctgctctgccatccttggaatgcaggccattgttctcctgtttgttgtttcatgactgaactatgagtgctgtagctcttcacgttcctcctggaagacaggtgtagggcaaagatgagctctgattcgcagagcccttccatctatatgctttcttagaagcctcagcaataagttcaacattcaactcattggcttgaagtgtgtcaaatggctgccccttgcttcaaaggagtctgagaaaataactttagctagaattaaagttccattagagtgcctgggtagacaaagaagagtcagctacagaaggccagtatcatagcaagttgttgctccatgactggaaacaaagaagacttcactctttacttcagatgcgcagttgatagagtacagctaagatatggtacgtgttctaccatgaagagcaagagcaaggtgagggagggtacggtgtaagagatcctgctgcattagctgttgagaggaagaatttcctcctggtcactatgttactgggggtccttgctccccaagttcccaagatggtggcaggtcgcttccaagatggtgacgggccacttccgagatggtggcaagtcttgtgttctctgacctggggttcttggcctcatggattccaaggaatggaatcttgggccaagcggcgagtgttatagctctattagaagctgtgggtcatggaagagaatcgtggaacccagtgactagtgtttagctagattaggacgaacctgggcacttagccctgcaggaacaagggcaagcctttagcccgatcaggagcagcaatgggcgcctcgctggatccagagggatgga

SEQ ID NO: 342935 - DNA, 1122 bp, Homo sapiens
ccccgtgtttaaaggtggacgtggtcaatttcccagctaggcttagggattcttagccagcctaggaaatccaactagtcctgtctctcagtaccccctctcaacaggaaaacccaagtgctattggggaggtttgaccaccgctctaactgcttcctgctgaattggggcacagtaggggttgtgcagttgagatttcctccgtaggggtgccttgtctctcaactaattcagtggtggctacctcgaagcccttctgaagctaagagggaaagagaccagctcgcaaagtcccctatgttatctactcctaagtggaagctgggagctgtgaaaatgcacatctaacaacccttaacttactataccgacttctaaaccacagcagaaaatgaagaaaagttcggctatgggcaatagactcaactttttgttctatgtctaacctataaaatagaaaaataatactgtcatccctcatctcccaccatactgaacacgcattaggtgctcaatgaatacttgtccattttagtgaagattaagaggaatgagacggaaactgacacttgagaggctggcacacgccagaactgcaccacactttgcactcatagctcatttactcatcagcttgtggtcaggtaggcattaccgtccccattagagaagtcaacggaggctcagcaaggacggccagggtcccccagaaagtagaggaggacttcaggtttaaccaaaagcctgtactctttacacatgtaccccatggcttctccaccaaagctcctggcaccgtgctttgcagacagacgacgctcaacacattttgagcagaagcgtggttcagcaccaggaaggacaccaacttttgcagagacgactcttgggatggagaaagacttcccaaatcttcagggtgcggtcaagacagggtaggctagcgccaggggagctagtggctaggccccagggcagctggggccgaggccgagcaaacggccaggggagaggctcccaggagcccgatctgccgctgggcgacgcgaagcctggcggctagagtcccgggcagcccgagcacggcgggaaggcggcagcaacaggatcggcagggccgct

SEQ ID NO: 342936 - DNA, 4367 bp, Homo sapiens
agtagagatggggtttcaccatgttggccaggctggtcttgaattcctgacctcaggtgatccacctgcctcagcctcccaaagtgttgggattacaggtgtgagccatcgcacccagctggggctatctttagtagcagatggtaactgagctgggcaattgttctttgacatttccagttcttatctgttaacatggacagtgatttaaataggcagctgcatggacggcctctccctaactgctgctatcttgtatctcctcattggtaattatttttcctagcccaaattccacgtcaaacactatcaatattctggggaccaccctttcatacactgctctgtacacatacctgtttatacatattttaacaaaagtggaatatttacatactgttgttatcatagccaagctcaacagcatcaaaagcatttttaggtacttaattcaagtggctgtaaaatttaaaaaaaatcattttttctgatactatatcatctttgtacccgtatatttcaatttcttgaatgttcattacaattttatttttactttttattctttcttgagacagagtctcactctatcacccaggctggagtgcatggtatggtctcagctcactgcaacctctaccttctgggttcaagcaatcctcccacctcagccttcagagtagctgggaacacaggcgtgcaccaccacgcccggcttatttttgaatttttttgtagagacggggtttctccgtgttgcccagtctggtcttaaagtcctgagctcaagcaatctgcctgcctcggcctcctgaagtgctgggattagaggcaagccactgcgcccagcctttattacaattttaaatgtttttctctgtgttagcgaacctttgatggactgttttaaagagtgttaaagagtgtttaaatcactgtgaaatgcacattctgtcttaatatttataattattagggtaccttcattaatagtgtacattgcatagtgccaaacgagatcaccacatcacttctaaaggattcctggaagtctgagtcacaagcatgagacaacagctgcaggactgggtggtgaaggttgtgaaaacttcctggcttaaacaggaatttgacccaaaacaagaagtcttagggaagatagcttagggcttgtctggtggcaccacaatgccatcaaatgcccagcctctttacagttttctgctctgccatccttggaatgcaggccattgttctcctgtttgttgtttcatgactgaactatgagtgctgtagctcttcacgttcctcctggaagacaggtgtagggcaaagatgagctctgattcgcagagcccttccatctatatgctttcttagaagcctcagcaataagttcaacattcaactcattggcttgaagtgtgtcaaatggctgccccttgcttcaaaggagtctgagaaaataactttagctagaattaaagttccattagagtgcctgggtagacaaagaagagtcagctacagaaggccagtatcatagcaagttgttgctccatgactggaaacaaagaagacttcactctttacttcagatgcgcagttgatagagtacagctaagatatggtacgtgttctaccatgaagagcaagagcaagctcctggcaccgtgctttgcagacagacgacgctcaacacattttgagcagaagcgtggttcagcaccaggaaggacaccaacttttgcagagacgactcttgggatggagaaagacttcccaaatcttcagggtgcggtcaagacaggcttcctttctcctcacgacggcctccacagtccggagcccggcggagcccggacctggcggggagagctgcctccacggccgggcacccagaccccaccgtcgcagtcgccaccacctcagtccatccttggtaccggcaatgggcttcgtatcctccagtgcacttgtaactgacttggacacggaatactaagaactcacttctgtcctcatcccagtcgcgccggcggtgaccatctcggctcttttgggcttaactgccgctcctctggactctgtctgactttgggggcaccatggaccaaagtgggatggagattcctgtgaccctcatcattaaagcaccgaatcagaaatacagtgaccagactattagctgcttcttgaactggaccgtggggaaactaaaaacgcatctatctaacgtttaccctagcaaaccattgacgaaggatcagagattggtgtattcgggcagactgcttcccgatcatctgcagctgaaagacattctcagaaaacaagatgagtatcatatggttcatctagtatgtacttctcggactcctcccagttctccaaaatccagcaccaatagagaaagtcatgaagcattggcatccagcagcaattctagttcagatcattcaggatcaacaactccatcatctggtcaagaaaccttgtctttagctgtgggttcttcctcagaaggattgaggcagcgtacccttccacaagcacaaactgaccaagcacagagtcaccagtttccatatgtaatgcaaggaaatgtagacaaccaatttcctgggcaagctgctccacctggattcccagtgtatcccgcgtttagcccactgcagatgctatggtggcaacagatgtatgctcatcagtattatatgcagtatcaagctgcagtttcagctcaggccacatcaaatgtcaacccaacccagcctactacttcacagcctctaaatttggcacatgttcctggagaagaacccccaccagctccaaacctagtggcccaagaaaatcgacccatgaatgagaatgttcaaatgaatgcacagggaggtccagtactaaatgaagaagacttcaatcgagactggctagactggatgtacacgttctcacgagctgcgattctccttagcattgtatacttctattcttcttttagtcggtttatcatggtaatgggagccatgctactggtttatttacaccaagctggatggtttccttttaggcaagaaggaggtcatcagcaggctcccaacaataatgccgaagttaacaatgatgggcaaaatgcaaacaacttggaacttgaagaaatggagcgtcttatggatgatgggcttgaagatgagagtggagaagatggaggtgaagatgccagtgcaattcaaaggcctggattaatggcttcagcttggtctttcatcaccaccttctttacttcactaataccagaggggcctccccaggttgccaattgacctgaaaaactgtgccagctacaaggagggtctgacttcaggaaagtggtttaaataacagtgcaatttcaaaaaaatttataactttcttttgatcatcatgtacagaggtgttttttttctttaggcttctcatgcatatgaatattttaagcacgaatggactactaaatatctgagttttttttttttttttttaaagatcctaacagaacatagcgtaacaatattggtcttccaggtgttactcatttcaattatgtgtagtataccaggacagacctattttcatgtcttatttctttaaagagctgcttcattggccgggcgccatggctcacgtctgtaatcccagcactttgggaggccgaggcgggtgggttacttgaggtcaggagttcgagaccagcctggcaaacatggcgaaaccccatcttaactaaaaatacaaaaaaattagccgggtgtggtgtcacgcgcctgtaatcccagctacttggggggctcaggcaggagaattgcctgaacccaggaggcggaggttgcagtgagctgagattgggccactgcactccaccctgggcgacagagtgagactcggtctcagaaaaaaaaaaaaaagagctgcttcacatataaatgtctatagctagtagcctggccctttaatgtttaatttgaatagatatatctgttttccgtgaattatcttgaaagttttaaacagaatgacctcatagtttttaataaagaatattatttacctaaaatgtgctagtagcatcttgcccagccataaagcaataaacttctcaataatcttaattttgatatttgaataaataatggaaactttctgtattaagggcatgtatcccatcaattggaatcagtaccttaacagaaaaaggcagctcttcaatggaattaacgtgatataaaatgtttgatataggcagtacttttataaaaaaagataagctggaaattgctccgtgtaattttttaaataaaaagtcaattatggtaaaaaaaaaa

SEQ ID NO: 342937 - DNA, 3491 bp, Homo sapiens
ccccgtgtttaaaggtggacgtggtcaatttcccagctaggcttagggattcttagccagcctaggaaatccaactagtcctgtctctcagtaccccctctcaacaggaaaacccaagtgctattggggaggtttgaccaccgctctaactgcttcctgctgaattggggcacagtaggggttgtgcagttgagatttcctccgtaggggtgccttgtctctcaactaattcagtggtggctacctcgaagcccttctgaagctaagagggaaagagaccagctcgcaaagtcccctatgttatctactcctaagtggaagctgggagctgtgaaaatgcacatctaacaacccttaacttactataccgacttctaaaccacagcagaaaatgaagaaaagttcggctatgggcaatagactcaactttttgttctatgtctaacctataaaatagaaaaataatactgtcatccctcatctcccaccatactgaacacgcattaggtgctcaatgaatacttgtccattttagtgaagattaagaggaatgagacggaaactgacacttgagaggctggcacacgccagaactgcaccacactttgcactcatagctcatttactcatcagcttgtggtcaggtaggcattaccgtccccattagagaagtcaacggaggctcagcaaggacggccagggtcccccagaaagtagaggaggacttcaggtttaaccaaaagcctgtactctttacacatgtaccccatggcttctccaccaaagctcctggcaccgtgctttgcagacagacgacgctcaacacattttgagcagaagcgtggttcagcaccaggaaggacaccaacttttgcagagacgactcttgggatggagaaagacttcccaaatcttcagggtgcggtcaagacaggcttcctttctcctcacgacggcctccacagtccggagcccggcggagcccggacctggcggggagagctgcctccacggccgggcacccagaccccaccgtcgcagtcgccaccacctcagtccatccttggtaccggcaatgggcttcgtatcctccagtgcacttgtaactgacttggacacggaatactaagaactcacttctgtcctcatcccagtcgcgccggcggtgaccatctcggctcttttgggcttaactgccgctcctctggactctgtctgactttgggggcaccatggaccaaagtgggatggagattcctgtgaccctcatcattaaagcaccgaatcagaaatacagtgaccagactattagctgcttcttgaactggaccgtggggaaactaaaaacgcatctatctaacgtttaccctagcaaaccattgacgaaggatcagagattggtgtattcgggcagactgcttcccgatcatctgcagctgaaagacattctcagaaaacaagatgagtatcatatggttcatctagtatgtacttctcggactcctcccagttctccaaaatccagcaccaatagagaaagtcatgaagcattggcatccagcagcaattctagttcagatcattcaggatcaacaactccatcatctggtcaagaaaccttgtctttagctgtgggttcttcctcagaaggattgaggcagcgtacccttccacaagcacaaactgaccaagcacagagtcaccagtttccatatgtaatgcaaggaaatgtagacaaccaatttcctgggcaagctgctccacctggattcccagtgtatcccgcgtttagcccactgcagatgctatggtggcaacagatgtatgctcatcagtattatatgcagtatcaagctgcagtttcagctcaggccacatcaaatgtcaacccaacccagcctactacttcacagcctctaaatttggcacatgttcctggagaagaacccccaccagctccaaacctagtggcccaagaaaatcgacccatgaatgagaatgttcaaatgaatgcacagggaggtccagtactaaatgaagaagacttcaatcgagactggctagactggatgtacacgttctcacgagctgcgattctccttagcattgtatacttctattcttcttttagtcggtttatcatggtaatgggagccatgctactggtttatttacaccaagctggatggtttccttttaggcaagaaggaggtcatcagcaggctcccaacaataatgccgaagttaacaatgatgggcaaaatgcaaacaacttggaacttgaagaaatggagcgtcttatggatgatgggcttgaagatgagagtggagaagatggaggtgaagatgccagtgcaattcaaaggcctggattaatggcttcagcttggtctttcatcaccaccttctttacttcactaataccagaggggcctccccaggttgccaattgacctgaaaaactgtgccagctacaaggagggtctgacttcaggaaagtggtttaaataacagtgcaatttcaaaaaaatttataactttcttttgatcatcatgtacagaggtgttttttttctttaggcttctcatgcatatgaatattttaagcacgaatggactactaaatatctgagttttttttttttttttttaaagatcctaacagaacatagcgtaacaatattggtcttccaggtgttactcatttcaattatgtgtagtataccaggacagacctattttcatgtcttatttctttaaagagctgcttcattggccgggcgccatggctcacgtctgtaatcccagcactttgggaggccgaggcgggtgggttacttgaggtcaggagttcgagaccagcctggcaaacatggcgaaaccccatcttaactaaaaatacaaaaaaattagccgggtgtggtgtcacgcgcctgtaatcccagctacttggggggctcaggcaggagaattgcctgaacccaggaggcggaggttgcagtgagctgagattgggccactgcactccaccctgggcgacagagtgagactcggtctcagaaaaaaaaaaaaaagagctgcttcacatataaatgtctatagctagtagcctggccctttaatgtttaatttgaatagatatatctgttttccgtgaattatcttgaaagttttaaacagaatgacctcatagtttttaataaagaatattatttacctaaaatgtgctagtagcatcttgcccagccataaagcaataaacttctcaataatcttaattttgatatttgaataaataatggaaactttctgtattaagggcatgtatcccatcaattggaatcagtaccttaacagaaaaaggcagctcttcaatggaattaacgtgatataaaatgtttgatataggcagtacttttataaaaaaagataagctggaaattgctccgtgtaattttttaaataaaaagtcaattatggtaaaaaaaaaa

SEQ ID NO: 342938 - DNA, 4421 bp, Homo sapiens
  misc_feature (2737)..(2738): n is a, c, g, or t
  misc_feature (2799)..(2799): n is a, c, g, or t
agtagagatggggtttcaccatgttggccaggctggtcttgaattcctgacctcaggtgatccacctgcctcagcctcccaaagtgttgggattacaggtgtgagccatcgcacccagctggggctatctttagtagcagatggtaactgagctgggcaattgttctttgacatttccagttcttatctgttaacatggacagtgatttaaataggcagctgcatggacggcctctccctaactgctgctatcttgtatctcctcattggtaattatttttcctagcccaaattccacgtcaaacactatcaatattctggggaccaccctttcatacactgctctgtacacatacctgtttatacatattttaacaaaagtggaatatttacatactgttgttatcatagccaagctcaacagcatcaaaagcatttttaggtacttaattcaagtggctgtaaaatttaaaaaaaatcattttttctgatactatatcatctttgtacccgtatatttcaatttcttgaatgttcattacaattttatttttactttttattctttcttgagacagagtctcactctatcacccaggctggagtgcatggtatggtctcagctcactgcaacctctaccttctgggttcaagcaatcctcccacctcagccttcagagtagctgggaacacaggcgtgcaccaccacgcccggcttatttttgaatttttttgtagagacggggtttctccgtgttgcccagtctggtcttaaagtcctgagctcaagcaatctgcctgcctcggcctcctgaagtgctgggattagaggcaagccactgcgcccagcctttattacaattttaaatgtttttctctgtgttagcgaacctttgatggactgttttaaagagtgttaaagagtgtttaaatcactgtgaaatgcacattctgtcttaatatttataattattagggtaccttcattaatagtgtacattgcatagtgccaaacgagatcaccacatcacttctaaaggattcctggaagtctgagtcacaagcatgagacaacagctgcaggactgggtggtgaaggttgtgaaaacttcctggcttaaacaggaatttgacccaaaacaagaagtcttagggaagatagcttagggcttgtctggtggcaccacaatgccatcaaatgcccagcctctttacagttttctgctctgccatccttggaatgcaggccattgttctcctgtttgttgtttcatgactgaactatgagtgctgtagctcttcacgttcctcctggaagacaggtgtagggcaaagatgagctctgattcgcagagcccttccatctatatgctttcttagaagcctcagcaataagttcaacattcaactcattggcttgaagtgtgtcaaatggctgccccttgcttcaaaggagtctgagaaaataactttagctagaattaaagttccattagagtgcctgggtagacaaagaagagtcagctacagaaggccagtatcatagcaagttgttgctccatgactggaaacaaagaagacttcactctttacttcagatgcgcagttgatagagtacagctaagatatggtacgtgttctaccatgaagagcaagagcaagctcctggcaccgtgctttgcagacagacgacgctcaacacattttgagcagaagcgtggttcagcaccaggaaggacaccaacttttgcagagacgactcttgggatggagaaagacttcccaaatcttcagggtgcggtcaagacaggcttcctttctcctcacgacggcctccacagtccggagcccggcggagcccggacctggcggggagagctgcctccacggccgggcacccagaccccaccgtcgcagtcgccaccacctcagtccatccttggtaccggcaatgggcttcgtatcctccagtgcacttgtaactgacttggacacggaatactaagaactcacttctgtcctcatcccagtcgcgccggcggtgaccatctcggctcttttgggcttaactgccgctcctctggactctgtctgactttgggggcaccatggaccaaagtgggatggagattcctgtgaccctcatcattaaagcaccgaatcagaaatacagtgaccagactattagctgcttcttgaactggaccgtggggaaactaaaaacgcatctatctaacgtttaccctagcaaaccattgacgaaggatcagagattggtgtattcgggcagactgcttcccgatcatctgcagctgaaagacattctcagaaaacaagatgagtatcatatggttcatctagtatgtacttctcggactcctcccagttctccaaaatccagcaccaatagagaaagtcatgaagcattggcatccagcagcaattctagttcagatcattcaggatcaacaactccatcatctggtcaagaaaccttgtctttagctgtgggttcttcctcagaaggattgaggcagcgtacccttccacaagcacaaactgaccaagcacagagtcaccagtttccatatgtaatgcaaggaaatgtagacaaccaatttcctgggcaagctgctccacctggattcccagtgtatcccgcgtttagcccactgcagatgctatggtggcaacagatgtatgctcatcagtattatatgcagtacatcaagccccnntttttggggcccccccaaagggttttccaggcccttcccaaaaggggggcccgggggcccncccaacaatcaaatgtcaacccaacccagcctactacttcacagcctctaaatttggcacatgttcctggagaagaacccccaccagctccaaacctagtggcccaagaaaatcgacccatgaatgagaatgttcaaatgaatgcacagggaggtccagtactaaatgaagaagacttcaatcgagactggctagactggatgtacacgttctcacgagctgcgattctccttagcattgtatacttctattcttcttttagtcggtttatcatggtaatgggagccatgctactggtttatttacaccaagctggatggtttccttttaggcaagaaggaggtcatcagcaggctcccaacaataatgccgaagttaacaatgatgggcaaaatgcaaacaacttggaacttgaagaaatggagcgtcttatggatgatgggcttgaagatgagagtggagaagatggaggtgaagatgccagtgcaattcaaaggcctggattaatggcttcagcttggtctttcatcaccaccttctttacttcactaataccagaggggcctccccaggttgccaattgacctgaaaaactgtgccagctacaaggagggtctgacttcaggaaagtggtttaaataacagtgcaatttcaaaaaaatttataactttcttttgatcatcatgtacagaggtgttttttttctttaggcttctcatgcatatgaatattttaagcacgaatggactactaaatatctgagttttttttttttttttttaaagatcctaacagaacatagcgtaacaatattggtcttccaggtgttactcatttcaattatgtgtagtataccaggacagacctattttcatgtcttatttctttaaagagctgcttcattggccgggcgccatggctcacgtctgtaatcccagcactttgggaggccgaggcgggtgggttacttgaggtcaggagttcgagaccagcctggcaaacatggcgaaaccccatcttaactaaaaatacaaaaaaattagccgggtgtggtgtcacgcgcctgtaatcccagctacttggggggctcaggcaggagaattgcctgaacccaggaggcggaggttgcagtgagctgagattgggccactgcactccaccctgggcgacagagtgagactcggtctcagaaaaaaaaaaaaaagagctgcttcacatataaatgtctatagctagtagcctggccctttaatgtttaatttgaatagatatatctgttttccgtgaattatcttgaaagttttaaacagaatgacctcatagtttttaataaagaatattatttacctaaaatgtgctagtagcatcttgcccagccataaagcaataaacttctcaataatcttaattttgatatttgaataaataatggaaactttctgtattaagggcatgtatcccatcaattggaatcagtaccttaacagaaaaaggcagctcttcaatggaattaacgtgatataaaatgtttgatataggcagtacttttataaaaaaagataagctggaaattgctccgtgtaattttttaaataaaaagtcaattatggtaaaaaaaaaa

SEQ ID NO: 342939 - DNA, 4043 bp, Homo sapiens
agtagagatggggtttcaccatgttggccaggctggtcttgaattcctgacctcaggtgatccacctgcctcagcctcccaaagtgttgggattacaggtgtgagccatcgcacccagctggggctatctttagtagcagatggtaactgagctgggcaattgttctttgacatttccagttcttatctgttaacatggacagtgatttaaataggcagctgcatggacggcctctccctaactgctgctatcttgtatctcctcattggtaattatttttcctagcccaaattccacgtcaaacactatcaatattctggggaccaccctttcatacactgctctgtacacatacctgtttatacatattttaacaaaagtggaatatttacatactgttgttatcatagccaagctcaacagcatcaaaagcatttttaggtacttaattcaagtggctgtaaaatttaaaaaaaatcattttttctgatactatatcatctttgtacccgtatatttcaatttcttgaatgttcattacaattttatttttactttttattctttcttgagacagagtctcactctatcacccaggctggagtgcatggtatggtctcagctcactgcaacctctaccttctgggttcaagcaatcctcccacctcagccttcagagtagctgggaacacaggcgtgcaccaccacgcccggcttatttttgaatttttttgtagagacggggtttctccgtgttgcccagtctggtcttaaagtcctgagctcaagcaatctgcctgcctcggcctcctgaagtgctgggattagaggcaagccactgcgcccagcctttattacaattttaaatgtttttctctgtgttagcgaacctttgatggactgttttaaagagtgttaaagagtgtttaaatcactgtgaaatgcacattctgtcttaatatttataattattagggtaccttcattaatagtgtacattgcatagtgccaaacgagatcaccacatcacttctaaaggattcctggaagtctgagtcacaagcatgagacaacagctgcaggactgggtggtgaaggttgtgaaaacttcctggcttaaacaggaatttgacccaaaacaagaagtcttagggaagatagcttagggcttgtctggtggcaccacaatgccatcaaatgcccagcctctttacagttttctgctctgccatccttggaatgcaggccattgttctcctgtttgttgtttcatgactgaactatgagtgctgtagctcttcacgttcctcctggaagacaggtgtagggcaaagatgagctctgattcgcagagcccttccatctatatgctttcttagaagcctcagcaataagttcaacattcaactcattggcttgaagtgtgtcaaatggctgccccttgcttcaaaggagtctgagaaaataactttagctagaattaaagttccattagagtgcctgggtagacaaagaagagtcagctacagaaggccagtatcatagcaagttgttgctccatgactggaaacaaagaagacttcactctttacttcagatgcgcagttgatagagtacagctaagatatggtacgtgttctaccatgaagagcaagagcaagctcctggcaccgtgctttgcagacagacgacgctcaacacattttgagcagaagcgtggttcagcaccaggaaggacaccaacttttgcagagacgactcttgggatggagaaagacttcccaaatcttcagggtgcggtcaagacaggcttcctttctcctcacgacggcctccacagtccggagcccggcggagcccggacctggcggggagagctgcctccacggccgggcacccagaccccaccgtcgcagtcgccaccacctcagtccatccttggtaccggcaatgggcttcgtatcctccagtgcacttgtaactgacttggacacggaatactaagaactcacttctgtcctcatcccagtcgcgccggcggtgaccatctcggctcttttgggcttaactgccgctcctctggactctgtctgactttgggggcaccatggaccaaagtgggatggagattcctgtgaccctcatcattaaagcaccgaatcagaaatacagtgaccagactattagctgcttcttgaactggaccgtggggaaactaaaaacgcatctatctaacgtttaccctagcaaaccattgacgaaggatcagagattggtgtattcgggcagactgcttcccgatcatctgcagctgaaagacattctcagaaaacaagatgagtatcatatggttcatctagtatgtacttctcggactcctcccagttctccaaaatccagcaccaatagagaaagtcatgaagcattggcatccagcagcaattctagttcagatcattcaggatcaacaactccatcatctggtcaagaaaccttgtctttagctgtgggttcttcctcagaaggattgaggcagcgtacccttccacaagcacaaactgaccaagcacagagtcaccagtttccatatgtaatgcaaggaaatgtagacaaccaatttcctgggcaagctgctccacctggattcccagtgtatcccgcgtttagcccactgcagatgctatggtggcaacagatgtatgctcatcagtattatatgcagtaacaccaagctggatggtttccttttaggcaagaaggaggtcatcagcaggctcccaacaataatgccgaagttaacaatgatgggcaaaatgcaaacaacttggaacttgaagaaatggagcgtcttatggatgatgggcttgaagatgagagtggagaagatggaggtgaagatgccagtgcaattcaaaggcctggattaatggcttcagcttggtctttcatcaccaccttctttacttcactaataccagaggggcctccccaggttgccaattgacctgaaaaactgtgccagctacaaggagggtctgacttcaggaaagtggtttaaataacagtgcaatttcaaaaaaatttataactttcttttgatcatcatgtacagaggtgttttttttctttaggcttctcatgcatatgaatattttaagcacgaatggactactaaatatctgagttttttttttttttttttaaagatcctaacagaacatagcgtaacaatattggtcttccaggtgttactcatttcaattatgtgtagtataccaggacagacctattttcatgtcttatttctttaaagagctgcttcattggccgggcgccatggctcacgtctgtaatcccagcactttgggaggccgaggcgggtgggttacttgaggtcaggagttcgagaccagcctggcaaacatggcgaaaccccatcttaactaaaaatacaaaaaaattagccgggtgtggtgtcacgcgcctgtaatcccagctacttggggggctcaggcaggagaattgcctgaacccaggaggcggaggttgcagtgagctgagattgggccactgcactccaccctgggcgacagagtgagactcggtctcagaaaaaaaaaaaaaagagctgcttcacatataaatgtctatagctagtagcctggccctttaatgtttaatttgaatagatatatctgttttccgtgaattatcttgaaagttttaaacagaatgacctcatagtttttaataaagaatattatttacctaaaatgtgctagtagcatcttgcccagccataaagcaataaacttctcaataatcttaattttgatatttgaataaataatggaaactttctgtattaagggcatgtatcccatcaattggaatcagtaccttaacagaaaaaggcagctcttcaatggaattaacgtgatataaaatgtttgatataggcagtacttttataaaaaaagataagctggaaattgctccgtgtaattttttaaataaaaagtcaattatggtaaaaaaaaaa

SEQ ID NO: 342940 - DNA, 1965 bp, Homo sapiens
ggtttggacatctcattagctgttaaggtaatttattgaaagagagaggagtggttaacatggctgctctcacgtcttttgccttcccctgtcatcttacaatagcaggctgagagaacatcctttcctgtgcgacatctaccatcaaccttggctccacttttccattggaatttgtgcttacctaagaaatgtggtgcaggagttgggatattccatattaggtttatgaaaaatacatatagctccccaagaagtttaaaaaaatatggtatggtaaagtttttttttctttttaatatttattttggtgactatttcagtcaagctgcagtttcagctcaggccacatcaaatgtcaacccaacccagcctactacttcacagcctctaaatttggcacatgttcctggagaagaacccccaccagctccaaacctagtggcccaagaaaatcgacccatgaatgagaatgttcaaatgaatgcacagggaggtccagtactaaatgaagaagacttcaatcgagactggctagactggatgtacacgttctcacgagctgcgattctccttagcattgtatacttctattcttcttttagtcggtttatcatggtaatgggagccatgctactggtttatttacaccaagctggatggtttccttttaggcaagaaggaggtcatcagcaggctcccaacaataatgccgaagttaacaatgatgggcaaaatgcaaacaacttggaacttgaagaaatggagcgtcttatggatgatgggcttgaagatgagagtggagaagatggaggtgaagatgccagtgcaattcaaaggcctggattaatggcttcagcttggtctttcatcaccaccttctttacttcactaataccagaggggcctccccaggttgccaattgacctgaaaaactgtgccagctacaaggagggtctgacttcaggaaagtggtttaaataacagtgcaatttcaaaaaaatttataactttcttttgatcatcatgtacagaggtgttttttttctttaggcttctcatgcatatgaatattttaagcacgaatggactactaaatatctgagttttttttttttttttttaaagatcctaacagaacatagcgtaacaatattggtcttccaggtgttactcatttcaattatgtgtagtataccaggacagacctattttcatgtcttatttctttaaagagctgcttcattggccgggcgccatggctcacgtctgtaatcccagcactttgggaggccgaggcgggtgggttacttgaggtcaggagttcgagaccagcctggcaaacatggcgaaaccccatcttaactaaaaatacaaaaaaattagccgggtgtggtgtcacgcgcctgtaatcccagctacttggggggctcaggcaggagaattgcctgaacccaggaggcggaggttgcagtgagctgagattgggccactgcactccaccctgggcgacagagtgagactcggtctcagaaaaaaaaaaaaaagagctgcttcacatataaatgtctatagctagtagcctggccctttaatgtttaatttgaatagatatatctgttttccgtgaattatcttgaaagttttaaacagaatgacctcatagtttttaataaagaatattatttacctaaaatgtgctagtagcatcttgcccagccataaagcaataaacttctcaataatcttaattttgatatttgaataaataatggaaactttctgtattaagggcatgtatcccatcaattggaatcagtaccttaacagaaaaaggcagctcttcaatggaattaacgtgatataaaatgtttgatataggcagtacttttataaaaaaagataagctggaaattgctccgtgtaattttttaaataaaaagtcaattatggtaaaaaaaaaa

SEQ ID NO: 342941 - DNA, 1504 bp, Homo sapiens
ggttggttttcttttgctgtcgttgctttgaaaagggtagttccctgtcctgaagtgggagatttggtctttttatttattatagttttaatcatttttctcttataggacactaataacattttatagtgttacaaataaaaacaactgtgacttattttattttctctttattttactgaacagacaccaagctggatggtttccttttaggcaagaaggaggtcatcagcaggctcccaacaataatgccgaagttaacaatgatgggcaaaatgcaaacaacttggaacttgaagaaatggagcgtcttatggatgatgggcttgaagatgagagtggagaagatggaggtgaagatgccagtgcaattcaaaggcctggattaatggcttcagcttggtctttcatcaccaccttctttacttcactaataccagaggggcctccccaggttgccaattgacctgaaaaactgtgccagctacaaggagggtctgacttcaggaaagtggtttaaataacagtgcaatttcaaaaaaatttataactttcttttgatcatcatgtacagaggtgttttttttctttaggcttctcatgcatatgaatattttaagcacgaatggactactaaatatctgagttttttttttttttttttaaagatcctaacagaacatagcgtaacaatattggtcttccaggtgttactcatttcaattatgtgtagtataccaggacagacctattttcatgtcttatttctttaaagagctgcttcattggccgggcgccatggctcacgtctgtaatcccagcactttgggaggccgaggcgggtgggttacttgaggtcaggagttcgagaccagcctggcaaacatggcgaaaccccatcttaactaaaaatacaaaaaaattagccgggtgtggtgtcacgcgcctgtaatcccagctacttggggggctcaggcaggagaattgcctgaacccaggaggcggaggttgcagtgagctgagattgggccactgcactccaccctgggcgacagagtgagactcggtctcagaaaaaaaaaaaaaagagctgcttcacatataaatgtctatagctagtagcctggccctttaatgtttaatttgaatagatatatctgttttccgtgaattatcttgaaagttttaaacagaatgacctcatagtttttaataaagaatattatttacctaaaatgtgctagtagcatcttgcccagccataaagcaataaacttctcaataatcttaattttgatatttgaataaataatggaaactttctgtattaagggcatgtatcccatcaattggaatcagtaccttaacagaaaaaggcagctcttcaatggaattaacgtgatataaaatgtttgatataggcagtacttttataaaaaaagataagctggaaattgctccgtgtaattttttaaataaaaagtcaattatggtaaaaaaaaaa

SEQ ID NO: 342942 - DNA, 3206 bp, Homo sapiens
agtagagatggggtttcaccatgttggccaggctggtcttgaattcctgacctcaggtgatccacctgcctcagcctcccaaagtgttgggattacaggtgtgagccatcgcacccagctggggctatctttagtagcagatggtaactgagctgggcaattgttctttgacatttccagttcttatctgttaacatggacagtgatttaaataggcagctgcatggacggcctctccctaactgctgctatcttgtatctcctcattggtaattatttttcctagcccaaattccacgtcaaacactatcaatattctggggaccaccctttcatacactgctctgtacacatacctgtttatacatattttaacaaaagtggaatatttacatactgttgttatcatagccaagctcaacagcatcaaaagcatttttaggtacttaattcaagtggctgtaaaatttaaaaaaaatcattttttctgatactatatcatctttgtacccgtatatttcaatttcttgaatgttcattacaattttatttttactttttattctttcttgagacagagtctcactctatcacccaggctggagtgcatggtatggtctcagctcactgcaacctctaccttctgggttcaagcaatcctcccacctcagccttcagagtagctgggaacacaggcgtgcaccaccacgcccggcttatttttgaatttttttgtagagacggggtttctccgtgttgcccagtctggtcttaaagtcctgagctcaagcaatctgcctgcctcggcctcctgaagtgctgggattagaggcaagccactgcgcccagcctttattacaattttaaatgtttttctctgtgttagcgaacctttgatggactgttttaaagagtgttaaagagtgtttaaatcactgtgaaatgcacattctgtcttaatatttataattattagggtaccttcattaatagtgtacattgcatagtgccaaacgagatcaccacatcacttctaaaggattcctggaagtctgagtcacaagcatgagacaacagctgcaggactgggtggtgaaggttgtgaaaacttcctggcttaaacaggaatttgacccaaaacaagaagtcttagggaagatagcttagggcttgtctggtggcaccacaatgccatcaaatgcccagcctctttacagttttctgctctgccatccttggaatgcaggccattgttctcctgtttgttgtttcatgactgaactatgagtgctgtagctcttcacgttcctcctggaagacaggtgtagggcaaagatgagctctgattcgcagagcccttccatctatatgctttcttagaagcctcagcaataagttcaacattcaactcattggcttgaagtgtgtcaaatggctgccccttgcttcaaaggagtctgagaaaataactttagctagaattaaagttccattagagtgcctgggtagacaaagaagagtcagctacagaaggccagtatcatagcaagttgttgctccatgactggaaacaaagaagacttcactctttacttcagatgcgcagttgatagagtacagctaagatatggtacgtgttctaccatgaagagcaagagcaagctcctggcaccgtgctttgcagacagacgacgctcaacacattttgagcagaagcgtggttcagcaccaggaaggacaccaacttttgcagagacgactcttgggatggagaaagacttcccaaatcttcagggtgcggtcaagacaggcttcctttctcctcacgacggcctccacagtccggagcccggcggagcccggacctggcggggagagctgcctccacggccgggcacccagaccccaccgtcgcagtcgccaccacctcagtccatccttggtaccggcaatgggcttcgtatcctccagtgcacttgtaactgacttggacacggaatactaagaactcacttctgtcctcatcccagtcgcgccggcggtgaccatctcggctcttttgggcttaactgccgctcctctggactctgtctgactttgggggcaccatggaccaaagtgggatggagattcctgtgaccctcatcattaaagcaccgaatcagaaatacagtgaccagactattagctgcttcttgaactggaccgtggggaaactaaaaacgcatctatctaacgtttaccctagcaaaccattgacgaaggatcagagattggtgtattcgggcagactgcttcccgatcatctgcagctgaaagacattctcagaaaacaagatgagtatcatatggttcatctagtatgtacttctcggactcctcccagttctccaaaatccagcaccaatagagaaagtcatgaagcattggcatccagcagcaattctagttcagatcattcaggatcaacaactccatcatctggtcaagaaaccttgtctttagctgtgggttcttcctcagaaggattgaggcagcgtacccttccacaagcacaaactgaccaagcacagagtcaccagtttccatatgtaatgcaaggaaatgtagacaaccaatttcctgggcaagctgctccacctggattcccagtgtatcccgcgtttagcccactgcagatgctatggtggcaacagatgtatgctcatcagtattatatgcagtatcaagctgcagtttcagctcaggccacatcaaatgtcaacccaacccagcctactacttcacagcctctaaatttggcacatgttcctggagaagaacccccaccagctccaaacctagtggcccaagaaaatcgacccatgaatgagaatgttcaaatgaatgcacagggaggtccagtactaaatgaagaagacttcaatcgagactggctagactggatgtacacgttctcacgagctgcgattctccttagcattgtatacttctattcttcttttagtcggtttatcatggtaatgggagccatgctactggtttatttacagacggcggtcagcagtggggctcccaacggtaaggaccgaggtcatcagcgaggcgcccaaatgtaatgccgtaggaaccagagaaaggggagcggcttatggatggtgagcgtaacagctggggggtcctctagattataactgtaggcgtgg

SEQ ID NO: 342943 - DNA, 2790 bp, Homo sapiens
tctcgtccccgccctcctgctacctgtagtcgcctgggccgcccccggcccagccctgccttgccgccaccctgcgctgtccagactgaggggtcaggcggagagccgggccgcgcccttcggtcagcttctctccctttcacccgcgcctcctcgcgagacccggggctgggccgtgcccgtcgccgcgcagcaggaagggagcggctgccacggaaaacgcctggccggacgcttcctttctcctcacgacggcctccacagtccggagcccggcggagcccggacctggcggggagagctgcctccacggccgggcacccagaccccaccgtcgcagtcgccaccacctcagtccatccttggtaccggcaatgggcttcgtatcctccagtgcacttgtaactgacttggacacggaatactaagaactcacttctgtcctcatcccagtcgcgccggcggtgaccatctcggctcttttgggcttaactgccgctcctctggactctgtctgactttgggggcaccatggaccaaagtgggatggagattcctgtgaccctcatcattaaagcaccgaatcagaaatacagtgaccagactattagctgcttcttgaactggaccgtggggaaactaaaaacgcatctatctaacgtttaccctagcaaaccattgacgaaggatcagagattggtgtattcgggcagactgcttcccgatcatctgcagctgaaagacattctcagaaaacaagatgagtatcatatggttcatctagtatgtacttctcggactcctcccagttctccaaaatccagcaccaatagagaaagtcatgaagcattggcatccagcagcaattctagttcagatcattcaggatcaacaactccatcatctggtcaagaaaccttgtctttagctgtgggttcttcctcagaaggattgaggcagcgtacccttccacaagcacaaactgaccaagcacagagtcaccagtttccatatgtaatgcaaggaaatgtagacaaccaatttcctgggcaagctgctccacctggattcccagtgtatcccgcgtttagcccactgcagatgctatggtggcaacagatgtatgctcatcagtattatatgcagtatcaagctgcagtttcagctcaggccacatcaaatgtcaacccaacccagcctactacttcacagcctctaaatttggcacatgttcctggagaagaacccccaccagctccaaacctagtggcccaagaaaatcgacccatgaatgagaatgttcaaatgaatgcacagggaggtccagtactaaatgaagaagacttcaatcgagactggctagactggatgtacacgttctcacgagctgcgattctccttagcattgtatacttctattcttcttttagtcggtttatcatggtaatgggagccatgctactggtttatttacaccaagctggatggtttccttttaggcaagaaggaggtcatcagcaggctcccaacaataatgccgaagttaacaatgatgggcaaaatgcaaacaacttggaacttgaagaaatggagcgtcttatggatgatgggcttgaagatgagagtggagaagatggaggtgaagatgccagtgcaattcaaaggcctggattaatggcttcagcttggtctttcatcaccaccttctttacttcactaataccagaggggcctccccaggttgccaattgacctgaaaaactgtgccagctacaaggagggtctgacttcaggaaagtggtttaaataacagtgcaatttcaaaaaaatttataactttcttttgatcatcatgtacagaggtgttttttttctttaggcttctcatgcatatgaatattttaagcacgaatggactactaaatatctgagttttttttttttttttttaaagatcctaacagaacatagcgtaacaatattggtcttccaggtgttactcatttcaattatgtgtagtataccaggacagacctattttcatgtcttatttctttaaagagctgcttcattggccgggcgccatggctcacgtctgtaatcccagcactttgggaggccgaggcgggtgggttacttgaggtcaggagttcgagaccagcctggcaaacatggcgaaaccccatcttaactaaaaatacaaaaaaattagccgggtgtggtgtcacgcgcctgtaatcccagctacttggggggctcaggcaggagaattgcctgaacccaggaggcggaggttgcagtgagctgagattgggccactgcactccaccctgggcgacagagtgagactcggtctcagaaaaaaaaaaaaaagagctgcttcacatataaatgtctatagctagtagcctggccctttaatgtttaatttgaatagatatatctgttttccgtgaattatcttgaaagttttaaacagaatgacctcatagtttttaataaagaatattatttacctaaaatgtgctagtagcatcttgcccagccataaagcaataaacttctcaataatcttaattttgatatttgaataaataatggaaactttctgtattaagggcatgtatcccatcaattggaatcagtaccttaacagaaaaaggcagctcttcaatggaattaacgtgatataaaatgtttgatataggcagtacttttataaaaaaagataagctggaaattgctccgtgtaattttttaaataaaaagtcaattatggtaaaaaaaaaa

SEQ ID NO: 342944 - DNA, 2855 bp, Homo sapiens
tctcgtccccgccctcctgctacctgtagtcgcctgggccgcccccggcccagccctgccttgccgccaccctgcgctgtccagactgaggggtcaggcggagagccgggccgcgcccttcggtcagcttctctccctttcacccgcgcctcctcgcgagacccggggctgggccgtgcccgtcgccgcgcagcaggaagggagcggctgccacggaaaacgcctggccggacggtgtggctggcggccctgcctgggcgcggagggcggcggtggcgggccccgcggccttctctcagcttcctttctcctcacgacggcctccacagtccggagcccggcggagcccggacctggcggggagagctgcctccacggccgggcacccagaccccaccgtcgcagtcgccaccacctcagtccatccttggtaccggcaatgggcttcgtatcctccagtgcacttgtaactgacttggacacggaatactaagaactcacttctgtcctcatcccagtcgcgccggcggtgaccatctcggctcttttgggcttaactgccgctcctctggactctgtctgactttgggggcaccatggaccaaagtgggatggagattcctgtgaccctcatcattaaagcaccgaatcagaaatacagtgaccagactattagctgcttcttgaactggaccgtggggaaactaaaaacgcatctatctaacgtttaccctagcaaaccattgacgaaggatcagagattggtgtattcgggcagactgcttcccgatcatctgcagctgaaagacattctcagaaaacaagatgagtatcatatggttcatctagtatgtacttctcggactcctcccagttctccaaaatccagcaccaatagagaaagtcatgaagcattggcatccagcagcaattctagttcagatcattcaggatcaacaactccatcatctggtcaagaaaccttgtctttagctgtgggttcttcctcagaaggattgaggcagcgtacccttccacaagcacaaactgaccaagcacagagtcaccagtttccatatgtaatgcaaggaaatgtagacaaccaatttcctgggcaagctgctccacctggattcccagtgtatcccgcgtttagcccactgcagatgctatggtggcaacagatgtatgctcatcagtattatatgcagtatcaagctgcagtttcagctcaggccacatcaaatgtcaacccaacccagcctactacttcacagcctctaaatttggcacatgttcctggagaagaacccccaccagctccaaacctagtggcccaagaaaatcgacccatgaatgagaatgttcaaatgaatgcacagggaggtccagtactaaatgaagaagacttcaatcgagactggctagactggatgtacacgttctcacgagctgcgattctccttagcattgtatacttctattcttcttttagtcggtttatcatggtaatgggagccatgctactggtttatttacaccaagctggatggtttccttttaggcaagaaggaggtcatcagcaggctcccaacaataatgccgaagttaacaatgatgggcaaaatgcaaacaacttggaacttgaagaaatggagcgtcttatggatgatgggcttgaagatgagagtggagaagatggaggtgaagatgccagtgcaattcaaaggcctggattaatggcttcagcttggtctttcatcaccaccttctttacttcactaataccagaggggcctccccaggttgccaattgacctgaaaaactgtgccagctacaaggagggtctgacttcaggaaagtggtttaaataacagtgcaatttcaaaaaaatttataactttcttttgatcatcatgtacagaggtgttttttttctttaggcttctcatgcatatgaatattttaagcacgaatggactactaaatatctgagttttttttttttttttttaaagatcctaacagaacatagcgtaacaatattggtcttccaggtgttactcatttcaattatgtgtagtataccaggacagacctattttcatgtcttatttctttaaagagctgcttcattggccgggcgccatggctcacgtctgtaatcccagcactttgggaggccgaggcgggtgggttacttgaggtcaggagttcgagaccagcctggcaaacatggcgaaaccccatcttaactaaaaatacaaaaaaattagccgggtgtggtgtcacgcgcctgtaatcccagctacttggggggctcaggcaggagaattgcctgaacccaggaggcggaggttgcagtgagctgagattgggccactgcactccaccctgggcgacagagtgagactcggtctcagaaaaaaaaaaaaaagagctgcttcacatataaatgtctatagctagtagcctggccctttaatgtttaatttgaatagatatatctgttttccgtgaattatcttgaaagttttaaacagaatgacctcatagtttttaataaagaatattatttacctaaaatgtgctagtagcatcttgcccagccataaagcaataaacttctcaataatcttaattttgatatttgaataaataatggaaactttctgtattaagggcatgtatcccatcaattggaatcagtaccttaacagaaaaaggcagctcttcaatggaattaacgtgatataaaatgtttgatataggcagtacttttataaaaaaagataagctggaaattgctccgtgtaattttttaaataaaaagtcaattatggtaaaaaaaaaa

SEQ ID NO: 342945 - DNA, 2633 bp, Homo sapiens
tctcgtccccgccctcctgctacctgtagtcgcctgggccgcccccggcccagccctgccttgccgccaccctgcgctgtccagactgaggggtcaggcggagagccgggccgcgcccttcggtcagcttctctccctttcacccgcgcctcctcgcgagacccggggctgggccgtgcccgtcgccgcgcagcaggaagggagcggctgccacggaaaacgcctggccggacggtgtggctggcggccctgcctgggcgcggagggcggcggtggcgggccccgcggccttctctcagtccggagcccggcggagcccggacctggcggggagagctgcctccacggccgggcacccagaccccaccgtcgcagtcgccaccacctcagtccatccttggtaccggcaatgggcttcgtatcctccagtgcacttgtaactgacttggacacggaatactaagaactcacttctgtcctcatcccagtcgcgccggcggtgaccatctcggctcttttgggcttaactgccgctcctctggactctgtctgactttgggggcaccatggaccaaagtgggatggagattcctgtgaccctcatcattaaagcaccgaatcagaaatacagtgaccagactattagctgcttcttgaactggaccgtggggaaactaaaaacgcatctatctaacgtttaccctagcaaaccaagttcagatcattcaggatcaacaactccatcatctggtcaagaaaccttgtctttagctgtgggttcttcctcagaaggattgaggcagcgtacccttccacaagcacaaactgaccaagcacagagtcaccagtttccatatgtaatgcaaggaaatgtagacaaccaatttcctgggcaagctgctccacctggattcccagtgtatcccgcgtttagcccactgcagatgctatggtggcaacagatgtatgctcatcagtattatatgcagtatcaagctgcagtttcagctcaggccacatcaaatgtcaacccaacccagcctactacttcacagcctctaaatttggcacatgttcctggagaagaacccccaccagctccaaacctagtggcccaagaaaatcgacccatgaatgagaatgttcaaatgaatgcacagggaggtccagtactaaatgaagaagacttcaatcgagactggctagactggatgtacacgttctcacgagctgcgattctccttagcattgtatacttctattcttcttttagtcggtttatcatggtaatgggagccatgctactggtttatttacaccaagctggatggtttccttttaggcaagaaggaggtcatcagcaggctcccaacaataatgccgaagttaacaatgatgggcaaaatgcaaacaacttggaacttgaagaaatggagcgtcttatggatgatgggcttgaagatgagagtggagaagatggaggtgaagatgccagtgcaattcaaaggcctggattaatggcttcagcttggtctttcatcaccaccttctttacttcactaataccagaggggcctccccaggttgccaattgacctgaaaaactgtgccagctacaaggagggtctgacttcaggaaagtggtttaaataacagtgcaatttcaaaaaaatttataactttcttttgatcatcatgtacagaggtgttttttttctttaggcttctcatgcatatgaatattttaagcacgaatggactactaaatatctgagttttttttttttttttttaaagatcctaacagaacatagcgtaacaatattggtcttccaggtgttactcatttcaattatgtgtagtataccaggacagacctattttcatgtcttatttctttaaagagctgcttcattggccgggcgccatggctcacgtctgtaatcccagcactttgggaggccgaggcgggtgggttacttgaggtcaggagttcgagaccagcctggcaaacatggcgaaaccccatcttaactaaaaatacaaaaaaattagccgggtgtggtgtcacgcgcctgtaatcccagctacttggggggctcaggcaggagaattgcctgaacccaggaggcggaggttgcagtgagctgagattgggccactgcactccaccctgggcgacagagtgagactcggtctcagaaaaaaaaaaaaaagagctgcttcacatataaatgtctatagctagtagcctggccctttaatgtttaatttgaatagatatatctgttttccgtgaattatcttgaaagttttaaacagaatgacctcatagtttttaataaagaatattatttacctaaaatgtgctagtagcatcttgcccagccataaagcaataaacttctcaataatcttaattttgatatttgaataaataatggaaactttctgtattaagggcatgtatcccatcaattggaatcagtaccttaacagaaaaaggcagctcttcaatggaattaacgtgatataaaatgtttgatataggcagtacttttataaaaaaagataagctggaaattgctccgtgtaattttttaaataaaaagtcaattatggtaaaaaaaaaa

SEQ ID NO: 342946 - DNA, 3869 bp, Homo sapiens
agtagagatggggtttcaccatgttggccaggctggtcttgaattcctgacctcaggtgatccacctgcctcagcctcccaaagtgttgggattacaggtgtgagccatcgcacccagctggggctatctttagtagcagatggtaactgagctgggcaattgttctttgacatttccagttcttatctgttaacatggacagtgatttaaataggcagctgcatggacggcctctccctaactgctgctatcttgtatctcctcattggtaattatttttcctagcccaaattccacgtcaaacactatcaatattctggggaccaccctttcatacactgctctgtacacatacctgtttatacatattttaacaaaagtggaatatttacatactgttgttatcatagccaagctcaacagcatcaaaagcatttttaggtacttaattcaagtggctgtaaaatttaaaaaaaatcattttttctgatactatatcatctttgtacccgtatatttcaatttcttgaatgttcattacaattttatttttactttttattctttcttgagacagagtctcactctatcacccaggctggagtgcatggtatggtctcagctcactgcaacctctaccttctgggttcaagcaatcctcccacctcagccttcagagtagctgggaacacaggcgtgcaccaccacgcccggcttatttttgaatttttttgtagagacggggtttctccgtgttgcccagtctggtcttaaagtcctgagctcaagcaatctgcctgcctcggcctcctgaagtgctgggattagaggcaagccactgcgcccagcctttattacaattttaaatgtttttctctgtgttagcgaacctttgatggactgttttaaagagtgttaaagagtgtttaaatcactgtgaaatgcacattctgtcttaatatttataattattagggtaccttcattaatagtgtacattgcatagtgccaaacgagatcaccacatcacttctaaaggattcctggaagtctgagtcacaagcatgagacaacagctgcaggactgggtggtgaaggttgtgaaaacttcctggcttaaacaggaatttgacccaaaacaagaagtcttagggaagatagcttagggcttgtctggtggcaccacaatgccatcaaatgcccagcctctttacagttttctgctctgccatccttggaatgcaggccattgttctcctgtttgttgtttcatgactgaactatgagtgctgtagctcttcacgttcctcctggaagacaggtgtagggcaaagatgagctctgattcgcagagcccttccatctatatgctttcttagaagcctcagcaataagttcaacattcaactcattggcttgaagtgtgtcaaatggctgccccttgcttcaaaggagtctgagaaaataactttagctagaattaaagttccattagagtgcctgggtagacaaagaagagtcagctacagaaggccagtatcatagcaagttgttgctccatgactggaaacaaagaagacttcactctttacttcagatgcgcagttgatagagtacagctaagatatggtacgtgttctaccatgaagagcaagagcaagctcctggcaccgtgctttgcagacagacgacgctcaacacattttgagcagaagcgtggttcagcaccaggaaggacaccaacttttgcagagacgactcttgggatggagaaagacttcccaaatcttcagggtgcggtcaagacaggcttcctttctcctcacgacggcctccacagtccggagcccggcggagcccggacctggcggggagagctgcctccacggccgggcacccagaccccaccgtcgcagtcgccaccacctcagtccatccttggtaccggcaatgggcttcgtatcctccagtgcacttgtaactgacttggacacggaatactaagaactcacttctgtcctcatcccagtcgcgccggcggtgaccatctcggctcttttgggcttaactgccgctcctctggactctgtctgactttgggggcaccatggaccaaagtgggatggagattcctgtgaccctcatcattaaagcaccgaatcagaaatacagtgaccagactattagctgcttcttgaactggaccgtggggaaactaaaaacgcatctatctaacgtttaccctagcaaaccattgacgaaggatcagagattggtgtattcgggcagactgcttcccgatcatctgcagctgaaagacattctcagaaaacaagatgagtatcatatggttcatctagtatgtacttctcggactcctcccagttctccaaaatccagcaccaatagagaaagtcatgaagcattggcatccagcagcaattctagttcagatcattcaggatcaacaactccatcatctggtcaagaaaccttgtctttagctgtgggttcttcctcagaaggattgaggcagcgtacccttccacaagcacaaactgaccaagcacagagtcaccagtttccatatgtaatgcaaggaaatgtagacaaccaatttcctgggcaagctgctccacctggattcccagtgtatcccgcgtttagcccactgcagatgctatggtggcaacagatgtatgctcatcagtattatatgcagtatcaagctgcagtttcagctcaggccacatcaaatgtcaacccaacccagcctactacttcacagcctctaaatttggcacatgttcctggagaagaacccccaccagctccaaacctagtggcccaagaaaatcgacccatgaatgagaatgttcaaatgaatgcacagggaggtccagtactaaatgaagaagacttcaatcgagactggctagactggatgtacacgttctcacgagctgcgattctccttagcattgtatacttctattcttcttttagtcggtttatcatggtaatgggagccatgctactggtttatttacaccaagctggatggtttccttttaggcaagaaggaggtcatcagcaggctcccaacaataatgccgaagttaacaatgatgggcaaaatgcaaacaacttggaacttgaagaaatggagcgtcttatggatgatgggcttgaagatgagagtggagaagatggaggtgaagatgccagtgcaattcaaaggcctggattaatggcttcagcttggtctttcatcaccaccttctttacttcactaataccagaggggcctccccaggttgccaattgacctgaaaaactgtgccagctacaaggagggtctgacttcaggaaagtggtttaaataacagtgcaatttcaaaaaaatttataactttcttttgatcatcatgtacagaggtgttttttttctttaggcttctcatgcatatgaatattttaagcacgaatggactactaaatatctgagttttttttttttttttttaaagatcctaacagaacatagcgtaacaatattggtcttccaggtgttactcatttcaattatgtgtagtataccaggacagacctattttcatgtcttatttctttaaagagctgcttcattggccgggcgccatggctcacgtctgtaatcccaaagtgctgcaattacaggcatgagccactatgcccagccacattcttaaccttaaagggctctgaatatggagatagaacactggagtcgaagtcccagccccctctgtcgctctctctgaagctcagtgactactccagtattaaatgatgcatgtataaagttagtcactctatcattatctgt

SEQ ID NO: 342947 - DNA, 209 bp, Homo sapiens
cctgggcgacagagtgagactcttgtctcggagaaaaaaaaaattaaaaataaataaataaataataaaaattcgagaggtttgatttctgcttctggtttcagaggaaggaaaatcacttaggcaatgggcccctggggaacagaatagctcctaaatcccgggtgtgctgtcctctgtgggctgagtgtctgtgcagcgggaagaag

SEQ ID NO: 342948 - DNA, 752 bp, Homo sapiens
gagaactgcatcatgaaggagaaacttggatttgtgattcaggcaagtccaggttcaaatcctggctctgcaatttaccagctgcagaaacttggatatttagaacagatgaagatgatcccaaataaggatatttggtgtccctgaagtagagaactcaaaactatggaatagaaagagtgaagatgaccagacaactttctttcagctttaagtcagcctcctctccctcttcaaagcccctcttctaggacagaagaggccatcagggactaacaataaatgcctcacaccctccagcggacatctgcatttctgaacattccagaccaaggttataccaaagaacagccctcttagtggcattttattctatcaggccaagataaagttttcctaaaactggctttttagtaaaagttcacatgataaatacacattcattatactattgttatccttatgcttttgtgtgtatttgaaattttccaaaataaaaaaaaatttttttaagtaacagctggctgggcataatggctcacacatgtaatcccagcactttgagaggctgaggcaggaggatcacttgaggccagaagtttaagaccaacccaggcaacatagtgagaccccctaatctacaaaaaattttaaaacagccaagcatagtggcatacatctgtagtcccagctactgaggaggatgaggtgataggactgcttgagcccaggagttctaggctgcagtgagc

SEQ ID NO: 342949 - DNA, 772 bp, Homo sapiens
gagaactgcatcatgaaggagaaacttggatttgtgattcaggcaagtccaggttcaaatcctggctctgcaatttaccagctgcagaaacttggggatgaagagcatctgtccccacctccctttctcctcagggacctgcctgtctacacagtgaagaggccttgttatgcttggcagtaaaggcgctgatgtgcaggtgaagatgaccagacaactttctttcagctttaagtcagcctcctctccctcttcaaagcccctcttctaggacagaagaggccatcagggactaacaataaatgcctcacaccctccagcggacatctgcatttctgaacattccagaccaaggttataccaaagaacagccctcttagtggcattttattctatcaggccaagataaagttttcctaaaactggctttttagtaaaagttcacatgataaatacacattcattatactattgttatccttatgcttttgtgtgtatttgaaattttccaaaataaaaaaaaatttttttaagtaacagctggctgggcataatggctcacacatgtaatcccagcactttgagaggctgaggcaggaggatcacttgaggccagaagtttaagaccaacccaggcaacatagtgagaccccctaatctacaaaaaattttaaaacagccaagcatagtggcatacatctgtagtcccagctactgaggaggatgaggtgataggactgcttgagcccaggagttctaggctgcagtgagc

SEQ ID NO: 342950 - DNA, 1761 bp, Homo sapiens
gtgtggggctggactctgaggcggccagaggcctaggaacgttatcctgggcacaccgtgcgtggtgtgcagtctgagtcatgctccctgggtagggcatccagctcccagcctgggagtgctgagagccaaatccaccgtagagcaggggtgagagtcagggtcccacctcctctatctgccggcaatccagtggtgacctagggtaaaagcttgagagtcccatacacacggtcatcccacgacatacctcacaggccaggcagggacacacagcccccttccctccctcccaggtaccgtcatagctgctagtgtgactgaaggcagtgtccctggccccagctgaagcaccgtagccagccagcgggctcacgcaccttggcctgttgctcctagggtcacttgtgccattcagccaaggggacgaccgtgcctgctggcccagctgagctccgcccagtgagcccaccccccattctcctgccactgactctcgctcttctgcttttcccagcaggaagggcccagcctcacctacgagacctgcagccccccgaccagctgaggctcccctcttagacttataagtctatggccactggcatccggctgcctgccctccctgcctcccccagggtcccttcagagggtcctgggttttctgaacacccagaggggcctccggcgctccctccagccatcccttttagtttcaccctcctggttcaagcagtgttctttctctatcaggcctggtggctgttgcatggggctccccaaggcaaggggtggccccaggccagtgggttggaagacagggtgaccagagaagagggaagcccgagggggccgagcatcagcctgaattgcgggtgccctgcctgggtgccgtgtgagaggccagcgtgtgtggggtggggagggccgccacagcccccaggcgctatctgtgaagctacggctcctccctccatcttcctcccctttcccttccagccccttttccaggaaccttgccacacccacacctgcagcctcccctccccggccctcccaccactgctgcggcgcggccggccccggccgtgtgctgcgcttgccttaccagctctctcctcgcttttctctcccgttttctctctgctttctctccaactgccagccgatcgggtcaggcaagtccatcccgtcctgagagccccaggccccccttcgacctctaaacagatccctcctcttctcggagacctccctttccaagcctgcctggacggctgttctgtgacttgacagtggctcccccagccccaaagccagcccccttcatctgtgacttaatctgttgtagtggtgagctgatacattcaggtgtgaccgttggtgaaaacttgtgccccttctgtggtatgcccttgccctgttctataaatatctataaatactcatatatatacacacctacacatggccaaccgcctcgcctctagcgctgggaatcagtcactgtgctatccttgtggagtcttgtggcccaactaccagagaacgctgtcccccgacatcccactccaaagtgtgccacctccagtgagcctccttgtcatgcccggcctgtggacagccagcccccgccatccctcccaccccctaccaagcatgggggtgctgtgcaggcagccgtgtggcctgacagtttctaccagtcctgctgtccctcggctgagaataaaacccatttctggatgatggggaatgtca

SEQ ID NO: 342951 - DNA, 479 bp, Homo sapiens
  misc_feature (340)..(340): n is a, c, g, or t
ggagaaatgacagctggactttagcgagcaagccctatctccatgagcagcacgggtgatcctctaagcacaccaggcacgagtgtgcagggagctggtgcaaatgcctctgtgtgcgggtgagcttctgtgttgtgactctgcccacacgtgtgcttcagtgtgctgagtggctgcatgccccagatccatgctgcacgcgccgccggccagtgagggtgctgggcactgggaggtggcggggaaggaggcgtatgcgtgttgtttgtgggcatgtgtgttagcgtgtgcatgtgggccatggggcttcacagcatatgtgtgcacgcccgggctttgncgtgtgtgtgtcccccacccccaggccggccccacccgtgcgtgtgaactgccatgttgattttcgtgctgtctttcagaatcactatcagtgacccctgaggagcgtcagccatggccggtacatgcctcaccgcctg

SEQ ID NO: 342952 - DNA, 565 bp, Homo sapiens
gggggaggacaaagactacaagttagggtggggagcaggtggcaagatctgctggtcacatcgtgggacacagtggactcaattccaaagacagtgacaagaccctgtggggatcctcgcctgatcaggaaggggattctggtcatccgcaagggctggctgactatcaataatattggcatcatgaaagggggctccaaggagtactggtttgtgctgactgctgagaatctgtcctggtacaaggatgatgaggagaaagagaagaaatacatgctgtctgtggacaacctcaagctgcgggacgtggagaagggctttatgtcgagcaagcatatctttgccctctttaacacggagcagagggtggtggcagtactagtcctcttccttcctgacccaaggctgactctagtgggccctctgctactcggagatgagagttcagtccagcggccatcagaggggtccttagagagccacggagaaagctggtgggatctgggccccaagctagagacttcactgactatggttgtcctcttgtcaaaggtccagtcccctt

SEQ ID NO: 342953 - DNA, 3281 bp, Homo sapiens
cgggggccccgcggcgcaggcagtctgggcgcgcggctgcagcggcggagccggaagtcggagccgggagcgctagcggcagccggatcgcagcctgcggggcccgccgcagccatgggcaaccgcggcatggaagatctcatcccgctggtcaaccggctgcaagacgccttctctgccatcggccagaacgcggacctcgacctgccgcagatcgctgtggtgggcggccagagcgccggcaagagctcggtgctcgagaatttcgtaggcagggacttcttgcctcgaggatctggcattgtcacccgacgtcccctggtcttgcagctggtcaatgcaaccacagaatatgccgagttcctgcactgcaagggaaagaaattcaccgacttcgaggaggtgcgccttgagatcgaggccgagaccgacagggtcaccggcaccaacaagggcatctcgccggtgcctatcaacctccgcgtctactcgccgcacgtgctgaacctgaccctggtggacctgcccggaatgaccaaggtcccggtgggggaccaacctcccgacatcgagttccagatccgagacatgcttatgcagtttgtcaccaaggagaactgcctcatcctggccgtgtcccccgccaactctgacctggccaattctgacgccctcaaggtcgccaaggaggtggacccccagggccagcgcaccatcggggtcatcaccaagctggacctgatggacgagggcacagatgcccgtgatgtgctggagaacaagctgctccccctgcgcagaggctacattggagtggtgaaccggagccagaaggacattgatggcaagaaggacattaccgccgccttggctgctgaacgaaagttcttcctctcccatccatcttatcgccacttggctgaccgtatgggcacgccctacctgcagaaggtcctcaatcagcaactgacgaaccacatccgggacacactgccggggctgcggaacaagctgcagagccagctactgtccattgagaaggaggtggaggaatacaagaacttccgccctgatgacccagctcgcaagaccaaggccctgctgcagatggtccagcagttcgccgtagactttgagaagcgcattgagggctcaggagatcagatcgacacctacgaactgtcagggggagcccgcattaaccgaatcttccacgagcgcttccctttcgagctggtcaagatggagtttgatgagaaggaactccgaagggagatcagctatgctatcaagaatatccatggcattagaacggggctgtttaccccagacatggcctttgagaccattgtgaaaaagcaggtgaagaagatccgagaaccgtgtctcaagtgtgtggacatggttatctcggagctaatcagcaccgttagacagtgcaccaagaagctccagcagtacccgcggctacgggaggagatggagcgcatcgtgaccacccacatccgggagcgcgagggccgcactaaggagcaggtcatgcttctcatcgatatcgagctggcttacatgaacaccaaccatgaggacttcataggctttgccaatgctcagcagaggagcaaccagatgaacaagaagaagacttcagggaaccaggatgagattctggtcatccgcaagggctggctgactatcaataatattggcatcatgaaagggggctccaaggagtactggtttgtgctgactgctgagaatctgtcctggtacaaggatgatgaggagaaagagaagaaatacatgctgtctgtggacaacctcaagctgcgggacgtggagaagggctttatgtcgagcaagcatatctttgccctctttaacacggagcagaggaatgtctacaaggattatcggcagctggagctagcctgtgagacacaggaggaggtggacagctggaaggcctccttcctgagggctggcgtgtaccctgagcgtgttggggacaaagagaaagccagcgagaccgaggagaatggctccgacagcttcatgcattccatggacccacagctggaacggcaagtggagaccatccggaatcttgtggactcatacatggccattgtcaacaagaccgtgagggacctcatgcccaagaccatcatgcacctcatgattaacaataccaaggagttcatcttctcggagctgctggccaacctgtactcgtgtggggaccagaacacgctgatggaggagtcggcggagcaggcacagcggcgcgacgagatgctgcgcatgtaccacgcactgaaggaggcgctcagcatcatcggcgacatcaacacgaccaccgtcagcacgcccatgcccccgcccgtggacgactcctggctgcaggtgcagagcgtaccggccggacgcaggtcgcccacgtccagccccacgccgcagcgccgagcccccgccgtgcccccagcccggcccgggtcgcggggccctgctcctgggcctccgcctgctgggtccgccctggggggggcgccccccgtgccctccaggccgggggcttcccctgaccctttcggccctccccctcaggtgccctcgcgccccaaccgcgccccgcccggggtccccagaatcactatcagtgacccctgaggagcgtcagccatgccgatcgggtcaggcaagtccatcccgtcctgagagccccaggccccccttcgacctctaaacagatccctcctcttctcggagacctccctttccaagcctgcctggacggctgttctgtgacttgacagtggctcccccagccccaaagccagcccccttcatctgtgacttaatctgttgtagtggtgagctgatacattcaggtgtgaccgttggtgaaaacttgtgccccttctgtggtatgcccttgccctgttctataaatatctataaatactcatatatatacacacctacacatggccaaccgcctcgcctctagcgctgggaatcagtcactgtgctatccttgtggagtcttgtggcccaactaccagagaacgctgtcccccgacatcccactccaaagtgtgccacctccagtgagcctccttgtcatgcccggcctgtggacagccagcccccgccatccctcccaccccctaccaagcatgggggtgctgtgcaggcagccgtgtggcctgacagtttctaccagtcctgctgtccctcggctgagaataaaacccatttctggatgatggggaatgtca

SEQ ID NO: 342954 - DNA, 3281 bp, Homo sapiens
cgggggccccgcggcgcaggcagtctgggcgcgcggctgcagcggcggagccggaagtcggagccgggagcgctagcggcagccggatcgcagcctgcggggcccgccgcagccatgggcaaccgcggcatggaagatctcatcccgctggtcaaccggctgcaagacgccttctctgccatcggccagaacgcggacctcgacctgccgcagatcgctgtggtgggcggccagagcgccggcaagagctcggtgctcgagaatttcgtaggcagggacttcttgcctcgaggatctggcattgtcacccgacgtcccctggtcttgcagctggtcaatgcaaccacagaatatgccgagttcctgcactgcaagggaaagaaattcaccgacttcgaggaggtgcgccttgagatcgaggccgagaccgacagggtcaccggcaccaacaagggcatctcgccggtgcctatcaacctccgcgtctactcgccgcacgtgctgaacctgaccctggtggacctgcccggaatgaccaaggtcccggtgggggaccaacctcccgacatcgagttccagatccgagacatgcttatgcagtttgtcaccaaggagaactgcctcatcctggccgtgtcccccgccaactctgacctggccaattctgacgccctcaaggtcgccaaggaggtggacccccagggccagcgcaccatcggggtcatcaccaagctggacctgatggacgagggcacagatgcccgtgatgtgctggagaacaagctgctccccctgcgcagaggctacattggagtggtgaaccggagccagaaggacattgatggcaagaaggacattaccgccgccttggctgctgaacgaaagttcttcctctcccatccatcttatcgccacttggctgaccgtatgggcacgccctacctgcagaaggtcctcaatcagcaactgacgaaccacatccgggacacactgccggggctgcggaacaagctgcagagccagctactgtccattgagaaggaggtggaggaatacaagaacttccgccctgatgacccagctcgcaagaccaaggccctgctgcagatggtccagcagttcgccgtagactttgagaagcgcattgagggctcaggagatcagatcgacacctacgaactgtcagggggagcccgcattaaccgaatcttccacgagcgcttccctttcgagctggtcaagatggagtttgatgagaaggaactccgaagggagatcagctatgctatcaagaatatccatggcattaggacgggcctcttcacacctgacctcgcttttgaagccacagtgaaaaagcaggtgcagaagctcaaagagcccagtatcaagtgtgtggatatggtagtcagtgagctcacagccaccatcagaaagtgtagcgaaaagctccagcagtacccgcggctacgggaggagatggagcgcatcgtgaccacccacatccgggagcgcgagggccgcactaaggagcaggtcatgcttctcatcgatatcgagctggcttacatgaacaccaaccatgaggacttcataggctttgccaatgctcagcagaggagcaaccagatgaacaagaagaagacttcagggaaccaggatgagattctggtcatccgcaagggctggctgactatcaataatattggcatcatgaaagggggctccaaggagtactggtttgtgctgactgctgagaatctgtcctggtacaaggatgatgaggagaaagagaagaaatacatgctgtctgtggacaacctcaagctgcgggacgtggagaagggctttatgtcgagcaagcatatctttgccctctttaacacggagcagaggaatgtctacaaggattatcggcagctggagctagcctgtgagacacaggaggaggtggacagctggaaggcctccttcctgagggctggcgtgtaccctgagcgtgttggggacaaagagaaagccagcgagaccgaggagaatggctccgacagcttcatgcattccatggacccacagctggaacggcaagtggagaccatccggaatcttgtggactcatacatggccattgtcaacaagaccgtgagggacctcatgcccaagaccatcatgcacctcatgattaacaataccaaggagttcatcttctcggagctgctggccaacctgtactcgtgtggggaccagaacacgctgatggaggagtcggcggagcaggcacagcggcgcgacgagatgctgcgcatgtaccacgcactgaaggaggcgctcagcatcatcggcgacatcaacacgaccaccgtcagcacgcccatgcccccgcccgtggacgactcctggctgcaggtgcagagcgtaccggccggacgcaggtcgcccacgtccagccccacgccgcagcgccgagcccccgccgtgcccccagcccggcccgggtcgcggggccctgctcctgggcctccgcctgctgggtccgccctggggggggcgccccccgtgccctccaggccgggggcttcccctgaccctttcggccctccccctcaggtgccctcgcgccccaaccgcgccccgcccggggtccccagaatcactatcagtgacccctgaggagcgtcagccatgccgatcgggtcaggcaagtccatcccgtcctgagagccccaggccccccttcgacctctaaacagatccctcctcttctcggagacctccctttccaagcctgcctggacggctgttctgtgacttgacagtggctcccccagccccaaagccagcccccttcatctgtgacttaatctgttgtagtggtgagctgatacattcaggtgtgaccgttggtgaaaacttgtgccccttctgtggtatgcccttgccctgttctataaatatctataaatactcatatatatacacacctacacatggccaaccgcctcgcctctagcgctgggaatcagtcactgtgctatccttgtggagtcttgtggcccaactaccagagaacgctgtcccccgacatcccactccaaagtgtgccacctccagtgagcctccttgtcatgcccggcctgtggacagccagcccccgccatccctcccaccccctaccaagcatgggggtgctgtgcaggcagccgtgtggcctgacagtttctaccagtcctgctgtccctcggctgagaataaaacccatttctggatgatggggaatgtca

SEQ ID NO: 342955 - DNA, 1445 bp, Homo sapiens
tgggccccgccgtaccagttgcgcaagcatatctttgccctctttaacacggagcagaggaatgtctacaaggattatcggcagctggagctagcctgtgagacacaggaggaggtggacagctggaaggcctccttcctgagggctggcgtgtaccctgagcgtgttggggacaaagagaaagccagcgagaccgaggagaatggctccgacagcttcatgcattccatggacccacagctggaacggcaagtggagaccatccggaatcttgtggactcatacatggccattgtcaacaagaccgtgagggacctcatgcccaagaccatcatgcacctcatgattaacaataccaaggagttcatcttctcggagctgctggccaacctgtactcgtgtggggaccagaacacgctgatggaggagtcggcggagcaggcacagcggcgcgacgagatgctgcgcatgtaccacgcactgaaggaggcgctcagcatcatcggcgacatcaacacgaccaccgtcagcacgcccatgcccccgcccgtggacgactcctggctgcaggtgcagagcgtaccggccggacgcaggtcgcccacgtccagccccacgccgcagcgccgagcccccgccgtgcccccagcccggcccgggtcgcggggccctgctcctgggcctccgcctgctgggtccgccctggggggggcgccccccgtgccctccaggccgggggcttcccctgaccctttcggccctccccctcaggtgccctcgcgccccaaccgcgccccgcccggggtccccagaatcactatcagtgacccctgaggagcgtcagccatgccgatcgggtcaggcaagtccatcccgtcctgagagccccaggccccccttcgacctctaaacagatccctcctcttctcggagacctccctttccaagcctgcctggacggctgttctgtgacttgacagtggctcccccagccccaaagccagcccccttcatctgtgacttaatctgttgtagtggtgagctgatacattcaggtgtgaccgttggtgaaaacttgtgccccttctgtggtatgcccttgccctgttctataaatatctataaatactcatatatatacacacctacacatggccaaccgcctcgcctctagcgctgggaatcagtcactgtgctatccttgtggagtcttgtggcccaactaccagagaacgctgtcccccgacatcccactccaaagtgtgccacctccagtgagcctccttgtcatgcccggcctgtggacagccagcccccgccatccctcccaccccctaccaagcatgggggtgctgtgcaggcagccgtgtggcctgacagtttctaccagtcctgctgtccctcggctgagaataaaacccatttctggatgatggggaatgtca

SEQ ID NO: 342956 - DNA, 2909 bp, Homo sapiens
  misc_feature (2422)..(2422): n is a, c, g, or t
cgggggccccgcggcgcaggcagtctgggcgcgcggctgcagcggcggagccggaagtcggagccgggagcgctagcggcagccggatcgcagcctgcggggcccgccgcagccatgggcaaccgcggcatggaagatctcatcccgctggtcaaccggctgcaagacgccttctctgccatcggccagaacgcggacctcgacctgccgcagatcgctgtggtgggcggccagagcgccggcaagagctcggtgctcgagaatttcgtaggcagggacttcttgcctcgaggatctggcattgtcacccgacgtcccctggtcttgcagctggtcaatgcaaccacagaatatgccgagttcctgcactgcaagggaaagaaattcaccgacttcgaggaggtgcgccttgagatcgaggccgagaccgacagggtcaccggcaccaacaagggcatctcgccggtgcctatcaacctccgcgtctactcgccgcacgtgctgaacctgaccctggtggacctgcccggaatgaccaaggtcccggtgggggaccaacctcccgacatcgagttccagatccgagacatgcttatgcagtttgtcaccaaggagaactgcctcatcctggccgtgtcccccgccaactctgacctggccaattctgacgccctcaaggtcgccaaggaggtggacccccagggccagcgcaccatcggggtcatcaccaagctggacctgatggacgagggcacagatgcccgtgatgtgctggagaacaagctgctccccctgcgcagaggctacattggagtggtgaaccggagccagaaggacattgatggcaagaaggacattaccgccgccttggctgctgaacgaaagttcttcctctcccatccatcttatcgccacttggctgaccgtatgggcacgccctacctgcagaaggtcctcaatcagcaactgacgaaccacatccgggacacactgccggggctgcggaacaagctgcagagccagctactgtccattgagaaggaggtggaggaatacaagaacttccgccctgatgacccagctcgcaagaccaaggccctgctgcagatggtccagcagttcgccgtagactttgagaagcgcattgagggctcaggagatcagatcgacacctacgaactgtcagggggagcccgcattaaccgaatcttccacgagcgcttccctttcgagctggtcaagatggagtttgatgagaaggaactccgaagggagatcagctatgctatcaagaatatccatggcattagaacggggctgtttaccccagacatggcctttgagaccattgtgaaaaagcaggtgaagaagatccgagaaccgtgtctcaagtgtgtggacatggttatctcggagctaatcagcaccgttagacagtgcaccaagaagctccagcagtacccgcggctacgggaggagatggagcgcatcgtgaccacccacatccgggagcgcgagggccgcactaaggagcaggtcatgcttctcatcgatatcgagctggcttacatgaacaccaaccatgaggacttcataggctttgccaatgctcagcagaggagcaaccagatgaacaagaagaagacttcagggaaccaggatgagattctggtcatccgcaagggctggctgactatcaataatattggcatcatgaaagggggctccaaggagtactggtttgtgctgactgctgagaatctgtcctggtacaaggatgatgaggagaaagagaagaaatacatgctgtctgtggacaacctcaagctgcgggacgtggagaagggctttatgtcgagcaagcatatctttgccctctttaacacggagcagaggaatgtctacaaggattatcggcagctggagctagcctgtgagacacaggaggaggtggacagctggaaggcctccttcctgagggctggcgtgtaccctgagcgtgttggggacaaagagaaagccagcgagaccgaggagaatggctccgacagcttcatgcattccatggacccacagctggaacggcaagtggagaccatccggaatcttgtggactcatacatggccattgtcaacaagaccgtgagggacctcatgcccaagaccatcatgcacctcatgattaacaataccaaggagttcatcttctcggagctgctggccaacctgtactcgtgtggggaccagaacacgctgatggaggagtcggcggagcaggcacagcggcgcgacgagatgctgcgcatgtaccacgcactgaaggaggcgctcagcatcatcggcgacatcaacacgaccaccgtcagcacgcccatgcccccgcccgtggacgactcctggctgcaggtcgcccacgtccagncccacgccgcagcgccgagcacagccgcacgtgcacacgcagaacacaggacaccggagtacgcggggaacctggaaaatccagggacacaatcgaacgaatgaagatccaaaccaagaggagaagagaaacaagacgaagacaacaacaagaacgagaagaatgacacaaaaaaaagacacgaacaaacaacaaaagaaagaaaagaaagaaaagaagcagacaaaaacaaaaagaaaaaaaaaacgaaaaacagacaaaaaaaaagctacacaagaaacaaacaaaagaaaagcaagaaaaaaacacaacaacagaaaaagtaacaaacagaaaacaaagacaaaaagacaggaaaaaacgagcgataagaaagaacaaagaaacaaaaacaacaagagacaacaaacacagcaaacgagacacaacacaccaacaaacaaaaaaaaaaaagcaccaagcgacaaaaacacaaaaacaaccaaca

SEQ ID NO: 342957 - DNA, 1052 bp, Homo sapiens
  misc_feature (340)..(340): n is a, c, g, or t
ggagaaatgacagctggactttagcgagcaagccctatctccatgagcagcacgggtgatcctctaagcacaccaggcacgagtgtgcagggagctggtgcaaatgcctctgtgtgcgggtgagcttctgtgttgtgactctgcccacacgtgtgcttcagtgtgctgagtggctgcatgccccagatccatgctgcacgcgccgccggccagtgagggtgctgggcactgggaggtggcggggaaggaggcgtatgcgtgttgtttgtgggcatgtgtgttagcgtgtgcatgtgggccatggggcttcacagcatatgtgtgcacgcccgggctttgncgtgtgtgtgtcccccacccccaggccggccccacccgtgcgtgtgaactgccatgttgattttcgtgctgtctttcagaatcactatcagtgacccctgaggagcgtcagccatgccgatcgggtcaggcaagtccatcccgtcctgagagccccaggccccccttcgacctctaaacagatccctcctcttctcggagacctccctttccaagcctgcctggacggctgttctgtgacttgacagtggctcccccagccccaaagccagcccccttcatctgtgacttaatctgttgtagtggtgagctgatacattcaggtgtgaccgttggtgaaaacttgtgccccttctgtggtatgcccttgccctgttctataaatatctataaatactcatatatatacacacctacacatggccaaccgcctcgcctctagcgctgggaatcagtcactgtgctatccttgtggagtcttgtggcccaactaccagagaacgctgtcccccgacatcccactccaaagtgtgccacctccagtgagcctccttgtcatgcccggcctgtggacagccagcccccgccatccctcccaccccctaccaagcatgggggtgctgtgcaggcagccgtgtggcctgacagtttctaccagtcctgctgtccctcggctgagaataaaacccatttctggatgatggggaatgtca

SEQ ID NO: 342958 - DNA, 2406 bp, Homo sapiens
cgggggccccgcggcgcaggcagtctgggcgcgcggctgcagcggcggagccggaagtcggagccgggagcgctagcggcagccggatcgcagcctgcggggcccgccgcagccatgggcaaccgcggcatggaagatctcatcccgctggtcaaccggctgcaagacgccttctctgccatcggccagaacgcggacctcgacctgccgcagatcgctgtggtgggcggccagagcgccggcaagagctcggtgctcgagaatttcgtaggcagggacttcttgcctcgaggatctggcattgtcacccgacgtcccctggtcttgcagctggtcaatgcaaccacagaatatgccgagttcctgcactgcaagggaaagaaattcaccgacttcgaggaggtgcgccttgagatcgaggccgagaccgacagggtcaccggcaccaacaagggcatctcgccggtgcctatcaacctccgcgtctactcgccgcacgtgctgaacctgaccctggtggacctgcccggaatgaccaaggtcccggtgggggaccaacctcccgacatcgagttccagatccgagacatgcttatgcagtttgtcaccaaggagaactgcctcatcctggccgtgtcccccgccaactctgacctggccaattctgacgccctcaaggtcgccaaggaggtggacccccagggccagcgcaccatcggggtcatcaccaagctggacctgatggacgagggcacagatgcccgtgatgtgctggagaacaagctgctccccctgcgcagaggctacattggagtggtgaaccggagccagaaggacattgatggcaagaaggacattaccgccgccttggctgctgaacgaaagttcttcctctcccatccatcttatcgccacttggctgaccgtatgggcacgccctacctgcagaaggtcctcaatcagcaactgacgaaccacatccgggacacactgccggggctgcggaacaagctgcagagccagctactgtccattgagaaggaggtggaggaatacaagaacttccgccctgatgacccagctcgcaagaccaaggccctgctgcagatggtccagcagttcgccgtagactttgagaagcgcattgagggctcaggagatcagatcgacacctacgaactgtcagggggagcccgcattaaccgaatcttccacgagcgcttccctttcgagctggtcaagatggagtttgatgagaaggaactccgaagggagatcagctatgctatcaagaatatccatggcattagaacggggctgtttaccccagacatggcctttgagaccattgtgaaaaagcaggtgaagaagatccgagaaccgtgtctcaagtgtgtggacatggttatctcggagctaatcagcaccgttagacagtgcaccaagaagctccagcagtacccgcggctacgggaggagatggagcgcatcgtgaccacccacatccgggagcgcgagggccgcactaaggagcaggtcatgcttctcatcgatatcgagctggcttacatgaacaccaaccatgaggacttcataggctttgccaatgctcagcagaggagcaaccagatgaacaagaagaagacttcagggaaccaggatgagattctggtcatccgcaagggctggctgactatcaataatattggcatcatgaaagggggctccaaggagtactggtttgtgctgactgctgagaatctgtcctggtacaaggatgatgaggagaaagagaagaaatacatgctgtctgtggacaacctcaagctgcgggacgtggagaagggctttatgtcgagcaagcatatctttgccctctttaacacggagcagaggaatgtctacaaggattatcggcagctggagctagcctgtgagacacaggaggaggtggacagctggaaggcctccttcctgagggctggcgtgtaccctgagcgtgttggggacaaagagaaagccagcgagaccgaggagaatggctccgacagcttcatgcattccatggacccacagctggaacggcaagtggagaccatccggaatcttgtggactcatacatggccattgtcaacaagaccgtgagggacctcatgcccaagaccatcatgcacctcatgattaacaataccaaggagttcatcttctcggagctgctggccaacctgtactcgtgtggggaccagaacacgctgatggaggagtcggcggagcaggcacagcggcgcgacgagatgctgcgcatgtaccacgcactgaaggaggcgctcagcatcatcggcgacatggtgtttcccgccgtcagcccaagcacccccaagcccgtgtcctggtcctggctgttt

SEQ ID NO: 342959 - DNA, 709 bp, Homo sapiens
ctgttctataaatatctataaatactcatatatatacattcaggtgtgaccgttggtgaaaacttgtgccccttctgtggtatgcccttgccctgttctataaatatctatatatactcatatatatacattcaggtgtgaccgttggtgaaaacttgtgccccttctgtggtatgcccttgccctgttctataaatatctataaatactcatatatatacattcaggtgtgaccgttggtgacaacttgtgccccttctgtgtatgcccttgccctgttctataaatatctataaatactcatatctgatacattcaggtgtgaccgttggtgaaaacttgtgccccttctgtggtatgcccttgccctgttctataaatatctataaatactcatatatatacacacctacacatggccaaccgcctcgcctctagcgctgggaatcagtcactgtgctatccttgtggagtcttgtggcccaactaccagagaacgctgtcccccgacatcccactccaaagtgtgccacctccagtgagcctccttgtcatgcccggcctgtggacagccagcccccgccatccctcccaccccctaccaagcatgggggtgctgtgcaggcagccgtgtggcctgacagtttctaccagtcctgctgtccctcggctgagaataaaacccatttctggatgatggggaatgtca

SEQ ID NO: 342960 - DNA, 988 bp, Homo sapiens
cgggggccccgcggcgcaggcagtctgggcgcgcggctgcagcggcggagccggaagtcggagccgggagcgctagcggcagccggatcgcagcctgcggggcccgccgcagccatgggcaaccgcggcatggaagatctcatcccgctggtcaaccggctgcaagacgccttctctgccatcggccagaacgcggacctcgacctgccgcagatcgctgtggtgggcggccagagcgccggcaagagctcggtgctcgagaatttcgtaggcagggacttcttgcctcgaggatctggcattgtcacccgacgtcccctggtcttgcagctggtcaatgcaaccacagaatatgccgagttcctgcactgcaagggaaagaaattcaccgacttcgaggaggtgcgccttgagatcgaggccgagaccgacagggtcaccggcaccaacaagggcatctcgccggtgcctatcaacctccgcgtctactcgccgcacgtgctgaacctgaccctggtggacctgcccggaatgaccaaggtcccggtgggggaccaacctcccgacatcgagttccagatccgagacatgcttatgcagtttgtcaccaaggagaactgcctcatcctggccgtgtcccccgccaactctgacctggccaattctgacgccctcaaggtcgccaaggaggtggacccccagggccagcgcaccatcggggtcatcaccaagctggacctgatggacgagggcacagatgcccgtgatgtgctggagaacaagctgctccccctgcgcagaggctacattggagtggtgaaccggagccagaaggacattgatggcaagaaggacattaccgccgccttggctgctgaacgaaagttcttcctctcccatccatcttatcgccacttggctgaccgtatgggcacgccctacctgcagaaggtcctcaatcaggtaggcgaccaagccaggatggggc

SEQ ID NO: 342961 - DNA, 463 bp, Homo sapiens
ggagaaatgacagctggactttagcgagcaagccctatctccatgagcagcacgggtgatcctctaagcacaccaggcacgagtgtgcagggagctggtgcaaatgcctctgtgtgcgggtgagcttctgtgttgtgactctgcccacacgtgtgcttcagtgtgctgagtggctgcatgccccagatccatgctgcacgcgccgccggccagtgagggtgctgggcactgggaggtggcggggaaggaggcgtatgcgtgttgtttgtgggcatgtgtgttagcgtgtgcattgagcctccttgtcatgcccggcctgtggacagccagcccccgccatccctcccaccccctaccaagcatgggggtgctgtgcaggcagccgtgtggcctgacagtttctaccagtcctgctgtccctcggctgagaataaaacccatttctggatgatggggaatgtca

SEQ ID NO: 342962 - DNA, 3244 bp, Homo sapiens
cgggggccccgcggcgcaggcagtctgggcgcgcggctgcagcggcggagccggaagtcggagccgggagcgctagcggcagccggatcgcagcctgcggggcccgccgcagccatgggcaaccgcggcatggaagatctcatcccgctggtcaaccggctgcaagacgccttctctgccatcggccagaacgcggacctcgacctgccgcagatcgctgtggtgggcggccagagcgccggcaagagctcggtgctcgagaatttcgtaggcagggacttcttgcctcgaggatctggcattgtcacccgacgtcccctggtcttgcagctggtcaatgcaaccacagaatatgccgagttcctgcactgcaagggaaagaaattcaccgacttcgaggaggtgcgccttgagatcgaggccgagaccgacagggtcaccggcaccaacaagggcatctcgccggtgcctatcaacctccgcgtctactcgccgcacgtgctgaacctgaccctggtggacctgcccggaatgaccaaggtcccggtgggggaccaacctcccgacatcgagttccagatccgagacatgcttatgcagtttgtcaccaaggagaactgcctcatcctggccgtgtcccccgccaactctgacctggccaattctgacgccctcaaggtcgccaaggaggtggacccccagggccagcgcaccatcggggtcatcaccaagctggacctgatggacgagggcacagatgcccgtgatgtgctggagaacaagctgctccccctgcgcagaggctacattggagtggtgaaccggagccagaaggacattgatggcaagaaggacattaccgccgccttggctgctgaacgaaagttcttcctctcccatccatcttatcgccacttggctgaccgtatgggcacgccctacctgcagaaggtcctcaatcagcaactgacgaaccacatccgggacacactgccggggctgcggaacaagctgcagagccagctactgtccattgagaaggaggtggaggaatacaagaacttccgccctgatgacccagctcgcaagaccaaggccctgctgcagatggtccagcagttcgccgtagactttgagaagcgcattgagggctcaggagatcagatcgacacctacgaactgtcagggggagcccgcattaaccgaatcttccacgagcgcttccctttcgagctggtcaagatggagtttgatgagaaggaactccgaagggagatcagctatgctatcaagaatatccatggcattagaacggggctgtttaccccagacatggcctttgagaccattgtgaaaaagcaggtgaagaagatccgagaaccgtgtctcaagtgtgtggacatggttatctcggagctaatcagcaccgttagacagtgcaccaagaagctccagcagtacccgcggctacgggaggagatggagcgcatcgtgaccacccacatccgggagcgcgagggccgcactaaggagcaggtcatgcttctcatcgatatcgagctggcttacatgaacaccaaccatgaggacttcataggctttgccaatgctcagcagaggagcaaccagatgaacaagaagaagacttcagggaaccaggatgagattctggtcatccgcaagggctggctgactatcaataatattggcatcatgaaagggggctccaaggagtactggtttgtgctgactgctgagaatctgtcctggtacaaggatgatgaggagaaagagaagaaatacatgctgtctgtggacaacctcaagctgcgggacgtggagaagggctttatgtcgagcaagcatatctttgccctctttaacacggagcagaggaatgtctacaaggattatcggcagctggagctagcctgtgagacacaggaggaggtggacagctggaaggcctccttcctgagggctggcgtgtaccctgagcgtgttggggacaaagagaaagccagcgagaccgaggagaatggctccgacagcttcatgcattccatggacccacagctggaacggcaagtggagaccatccggaatcttgtggactcatacatggccattgtcaacaagaccgtgagggacctcatgcccaagaccatcatgcacctcatgattaacaataccaaggagttcatcttctcggagctgctggccaacctgtactcgtgtggggaccagaacacgctgatggaggagtcggcggagcaggcacagcggcgcgacgagatgctgcgcatgtaccacgcactgaaggaggcgctcagcatcatcggcgacatcaacacgaccaccgtcagcacgcccatgcccccgcccgtggacgactcctggctgcaggtgcagagcgtaccggccggacgcaggtcgcccacgtccagccccacgccgcagcgccgagcccccgccgtgcccccagcccggcccgggtcgcggggccctgctcctgggcctccgcctgctgggtccgccctggggggggcgccccccgtgccctccaggccgggggcttcccctgaccctttcggccctccccctcaggtgccctcgcgccccaaccgcgccccgcccggggtccccagccgatcgggtcaggcaagtccatcccgtcctgagagccccaggccccccttcgacctctaaacagatccctcctcttctcggagacctccctttccaagcctgcctggacggctgttctgtgacttgacagtggctcccccagccccaaagccagcccccttcatctgtgacttaatctgttgtagtggtgagctgatacattcaggtgtgaccgttggtgaaaacttgtgccccttctgtggtatgcccttgccctgttctataaatatctataaatactcatatatatacacacctacacatggccaaccgcctcgcctctagcgctgggaatcagtcactgtgctatccttgtggagtcttgtggcccaactaccagagaacgctgtcccccgacatcccactccaaagtgtgccacctccagtgagcctccttgtcatgcccggcctgtggacagccagcccccgccatccctcccaccccctaccaagcatgggggtgctgtgcaggcagccgtgtggcctgacagtttctaccagtcctgctgtccctcggctgagaataaaacccatttctggatgatggggaatgtca

SEQ ID NO: 342963 - DNA, 524 bp, Homo sapiens
ggcgagctgctaactcaggggcgagctgctaactcaggggcgagctgctaactcaggggcgagctgctaactcaggggcgagctgctaactcaggggcgagctgcaaccaaggccctgctgcagatggtccagcagttcgccgtagactttgagaagcgcattgagggctcaggagatcagatcgacacctacgaactgtcagggggagcccgcattaaccgaatcttccacgagcgcttccctttcgagctggtcaagatggagtttgatgagaaggaactccgaagggagatcagctatgctatcaagaatatccatggcattaggacgggcctcttcacacctgacctcgcttttgaagccacagtgaaaaagcaggtgcagaagctcaaagagcccagtatcaagtgtgtggatatggtagtcagtgagctcacagccaccatcagaaagtgtagcgaaaagctccacagtaccccggctacgggaggagatgagcgcctgggatcctcctagaacgcct

SEQ ID NO: 342964 - DNA, 2797 bp, Homo sapiens
cctgcgtgttactcttgagagatccccgcctaagtggatgctccggaatgaccaaggtcccggtgggggaccaacctcccgacatcgagttccagatccgagacatgcttatgcagtttgtcaccaaggagaactgcctcatcctggccgtgtcccccgccaactctgacctggccaattctgacgccctcaaggtcgccaaggaggtggacccccagggccagcgcaccatcggggtcatcaccaagctggacctgatggacgagggcacagatgcccgtgatgtgctggagaacaagctgctccccctgcgcagaggctacattggagtggtgaaccggagccagaaggacattgatggcaagaaggacattaccgccgccttggctgctgaacgaaagttcttcctctcccatccatcttatcgccacttggctgaccgtatgggcacgccctacctgcagaaggtcctcaatcagcaactgacgaaccacatccgggacacactgccggggctgcggaacaagctgcagagccagctactgtccattgagaaggaggtggaggaatacaagaacttccgccctgatgacccagctcgcaagaccaaggccctgctgcagatggtccagcagttcgccgtagactttgagaagcgcattgagggctcaggagatcagatcgacacctacgaactgtcagggggagcccgcattaaccgaatcttccacgagcgcttccctttcgagctggtcaagatggagtttgatgagaaggaactccgaagggagatcagctatgctatcaagaatatccatggcattagaacggggctgtttaccccagacatggcctttgagaccattgtgaaaaagcaggtgaagaagatccgagaaccgtgtctcaagtgtgtggacatggttatctcggagctaatcagcaccgttagacagtgcaccaagaagctccagcagtacccgcggctacgggaggagatggagcgcatcgtgaccacccacatccgggagcgcgagggccgcactaaggagcaggtcatgcttctcatcgatatcgagctggcttacatgaacaccaaccatgaggacttcataggctttgccaatgctcagcagaggagcaaccagatgaacaagaagaagacttcagggaaccaggatgagattctggtcatccgcaagggctggctgactatcaataatattggcatcatgaaagggggctccaaggagtactggtttgtgctgactgctgagaatctgtcctggtacaaggatgatgaggagaaagagaagaaatacatgctgtctgtggacaacctcaagctgcgggacgtggagaagggctttatgtcgagcaagcatatctttgccctctttaacacggagcagaggaatgtctacaaggattatcggcagctggagctagcctgtgagacacaggaggaggtggacagctggaaggcctccttcctgagggctggcgtgtaccctgagcgtgttggggacaaagagaaagccagcgagaccgaggagaatggctccgacagcttcatgcattccatggacccacagctggaacggcaagtggagaccatccggaatcttgtggactcatacatggccattgtcaacaagaccgtgagggacctcatgcccaagaccatcatgcacctcatgattaacaataccaaggagttcatcttctcggagctgctggccaacctgtactcgtgtggggaccagaacacgctgatggaggagtcggcggagcaggcacagcggcgcgacgagatgctgcgcatgtaccacgcactgaaggaggcgctcagcatcatcggcgacatcaacacgaccaccgtcagcacgcccatgcccccgcccgtggacgactcctggctgcaggtgcagagcgtaccggccggacgcaggtcgcccacgtccagccccacgccgcagcgccgagcccccgccgtgcccccagcccggcccgggtcgcggggccctgctcctgggcctccgcctgctgggtccgccctggggggggcgccccccgtgccctccaggccgggggcttcccctgaccctttcggccctccccctcaggtgccctcgcgccccaaccgcgccccgcccggggtccccagaatcactatcagtgacccctgaggagcgtcagccatgccgatcgggtcaggcaagtccatcccgtcctgagagccccaggccccccttcgacctctaaacagatccctcctcttctcggagacctccctttccaagcctgcctggacggctgttctgtgacttgacagtggctcccccagccccaaagccagcccccttcatctgtgacttaatctgttgtagtggtgagctgatacattcaggtgtgaccgttggtgaaaacttgtgccccttctgtggtatgcccttgccctgttctataaatatctataaatactcatatatatacacacctacacatggccaaccgcctcgcctctagcgctgggaatcagtcactgtgctatccttgtggagtcttgtggcccaactaccagagaacgctgtcccccgacatcccactccaaagtgtgccacctccagtgagcctccttgtcatgcccggcctgtggacagccagcccccgccatccctcccaccccctaccaagcatgggggtgctgtgcaggcagccgtgtggcctgacagtttctaccagtcctgctgtccctcggctgagaataaaacccatttctggatgatggggaatgtca

SEQ ID NO: 342965 - DNA, 2679 bp, Homo sapiens
caggaatgccccttgaagagaaagggaggggcgggactagagcagggagctggagagggaggtcaggctgctatactgcaaccctaggaggcagcctctgcgccacggtttacgggaatggacccccctggagttgtgcagtgcatggcctgggcagctggatgcggcaaccctagagatagggaatggtactgaggtttggagtcaggatgaagcaaattctgggacactgggaaacgtagaattgaacaggatgggtggatgaggtcctggccttgtcctggcctgggtcagctccttaggagaacccaaggctgtggacaaagacggcactgggagagagcaggcagcctcagtgaggccgaggagcaggggagcatccctgggaagaggatctgaactcaataggggtcttgtacggagcaggggcttggtccctcgtacctctggccatacctatggagcccaggggatgcttggcagcacctgggaggtgccaaccccgggtggcaagggagggccggtcccacgctcacattgtcttctgttctctctctctctttatctgtgtcgatgtctctctctcttcccccgtgcccgtgccatcctctccacccctggattcctgtctctgcttggctttcacccacttctcctccccacccacggctgctcctcctcctgtccccacctcctccccgggtgcaggacgggcctcttcacacctgacctcgcttttgaagccacagtgaaaaagcaggtgcagaagctcaaagagcccagtatcaagtgtgtggatatggtagtcagtgagctcacagccaccatcagaaagtgtagcgaaaagctccagcagtacccgcggctacgggaggagatggagcgcatcgtgaccacccacatccgggagcgcgagggccgcactaaggagcaggtcatgcttctcatcgatatcgagctggcttacatgaacaccaaccatgaggacttcataggctttgccaatgctcagcagaggagcaaccagatgaacaagaagaagacttcagggaaccaggatgagattctggtcatccgcaagggctggctgactatcaataatattggcatcatgaaagggggctccaaggagtactggtttgtgctgactgctgagaatctgtcctggtacaaggatgatgaggagaaagagaagaaatacatgctgtctgtggacaacctcaagctgcgggacgtggagaagggctttatgtcgagcaagcatatctttgccctctttaacacggagcagaggaatgtctacaaggattatcggcagctggagctagcctgtgagacacaggaggaggtggacagctggaaggcctccttcctgagggctggcgtgtaccctgagcgtgttggggacaaagagaaagccagcgagaccgaggagaatggctccgacagcttcatgcattccatggacccacagctggaacggcaagtggagaccatccggaatcttgtggactcatacatggccattgtcaacaagaccgtgagggacctcatgcccaagaccatcatgcacctcatgattaacaataccaaggagttcatcttctcggagctgctggccaacctgtactcgtgtggggaccagaacacgctgatggaggagtcggcggagcaggcacagcggcgcgacgagatgctgcgcatgtaccacgcactgaaggaggcgctcagcatcatcggcgacatcaacacgaccaccgtcagcacgcccatgcccccgcccgtggacgactcctggctgcaggtgcagagcgtaccggccggacgcaggtcgcccacgtccagccccacgccgcagcgccgagcccccgccgtgcccccagcccggcccgggtcgcggggccctgctcctgggcctccgcctgctgggtccgccctggggggggcgccccccgtgccctccaggccgggggcttcccctgaccctttcggccctccccctcaggtgccctcgcgccccaaccgcgccccgcccggggtccccagaatcactatcagtgacccctgaggagcgtcagccatgccgatcgggtcaggcaagtccatcccgtcctgagagccccaggccccccttcgacctctaaacagatccctcctcttctcggagacctccctttccaagcctgcctggacggctgttctgtgacttgacagtggctcccccagccccaaagccagcccccttcatctgtgacttaatctgttgtagtggtgagctgatacattcaggtgtgaccgttggtgaaaacttgtgccccttctgtggtatgcccttgccctgttctataaatatctataaatactcatatatatacacacctacacatggccaaccgcctcgcctctagcgctgggaatcagtcactgtgctatccttgtggagtcttgtggcccaactaccagagaacgctgtcccccgacatcccactccaaagtgtgccacctccagtgagcctccttgtcatgcccggcctgtggacagccagcccccgccatccctcccaccccctaccaagcatgggggtgctgtgcaggcagccgtgtggcctgacagtttctaccagtcctgctgtccctcggctgagaataaaacccatttctggatgatggggaatgtca

SEQ ID NO: 342966 - DNA, 3151 bp, Homo sapiens
cgggggccccgcggcgcaggcagtctgggcgcgcggctgcagcggcggagccggaagtcggagccgggagcgctagcggcagccggatcgcagcctgcggggcccgccgcagccatgggcaaccgcggcatggaagatctcatcccgctggtcaaccggctgcaagacgccttctctgccatcggccagaacgcggacctcgacctgccgcagatcgctgtggtgggcggccagagcgccggcaagagctcggtgctcgagaatttcgtaggcagggacttcttgcctcgaggatctggcattgtcacccgacgtcccctggtcttgcagctggtcaatgcaaccacagaatatgccgagttcctgcactgcaagggaaagaaattcaccgacttcgaggaggtgcgccttgagatcgaggccgagaccgacagggtcaccggcaccaacaagggcatctcgccggtgcctatcaacctccgcgtctactcgccgcacgtgctgaacctgaccctggtggacctgcccggaatgaccaaggtcccggtgggggaccaacctcccgacatcgagttccagatccgagacatgcttatgcagtttgtcaccaaggagaactgcctcatcctggccgtgtcccccgccaactctgacctggccaattctgacgccctcaaggtcgccaaggaggtggacccccagggccagcgcaccatcggggtcatcaccaagctggacctgatggacgagggcacagatgcccgtgatgtgctggagaacaagctgctccccctgcgcagaggctacattggagtggtgaaccggagccagaaggacattgatggcaagaaggacattaccgccgccttggctgctgaacgaaagttcttcctctcccatccatcttatcgccacttggctgaccgtatgggcacgccctacctgcagaaggtcctcaatcagcaactgacgaaccacatccgggacacactgccggggctgcggaacaagctgcagagccagctactgtccattgagaaggaggtggaggaatacaagaacttccgccctgatgacccagctcgcaagaccaaggccctgctgcagatggtccagcagttcgccgtagactttgagaagcgcattgagggctcaggagatcagatcgacacctacgaactgtcagggggagcccgcattaaccgaatcttccacgagcgcttccctttcgagctggtcaagatggagtttgatgagaaggaactccgaagggagatcagctatgctatcaagaatatccatggcattagaacggggctgtttaccccagacatggcctttgagaccattgtgaaaaagcaggtgaagaagatccgagaaccgtgtctcaagtgtgtggacatggttatctcggagctaatcagcaccgttagacagtgcaccaagaagctccagcagtacccgcggctacgggaggagatggagcgcatcgtgaccacccacatccgggagcgcgagggccgcactaaggagcaggtcatgcttctcatcgatatcgagctggcttacatgaacaccaaccatgaggacttcataggctttgccaatgctcagcagaggagcaaccagatgaacaagaagaagacttcagggaaccaggatgagattctggtcatccgcaagggctggctgactatcaataatattggcatcatgaaagggggctccaaggagtactggtttgtgctgactgctgagaatctgtcctggtacaaggatgatgaggagaaagagaagaaatacatgctgtctgtggacaacctcaagctgcgggacgtggagaagggctttatgtcgagcaagcatatctttgccctctttaacacggagcagaggaatgtctacaaggattatcggcagctggagctagcctgtgagacacaggaggaggtggacagctggaaggcctccttcctgagggctggcgtgtaccctgagcgtgttggggacaaagagaaagccagcgagaccgaggagaatggctccgacagcttcatgcattccatggacccacagctggaacggcaagtggagaccatccggaatcttgtggactcatacatggccattgtcaacaagaccgtgagggacctcatgcccaagaccatcatgcacctcatgattaacaataccaaggagttcatcttctcggagctgctggccaacctgtactcgtgtggggaccagaacacgctgatggaggagtcggcggagcaggcacagcggcgcgacgagatgctgcgcatgtaccacgcactgaaggaggcgctcagcatcatcggcgacatcaacacgaccaccgtcagcacgcccatgcccccgcccgtggacgactcctggctgcaggtgcagagcgtaccggccggacgcaggtcgcccacgtccagccccacgccgcagcgccgagcccccgccgtgcccccagcccggcccgggtcgcggggccctgctcctgggcctccgcctgctgggtccgccctggggggggcgccccccgtgccctccaggccgggggcttcccctgaccctttcggccctccccctcaggtgccctcgcgccccaaccgcgccccgcccggggtccccagccgatcgggtcaggcaagtccatcccgtcctgagagccccaggccccccttcgacctctaaacagatccctcctcttctcggagacctccctttccaagcctgcctggacggctgttctgtgacttgacagtggctcccccagccccaaagccagcccccttcatctgtgacttaatctgttgtagtggtgagctgatacattcaggtgtgaccgttggtgaaaacttgtgccccttctgtggtatgcccttgccctgttctataaatatctataaatactcatatatatacacacctacacatggccaaccgcctcgcctctagcgctgggaatcagtcactgtgctatccttgtggagtcttgtggcccaactaccagagaacgctgtcccccgacatcccactccaaagtgtgccacctccagtgagccctcctttggtattgccccggccctggtgggaacaggacatgcctctctgctaattctctttcccaccgctt

SEQ ID NO: 342967 - DNA, 1740 bp, Homo sapiens
cgggggccccgcggcgcaggcagtctgggcgcgcggctgcagcggcggagccggaagtcggagccgggagcgctagcggcagccggatcgcagcctgcggggcccgccgcagccatgggcaaccgcggcatggaagatctcatcccgctggtcaaccggctgcaagacgccttctctgccatcggccagaacgcggacctcgacctgccgcagatcgctgtggtgggcggccagagcgccggcaagagctcggtgctcgagaatttcgtaggcagggacttcttgcctcgaggatctggcattgtcacccgacgtcccctggtcttgcagctggtcaatgcaaccacagaatatgccgagttcctgcactgcaagggaaagaaattcaccgacttcgaggaggtgcgccttgagatcgaggccgagaccgacagggtcaccggcaccaacaagggcatctcgccggtgcctatcaacctccgcgtctactcgccgcacgtgctgaacctgaccctggtggacctgcccggaatgaccaaggtcccggtgggggaccaacctcccgacatcgagttccagatccgagacatgcttatgcagtttgtcaccaaggagaactgcctcatcctggccgtgtcccccgccaactctgacctggccaattctgacgccctcaaggtcgccaaggaggtggacccccagggccagcgcaccatcggggtcatcaccaagctggacctgatggacgagggcacagatgcccgtgatgtgctggagaacaagctgctccccctgcgcagaggctacattggagtggtgaaccggagccagaaggacattgatggcaagaaggacattaccgccgccttggctgctgaacgaaagttcttcctctcccatccatcttatcgccacttggctgaccgtatgggcacgccctacctgcagaaggtcctcaatcagcaactgacgaaccacatccgggacacactgccggggctgcggaacaagctgcagagccagctactgtccattgagaaggaggtggaggaatacaagaacttccgccctgatgacccagctcgcaagaccaaggccctgctgcagatggtccagcagttcgccgtagactttgagaagcgcattgagggctcaggagatcagatcgacacctacgaactgtcagggggagcccgcattaaccgaatcttccacgagcgcttccctttcgagctggtcaagatggagtttgatgagaaggaactccgaagggagatcagctatgctatcaagaatatccatggcattaggacgggcctcttcacacctgacctcgcttttgaagccacagtgaaaaagcaggtgcagaagctcaaagagcccagtatcaagtgtgtggatatggtagtcagtgagctcacagccaccatcagaaagtgtagcgaaaaggtatgacggccgcctgggcggggctgggcctggccgtccattccttgtggccacagcctcccgtgggcagaaggatctgctgagccggcctcacggctacccgcagggacccagccctagtgtttcctgccacgttctaaccctgtgtacttgcactcatgacccctccaggcccccatcccagaagacttgactccaacccaagcctccttggtggcacctatgctagtgatgaagatgatgttaaggagatggcagctgtttactgagcacctactatgtgccaagcac

SEQ ID NO: 342968 - DNA, 559 bp, Homo sapiens
caaactgtaggtgaaactgaaaaataattataaaattcaaagccatatttaagaacaacagcaaatctgtagctcttacattaccaattattaagacatgctataaagctacataatgaagactgtggcatcagaacaaggatagacaaataggtaaatggaacagaagtgagagttcagagacagagctacaagataatgcagtatcttggcttacaacaaaggctacactgcaattaagcgggtgtggaggcgggagaagagtcttttccacagatggcgctagtcagttgatattcctgaggaaaaaaataaaacttgattcctatgccatacacaaaaatgattttatgatggatcataggcttaaatgttaaaactaaaacaattaaccttctagaaaaaatacaagagaaatatcttcgtgaacttgggatatgcgaagattttttaaaataatacttttaacttaagatgtgtgcactttactgtatgttaattatacttcaatagaatttcctctcccttgtcttttgttatgtgacactcttaattttct

SEQ ID NO: 342969 - DNA, 501 bp, Homo sapiens
ggaaattgaatatagagcctagaattttacctcttcaagagatggatttgttacttatattcctttggtttaggagttgtggtttttgatccttttcttcagaaaaagttagaatgtctgaaaagcctggacctctttaactgtgaggttaccaacctgaatgactaccgagagagtgtcttcaagctcctgccccagcttacctacttggatggctatgaccgagaggaccaggaagcacctgactcagatgccgaggtggatggtgtggatgaagaggaggaggacgaaggtgagtaggctcagcatctggtgaacctgatgtctgcctttcaaagcctctgataaaagctattggatgttggccgggcgcagtggcacacaactgtaatcccagcactttgggtggccgaggcagggggcattgcttgagcccaggagtttgagactagcctgggcaacatggcaataccttgtttctacagaaaatagaaaaaaaaa

SEQ ID NO: 342970 - DNA, 493 bp, Homo sapiens
  misc_feature (8)..(8): n is a, c, g, or t
  misc_feature (42)..(42): n is a, c, g, or t
  misc_feature (47)..(47): n is a, c, g, or t
gtgatggngttctagaggatccctactctgaaagacatcagnacctnggaacttgaaaaagttagaatgtctgaaaagcctggacctctttaactgtgaggttaccaacctgaatgactaccgagagagtgtcttcaagctcctgccccagcttacctacttggatggctatgaccgagaggaccaggaagcacctgactcagatgccgaggtggatggtgtggatgaagaggaggaggacgaagaaggagaagatgaggaagacgaggacgatgaggatggtgaagaagaggagtttgatgaagaagatgatgaagatgaagatgtagaaggggatgaggacgacgatgaagtcagtgaggagaataataatttgtactttattaataagattaatattatgatgaagattaatatgtataatatattttattttatttttttatattataaattgtaaattgaattatgttttttatagtttttatttagc

SEQ ID NO: 342971 - DNA, 1493 bp, Homo sapiens
gcggccgccgagccgagcagcgccgcgcggggccgagtggagccgagcagctgccgcgccgcgtcgccggtttaagcgcagtgcaggccgcggccgggggcggcggtagtgagcccagcgctgcgctccagcccccttttccctccatggtttctctccgctcccgtgagtaacttggctccgggggctccgctcgcctgcccgcacgccgcccgccacccaggaccgcgccgccggcctccgccgctagcaaacccttccgacggccctcgctgcgcaagccgggacgcctctcccccctccgcccccgccgcggaaagttaagtttgaagaggggggaagaggggaacatggacatgaagaggaggatccacctggagctgaggaaccggaccccggcagctgttcgagaacttgtcttggacaattgcaaatcaaatgatggaaaaattgagggcttaacagctgaatttgtgaacttagagttcctcagtttaataaatgtaggcttgatctcagtttcaaatctccccaagctgcctaaattgaaaaagcttgaactcagtgaaaatagaatctttggaggtctggacatgttagctgaaaaacttccaaatctcacacatctaaacttaagtggaaataaactgaaagatatcagcaccttggaacctttgaaaaagttagaatgtctgaaaagcctggacctctttaactgtgaggttaccaacctgaatgactaccgagagagtgtcttcaagctcctgccccagcttacctacttggatggctatgaccgagaggaccaggaagcacctgactcagatgccgaggtggatggtgtggatgaagaggaggaggacgaagaaggagaagatgaggaagacgaggacgatgaggatggtgaagaagaggagtttgatgaagaagatgatgaagatgaagatgtagaaggggatgaggacgacgatgaagtcagtgaggaggaagaagaatttggacttgatgaagaagatgaagatgaggatgaggatgaagaggaggaagaaggtgggaaaggtgaaaagaggaagagagaaacagatgatgaaggagaagatgattaagaccccagatgacctgcagaaacagaactgttcagtattggttggactgctcatggattttgtagctgtttaaaaaaaaaaaaaaggtagctgtgatacaaaccccaggacacccacccacccaaagagccaaagaatagttcctgtgacattccgccttccttccatgtagtccctcttggtaatctaccaccaagcttgtggacttcaccccaacaaaattgtaagcgttgttaggtttttgtgtaagattcttgctgtagcgtggatagctgtgattggtgagtcaaccgtctgtggctaccagttacactgagattgtaacagcatttttactttctgtacaacaaaaaagctttgtaaataaaatcttaacattttgggtct

SEQ ID NO: 342972 - DNA, 1403 bp, Homo sapiens
  misc_feature (3)..(3): n is a, c, g, or t
ttnctcatggacctatgctcgacagtcgcgctgcgctccagcccccttttccctccatggtttctctccgctcccgtgagtaacttggctccgggggctccgctcgcctgcccgcacgccgcccgccacccaggaccgcgccgccggcctccgccgctagcaaacccttccgacggccctcgctgcgcaagccgggacgcctctcccccctccgcccccgccgcggaaagttaagtttgaagaggggggaagaggggaacatggacatgaagaggaggatccacctggagctgaggaaccggaccccggcagctgttcgagaacttgtcttggacaattgcaaatcaaatgatggaaaaattgagggcttaacagctgaatttgtgaacttagagttcctcagtttaataaatgtaggcttgatctcagtttcaaatctccccaagctgcctaaattgaaaaagcttgaactcagtgaaaatagaatctttggaggtctggacatgttagctgaaaaacttccaaatctcacacatctaaacttaagtggaaataaactgaaagatatcagcaccttggaacctttgaaaaagttagaatgtctgaaaagcctggacctctttaactgtgaggttaccaacctgaatgactaccgagagagtgtcttcaagctcctgccccagcttacctacttggatggctatgaccgagaggaccaggaagcacctgactcagatgccgaggtggatggtgtggatgaagaggaggaggacgaagaaggagaagatgaggaagacgaggacgatgaggatggtgaagaagaggagtttgatgaagaagatgatgaagatgaagatgtagaaggggatgaggacgacgatgaagtcagtgaggaggaagaagaatttggacttgatgaagaagatgaagatgaggatgaggatgaagaggaggaagaaggtgggaaaggtgaaaagaggaagagagaaacagatgatgaaggagaagatgattaagaccccagatgacctgcagaaacagaactgttcagtattggttggactgctcatggattttgtagctgtttaaaaaaaaaaaaaaggtagctgtgatacaaaccccaggacacccacccacccaaagagccaaagaatagttcctgtgacattccgccttccttccatgtagtccctcttggtaatctaccaccaagcttgtggacttcaccccaacaaaattgtaagcgttgttaggtttttgtgtaagattcttgctgtagcgtggatagctgtgattggtgagtcaaccgtctgtggctaccagttacactgagattgtaacagcatttttactttctgtacaacaaaaaagctttgtaaataaaatcttaacattttgggtct

SEQ ID NO: 342973 - DNA, 1390 bp, Homo sapiens
tcggcggtacgcccgcagtatgggatatcgtcgaccacggcgtcgggtttctctccgctcccgtgagtaacttggctccgggggctccgctcgcctgcccgcacgccgcccgccacccaggaccgcgccgccggcctccgccgctagcaaacccttccgacggccctcgctgcgcaagccgggacgcctctcccccctccgcccccgccgcggaaagttaagtttgaagaggggggaagaggggaacatggacatgaagaggaggatccacctggagctgaggaaccggaccccggcagctgttcgagaacttgtcttggacaattgcaaatcaaatgatggaaaaattgagggcttaacagctgaatttgtgaacttagagttcctcagtttaataaatgtaggcttgatctcagtttcaaatctccccaagctgcctaaattgaaaaagcttgaactcagtgaaaatagaatctttggaggtctggacatgttagctgaaaaacttccaaatctcacacatctaaacttaagtggaaataaactgaaagatatcagcaccttggaacctttgaaaaagttagaatgtctgaaaagcctggacctctttaactgtgaggttaccaacctgaatgactaccgagagagtgtcttcaagctcctgccccagcttacctacttggatggctatgaccgagaggaccaggaagcacctgactcagatgccgaggtggatggtgtggatgaagaggaggaggacgaagaaggagaagatgaggaagacgaggacgatgaggatggtgaagaagaggagtttgatgaagaagatgatgaagatgaagatgtagaaggggatgaggacgacgatgaagtcagtgaggaggaagaagaatttggacttgatgaagaagatgaagatgaggatgaggatgaagaggaggaagaaggtgggaaaggtgaaaagaggaagagagaaacagatgatgaaggagaagatgattaagaccccagatgacctgcagaaacagaactgttcagtattggttggactgctcatggattttgtagctgtttaaaaaaaaaaaaaaggtagctgtgatacaaaccccaggacacccacccacccaaagagccaaagaatagttcctgtgacattccgccttccttccatgtagtccctcttggtaatctaccaccaagcttgtggacttcaccccaacaaaattgtaagcgttgttaggtttttgtgtaagattcttgctgtagcgtggatagctgtgattggtgagtcaaccgtctgtggctaccagttacactgagattgtaacagcatttttactttctgtacaacaaaaaagctttgtaaataaaatcttaacattttgggtct

SEQ ID NO: 342974 - DNA, 1683 bp, Homo sapiens
gcggccgccgagccgagcagcgccgcgcggggccgagtggagccgagcagctgccgcgccgcgtcgccggtttaagcgcagtgcaggccgcggccgggggcggcggtagtgagcccagcgctgcgctccagcccccttttccctccatggtttctctccgctcccgtgagtaacttggctccgggggctccgctcgcctgcccgcacgccgcccgccacccaggaccgcgccgccggcctccgccgctagcaaacccttccgacggccctcgctgcgcaagccgggacgcctctcccccctccgcccccgccgcggaaagttaagtttgaagaggggggaagaggggaacatggacatgaagaggaggatccacctggagctgaggaaccggaccccggcagctgttcgagaacttgtcttggacaattgcaaatcaaatgatggaaaaattgagggcttaacagctgaatttgtgaacttagagttcctcagtttaataaatgtaggcttgatctcagtttcaaatctccccaagctgcctaaattgaaaaagcttgaactcagtgaaaatagaatctttggaggtctggacatgttagctgaaaaacttccaaatctcacacatctaaacttaagtggaaataaactgaaagatatcagcaccttggaacctttgaaaaagttagaatgtctgaaaagcctggacctctttaactgtgaggttaccaacctgaatgactaccgagagagtgtcttcaagctcctgccccagcttacctacttggatggctatgaccgagaggaccaggaagcacctgactcagatgccgaggtggatggtgtggatgaagaggaggaggacgaagaaggagaagatgaggaagacgaggacgatgaggatggtgaagaagaggagtttgatgaagaagatgatgaagatgaagatgtagaaggggatgaggacgacgatgaagtcagtgaggaggaagaagaatttggacttgatgaagaagatgaagatgaggatgaggatgaagaggaggaagaaggtgggaaaggtgaaaagaggaagagagaaacagatgatgaaggagaagatgattaagaccccagatgacctgcagaaacagaactgttcagtattggttggactgctcatggattttgtagctgtttaaaaaaaaaaaaaaggtagctgtgatacaaaccccaggacacccacccacccaaagagccaaagaatagttcctgtgacattccgccttccttccatgtagtccctcttggtaatctaccaccaagcttgtggacttcaccccaacaaaattgtaagcgttgttaggtttttgtgtaagattcttgctgtagcgtggatagctgtgattggtgagtcaaccgtctgtggctaccagttacactgagattgtaacagcatttttactttctgtacaacaaaaaagctttgtaaataaaatcttaacattttgggtctagaagagagcattactgaatgggagaacttttgttagctgaaaatttgcctgttaccatttatatgaaaaaagcttaattcgttttttatagaattagcccattatattcttgaccatctcatcctttgttagcagaggggaacgctttccaaaagttgccggtatttttcgcgtcctcattcccgataa

SEQ ID NO: 342975 - DNA, 1565 bp, Homo sapiens
gcggccgccgagccgagcagcgccgcgcggggccgagtggagccgagcagctgccgcgccgcgtcgccggtttaagcgcagtgcaggccgcggccgggggcggcggtagtgagcccagcgctgcgctccagcccccttttccctccatggtttctctccgctcccgtgagtaacttggctccgggggctccgctcgcctgcccgcacgccgcccgccacccaggaccgcgccgccggcctccgccgctagcaaacccttccgacggccctcgctgcgcaagccgggacgcctctcccccctccgcccccgccgcggaaagttaagtttgaagaggggggaagaggggaacatggacatgaagaggaggatccacctggagctgaggaaccggaccccggcagctgttcgagaacttgtcttggacaattgcaaatcaaatgatggaaaaattgagggcttaacagctgaatttgtgaacttagagttcctcagtttaataaatgtaggcttgatctcagtttcaaatctccccaagctgcctaaattgaaaaagcttgaactcagtgaaaatagaatctttggaggtctggacatgttagctgaaaaacttccaaatctcacacatctaaacttaagtggaaataaactgaaagatatcagcaccttggaacctttgaaaaagttagaatgtctgaaaagcctggacctctttaactgtgaggttaccaacctgaatgactaccgagagagtgtcttcaagctcctgccccagcttacctacttggatggctatgaccgagaggaccaggaagcacctgactcagatgccgaggtggatggtgtggatgaagaggaggaggacgaagaaggagaagatgaggaagacgaggacgatgaggatggtgaagaagaggagtttgatgaagaagatgatgaagatgaagatgtagaaggggatgaggacgacgatgaagtcagtgaggaggaagaagaatttggacttgatgaagaagatgaagatgaggatgaggatgaagaggaggaagaaggtgggaaaggtgaaaagaggaagagagaaacagatgatgaaggagaagatgattaagaccccagatgacctgcagaaacagaactgttcagtattggttggactgctcatggattttgtagctgtttaaaaaaaaaaaaaaggtagctgtgatacaaaccccaggacacccacccacccaaagagccaaagaatagttcctgtgacattccgccttccttccatgtagtccctcttggtaatctaccaccaagcttgtggacttcaccctaacaacgcttacaattttgttggggtgaagtccacaagcttggtggtagattaccaagagggactacaccccaacaaaattgtaagcgttgttaggtttttgtgtaagattcttgctgtagcgtggatagctgtgattggtgagtcaaccgtctgtggctaccagttacactgagattgtaacagcatttttactttctgtacaacaaaaaagctttgtaaataaaatcttaacattttgggtct

SEQ ID NO: 342976 - DNA, 1306 bp, Homo sapiens
gcggccgccgagccgagcagcgccgcgcggggccgagtggagccgagcagctgccgcgccgcgtcgccggtttaagcgcagtgcaggccgcggccgggggcggcggtagtgagcccagcgctgcgctccagcccccttttccctccatggtttctctccgctcccgtgagtaacttggctccgggggctccgctcgcctgcccgcacgccgcccgccacccaggaccgcgccgccggcctccgccgctagcaaacccttccgacggccctcgctgcgcaagccgggacgcctctcccccctccgcccccgccgcggaaagttaagtttgaagaggggggaagaggggaacatggacatgaagaggaggatccacctggagctgaggaaccggaccccggcagctgttcgagaacttgtcttggacaattgcaaatcaaatgatggaaaaattgagggcttaacagctgaatttgtgaacttagagttcctcagtttaataaatgtaggcttgatctcagtttcaaatctccccaagctgcctaaattgaaaaagcttgaactcagtgaaaatagaatctttggaggtctggacatgttagctgaaaaacttccaaatctcacacatctaaacttaagtggaaataaactgaaagatatcagcaccttggaacctttgaaaaagttagaatgtctgaaaagcctggacctctttaactgtgaggttaccaacctgaatgactaccgagagagtgtcttcaagctcctgccccagcttacctacttggatggctatgaccgagaggaccaggaagcacctgactcagatgccgaggtggatggtgtggatgaagaggaggaggacgaagaaggagaagatgaggaagacgaggacgatgaggatggtgaagaagaggagtttgatgaagaagatgatgaagatgaagatgtagaaggggatgaggacgacgatgaagtcagtgaggaggaagaagaatttggacttgatgaagaagatgaagatgaggatgaggatgaagaggaggaagaaggtgggaaaggtgaaaagaggaagagagaaacagatgatgaaggagaagatgattaagaccccagatgacctgcagaaacagaactgttcagtattggttggactgctcatggattttgtagctgtttaaaaaaaagaatgatctcaatgtaatgcttcatgtcgcgcgcttctaccacagtgactttagactaaagcattctattcatgcggccgtaattcaaagttacttgcccattcgcctaaagtaagcatgt

SEQ ID NO: 342977 - DNA, 2689 bp, Homo sapiens
gcggccgccgagccgagcagcgccgcgcggggccgagtggagccgagcagctgccgcgccgcgtcgccggtttaagcgcagtgcaggccgcggccgggggcggcggtagtgagcccagcgctgcgctccagcccccttttccctccatggtttctctccgctcccgtgagtaacttggctccgggggctccgctcgcctgcccgcacgccgcccgccacccaggaccgcgccgccggcctccgccgctagcaaacccttccgacggccctcgctgcgcaagccgggacgcctctcccccctccgcccccgccgcggaaagttaagtttgaagaggggggaagaggggaacatggacatgaagaggaggatccacctggagctgaggaaccggaccccggcagctgttcgagaacttgtcttggacaattgcaaatcaaatgatggaaaaattgagggcttaacagctgaatttgtgaacttagagttcctcagtttaataaatgtaggcttgatctcagtttcaaatctccccaagctgcctaaattgaaaaagcttgaactcagtgaaaatagaatctttggaggtctggacatgttagctgaaaaacttccaaatctcacacatctaaacttaagtggaaataaactgaaagatatcagcaccttggaacctttgaaaaagttagaatgtctgaaaagcctggacctctttaactgtgaggttaccaacctgaatgactaccgagagagtgtcttcaagctcctgccccagcttacctacttggatggctatgaccgagaggaccaggaagcacctgactcagatgccgaggtggatggtgtggatgaagaggaggaggacgaagaaggagaagatgaggaagacgaggacgatgaggatggtgaagaagaggagtttgatgaagaagatgatgaagatgaagatgtagaaggggatgaggacgacgatgaagtcagtgaggaggaagagagaaacagatgatgaaggagaagatgattaagaccccagatgacctgcagaaacagaactgttcagtattggttggactgctcatggattttgtagctgtttaaaaaaaaaaaaaaggtagctgtgatacaaaccccaggacacccacccacccaaagagccaaagaatagttcctgtgacattccgccttccttccatgtagtccctcttggtaatctaccaccaagcttgtggacttcaccccaacaaaattgtaagcgttgttaggtttttgtgtaagattcttgctgtagcgtggatagctgtgattggtgagtcaaccgtctgtggctaccagttacactgagattgtaacagcatttttactttctgtacaacaaaaaagctttgtaaataaaatcttaacattttgggtctgttttttcatgctttgctttttaattattattattattttttttacattaggacattttatgtgacaactgccaaaaaagtatttttaagaatttaagcgaaataaacagttactctttggtaaagcctagttgtatgcttacatttttaaattatactctcattgtaagctcatgttaaaacaccaaagaactggtttatttggcatttttatattagtagttgttgaggggaattgcacaagtgtgtaggatctttgagcatttagatcaaatcctcattgataactgggagtaaatgaagcatactttaaaaaataacgttcaaaatggaatactctggggccctgaaaaccagtaaaatgttaggttcaagtattatgtgaattaagggaaagaagatagtgtaaagcaaaaggccttcaccagaatcccaagagatctgaattctagttctggctctgcccctgattttctgtgtgaccttgtgttgactctgggtcaccacccagtctggaaaattgaaggggtgtgaccaaatggcttctgaagtcacttgtagcactgatgttctgtgacccttgctgacaggaaggtctgaagagaaaaatgggctttccactagtctgaagcatgtagggtttgactgatgggtgaacacagtatggtttgttgccaagacaggcgtgaaaagggggaatgacatgtgaaaagcctcaccaagcagtgggtaggcactgcctgaggtcaactcaggttttccataagatggaaattttctctattcttacagatcttaaagggatttgagaaaggaggatattctgtctgtattcagtgattaaccgtttagcgaaaatagatgtatgactgcattatcaatacagttttttatagtggaagatttaaggattgtttcagtaaattttagcttatagctgctggaatgagtgaggtttttgatgcatgtaaatgcaatatgtaaaattggaatctaatttgaatttataacaagtcacagtctctatggagcccccaaatactgtactttaaaatcaaaatctcccatagactttaaaatggagtttcttttttgcaaagaaaatccaagaaaatttgatttctgattttacaggtattacacatcattttccccaaccataaggccattttggcaaaccttcaatacattgtaaaatggtttcttctgtagcctaagtgtgtccttaaggttttgcttatttgtcaaatatcaaacacagtaactttgagtgattatt

SEQ ID NO: 342978 - DNA, 1410 bp, Homo sapiens
gcggccgccgagccgagcagcgccgcgcggggccgagtggagccgagcagctgccgcgccgcgtcgccggtttaagcgcagtgcaggccgcggccgggggcggcggtagtgagcccagcgctgcgctccagcccccttttccctccatggtttctctccgctcccgtgagtaacttggctccgggggctccgctcgcctgcccgcacgccgcccgccacccaggaccgcgccgccggcctccgccgctagcaaacccttccgacggccctcgctgcgcaagccgggacgcctctcccccctccgcccccgccgcggaaagttaagtttgaagaggggggaagaggggaacatggacatgaagaggaggatccacctggagctgaggaaccggaccccggcagctgttcgagaacttgtcttggacaattgcaaatcaaatgatggaaaaattgagggcttaacagctgaatttgtgaacttagagttcctcagtttaataaatgtaggcttgatctcagtttcaaatctccccaagctgcctaaattgaaaaagcttgaactcagtgaaaatagaatctttggaggtctggacatgttagctgaaaaacttccaaatctcacacatctaaacttaagtggaaataaactgaaagatatcagcaccttggaacctttgaaaaagttagaatgtctgaaaagcctggacctctttaactgtgaggttaccaacctgaatgactaccgagagagtgtcttcaagctcctgccccagcttacctacttggatggctatgaccgagaggaccaggaagcacctgactcagatgccgaggtggatggtgtggatgaagaggaggaggacgaagaaggagaagatgaggaagacgaggacgatgaggatggtgaagaagaggagtttgatgaagaagatgatgaagatgaagatgtagaaggggatgaggacgacgatgaagtcagtgaggaggaagagagaaacagatgatgaaggagaagatgattaagaccccagatgacctgcagaaacagaactgttcagtattggttggactgctcatggattttgtagctgtttaaaaaaaaaaaaaaggtagctgtgatacaaaccccaggacacccacccacccaaagagccaaagaatagttcctgtgacattccgccttccttccatgtagtccctcttggtaatctaccaccaagcttgtggacttcaccccaacaaaattgtaagcgttgttaggtttttgtgtaagattcttgctgtagcgtggatagctgtgattggtgagtcaaccgtctgtggctaccagttacactgagattgtaacagcatttttactttctgtacaacaaaaaagctttgtaaataaaatcttaacattttgggtct

SEQ ID NO: 342979 - DNA, 1115 bp, Homo sapiens
gcggccgccgagccgagcagcgccgcgcggggccgagtggagccgagcagctgccgcgccgcgtcgccggtttaagcgcagtgcaggccgcggccgggggcggcggtagtgagcccagcgctgcgctccagcccccttttccctccatggtttctctccgctcccgtgagtaacttggctccgggggctccgctcgcctgcccgcacgccgcccgccacccaggaccgcgccgccggcctccgccgctagcaaacccttccgacggccctcgctgcgcaagccgggacgcctctcccccctccgcccccgccgcggaaagttaagtttgaagaggggggaagaggggaacatggacatgaagaggaggatccacctggagctgaggaaccggaccccggcagctgttcgagaacttgtcttggacaattgcaaatcaaatgatggaaaaattgagggcttaacagctgaatttgtgaacttagagttcctcagtttaataaatgtaggcttgatctcagtttcaaatctccccaagctgcctaaattgaaaaagcttgaactcagtgaaaatagaatctttggaggtctggacatgttagctgaaaaacttccaaatctcacacatctaaacttaagtggaaataaactgaaagatatcagcaccttggaacctttgaaaaagttagaatgtctgaaaagcctggacctctttaactgtgaggttaccaacctgaatgactaccgagagagtgtcttcaagctcctgccccagcttacctacttggatggctatgaccgagaggaccaggaagcacctgactcagatgccgaggtggatggtgtggatgaagaggaggaggacgaagaaggagaagatgaggaagacgaggacgatgaggatggtgaagaagaggagtttgatgaagaagatgatgaagatgaagatgtagaaggggatgaggacgacgatgaagtcagtgaggagaataataatttgtactttattaataagattaatattatgatgaagattaatatgtataatatattttattttatttttttatattataaattgtaaattgaattatgttttttatagtttttatttagc

SEQ ID NO: 342980 - DNA, 1355 bp, Homo sapiens
  misc_feature (6)..(8): n is a, c, g, or t
aaatannngtaggtagaggctggtgttaatcggccgaggggtccgggggctccgctcgcctgcccgcacgccgcccgccacccaggaccgcgccgccggcctccgccgctagcaaacccttccgacggccctcgctgcgcaagccgggacgcctctcccccctccgcccccgccgcggaaagttaagtttgaagaggggggaagaggggaacatggacatgaagaggaggatccacctggagctgaggaaccggaccccggcagctgttcgagaacttgtcttggacaattgcaaatcaaatgatggaaaaattgagggcttaacagctgaatttgtgaacttagagttcctcagtttaataaatgtaggcttgatctcagtttcaaatctccccaagctgcctaaattgaaaaagcttgaactcagtgaaaatagaatctttggaggtctggacatgttagctgaaaaacttccaaatctcacacatctaaacttaagtggaaataaactgaaagatatcagcaccttggaacctttgaaaaagttagaatgtctgaaaagcctggacctctttaactgtgaggttaccaacctgaatgactaccgagagagtgtcttcaagctcctgccccagcttacctacttggatggctatgaccgagaggaccaggaagcacctgactcagatgccgaggtggatggtgtggatgaagaggaggaggacgaagaaggagaagatgaggaagacgaggacgatgaggatggtgaagaagaggagtttgatgaagaagatgatgaagatgaagatgtagaaggggatgaggacgacgatgaagtcagtgaggaggaagaagaatttggacttgatgaagaagatgaagatgaggatgaggatgaagaggaggaagaaggtgggaaaggtgaaaagaggaagagagaaacagatgatgaaggagaagatgattaagaccccagatgacctgcagaaacagaactgttcagtattggttggactgctcatggattttgtagctgtttaaaaaaaaaaaaaaggtagctgtgatacaaaccccaggacacccacccacccaaagagccaaagaatagttcctgtgacattccgccttccttccatgtagtccctcttggtaatctaccaccaagcttgtggacttcaccccaacaaaattgtaagcgttgttaggtttttgtgtaagattcttgctgtagcgtggatagctgtgattggtgagtcaaccgtctgtggctaccagttacactgagattgtaacagcatttttactttctgtacaacaaaaaagctttgtaaataaaatcttaacattttgggtct

SEQ ID NO: 342981 - DNA, 1279 bp, Homo sapiens
gcggccgccgagccgagcagcgccgcgcggggccgagtggagccgagcagctgccgcgccgcgtcgccggtttaagcgcagtgcaggccgcggccgggggcggcggtagtgagcccagcgctgcgctccagcccccttttccctccatggtttctctccgctcccgtgagtaacttggctccgggggctccgctcgcctgcccgcacgccgcccgccacccaggaccgcgccgccggcctccgccgctagcaaacccttccgacggccctcgctgcgcaagccgggacgcctctcccccctccgcccccgccgcggaaagttaagtttgaagaggggggaagaggggaacatggacatgaagaggaggatccacctggagctgaggaaccggaccccggcagctgttcgagaacttgtcttggacaattgcaaatcaaatgatggaaaaattgagggcttaacagctgaatttgtgaacttagagttcctcagtttaataaatgtaggcttgatctcagtttcaaatctccccaagctgcctaaattgaaaaagcttgaactcagtgaaaatagaatctttggaggtctggacatgttagctgaaaaacttccaaatctcacacatctaaacttaagtggaaataaactgaaagatatcagcaccttggaacctttgaaaaagttagaatgtctgaaaagcctggacctctttaactgtgaggttaccaacctgaatgactaccgagagagtgtcttcaagctcctgccccagcttacctacttggatggctatgaccgagaggaccaggaagcacctgactcagatgccgaggtggatggtgtggatgaagaggaggaggacgaagaaggagaagatgaggaagacgaggacgatgaggatggtgaagaagaggagtttgatgaagaagcgaaagccaagactatgatgaagaatgctcagaagaagatgaatcggttggggaagaaaaggggaggcggatagacacgtgtttgatatgaagcccaagcacttgctgtctgggaagaggaaagctggtaaaaaggacaggagatagtatccgtttggttggcgtggcttcgctagagtgttgctgtatatttcctggttttggcacagtatggtttcatgaacattggagctctgtataaactgacaaaagacaaaataagtaaagcacttgttgctttgctgaaaaactatggttaaccctatataggtgtgggacaatcttgtcactgcataatattaccaaacat

SEQ ID NO: 342982 - DNA, 1234 bp, Homo sapiens
  misc_feature (65)..(65): n is a, c, g, or t
tccagtcggtcccagtttacggaactctcccctgagctcgcccgtcacaaagagcttcaacaggngagagtgttagacggaagaggggaacatggacatgaagaggaggatccacctggagctgaggaaccggaccccggcagctgttcgagaacttgtcttggacaattgcaaatcaaatgatggaaaaattgagggcttaacagctgaatttgtgaacttagagttcctcagtttaataaatgtaggcttgatctcagtttcaaatctccccaagctgcctaaattgaaaaagcttgaactcagtgaaaatagaatctttggaggtctggacatgttagctgaaaaacttccaaatctcacacatctaaacttaagtggaaataaactgaaagatatcagcaccttggaacctttgaaaaagttagaatgtctgaaaagcctggacctctttaactgtgaggttaccaacctgaatgactaccgagagagtgtcttcaagctcctgccccagcttacctacttggatggctatgaccgagaggaccaggaagcacctgactcagatgccgaggtggatggtgtggatgaagaggaggaggacgaagaaggagaagatgaggaagacgaggacgatgaggatggtgaagaagaggagtttgatgaagaagatgatgaagatgaagatgtagaaggggatgaggacgacgatgaagtcagtgaggaggaagaagaatttggacttgatgaagaagatgaagatgaggatgaggatgaagaggaggaagaaggtgggaaaggtgaaaagaggaagagagaaacagatgatgaaggagaagatgattaagaccccagatgacctgcagaaacagaactgttcagtattggttggactgctcatggattttgtagctgtttaaaaaaaaaaaaaaggtagctgtgatacaaaccccaggacacccacccacccaaagagccaaagaatagttcctgtgacattccgccttccttccatgtagtccctcttggtaatctaccaccaagcttgtggacttcaccccaacaaaattgtaagcgttgttaggtttttgtgtaagattcttgctgtagcgtggatagctgtgattggtgagtcaaccgtctgtggctaccagttacactgagattgtaacagcatttttactttctgtacaacaaaaaagctttgtaaataaaatcttaacattttgggtct

SEQ ID NO: 342983 - DNA, 1381 bp, Homo sapiens
agtgcaattgaataatgtcaagtcgcttatcaaaatagaggttgatagagaacagcatactgccctttcaagatcgtgaacttcctcatagaatttggctttctatctgtgcacattttaacttgcaggtttttgagagcattcactcgtcttttaactaccctaggcaggctttcaatgtatcctgttggtgtttctaccagaccatcaagtctatcttggataatgtgatagccgctgatccgcttaagggaggatccacctggagctgaggaaccggaccccggcagctgttcgagaacttgtcttggacaattgcaaatcaaatgatggaaaaattgagggcttaacagctgaatttgtgaacttagagttcctcagtttaataaatgtaggcttgatctcagtttcaaatctccccaagctgcctaaattgaaaaagcttgaactcagtgaaaatagaatctttggaggtctggacatgttagctgaaaaacttccaaatctcacacatctaaacttaagtggaaataaactgaaagatatcagcaccttggaacctttgaaaaagttagaatgtctgaaaagcctggacctctttaactgtgaggttaccaacctgaatgactaccgagagagtgtcttcaagctcctgccccagcttacctacttggatggctatgaccgagaggaccaggaagcacctgactcagatgccgaggtggatggtgtggatgaagaggaggaggacgaagaaggagaagatgaggaagacgaggacgatgaggatggtgaagaagaggagtttgatgaagaagatgatgaagatgaagatgtagaaggggatgaggacgacgatgaagtcagtgaggaggaagaagaatttggacttgatgaagaagatgaagatgaggatgaggatgaagaggaggaagaaggtgggaaaggtgaaaagaggaagagagaaacagatgatgaaggagaagatgattaagaccccagatgacctgcagaaacagaactgttcagtattggttggactgctcatggattttgtagctgtttaaaaaaaaaaaaaaggtagctgtgatacaaaccccaggacacccacccacccaaagagccaaagaatagttcctgtgacattccgccttccttccatgtagtccctcttggtaatctaccaccaagcttgtggacttcaccccaacaaaattgtaagcgttgttaggtttttgtgtaagattcttgctgtagcgtggatagctgtgattggtgagtcaaccgtctgtggctaccagttacactgagattgtaacagcatttttactttctgtacaacaaaaaagctttgtaaataaaatcttaacattttgggtct

SEQ ID NO: 342984 - DNA, 1076 bp, Homo sapiens
gcggccgccgagccgagcagcgccgcgcggggccgagtggagccgagcagctgccgcgccgcgtcgccggtttaagcgcagtgcaggccgcggccgggggcggcggtagtgagcccagcgctgcgctccagcccccttttccctccatggtttctctccgctcccgtgagtaacttggctccgggggctccgctcgcctgcccgcacgccgcccgccacccaggaccgcgccgccggcctccgccgctagcaaacccttccgacggccctcgctgcgcaagccgggacgcctctcccccctccgcccccgccgcggaaagttaagtttgaagaggggggaagaggggaacatggacatgaagaggaggatccacctggagctgaggaaccggaccccggcagctgttcgagaacttgtcttggacaattgcaaatcaaatgatggaaaaattgagggcttaacagctgaatttgtgaacttagagttcctcagtttaataaatgtaggcttgatctcagtttcaaatctccccaagctgcctaaattgaaaaagcttgaactcagtgaaaatagaatctttggaggtctggacatgttagctgaaaaacttccaaatctcacacatctaaacttaagtggaaataaactgaaagatatcagcaccttggaacctttgaaaaagttagaatgtctgaaaagcctggacctctttaactgtgaggttaccaacctgaatgactaccgagagagtgtcttcaagctcctgccccagcttacctacttggatggctatgaccgagaggaccaggaagcacctgactcagatgccgaggtggatggtgtggatgaagaggaggaggacgaaggtgagtaggctcagcatctggtgaacctgatgtctgcctttcaaagcctctgataaaagctattggatgttggccgggcgcagtggcacacaactgtaatcccagcactttgggtggccgaggcagggggcattgcttgagcccaggagtttgagactagcctgggcaacatggcaataccttgtttctacagaaaatagaaaaaaaaa

SEQ ID NO: 342985 - DNA, 889 bp, Homo sapiens
gcggccgcctactactactaaattcgcggccgcgtcgactaaactgaaagatatcagcaccttggaacctttgaaaaagttagaatgtctgaaaagcctggacctctttaactgtgaggttaccaacctgaatgactaccgagagagtgtcttcaagctcctgccccagcttacctacttggatggctatgaccgagaggaccaggaagcacctgactcagatgccgaggtggatggtgtggatgaagaggaggaggacgaagaaggagaagatgaggaagacgaggacgatgaggatggtgaagaagaggagtttgatgaagaagatgatgaagatgaagatgtagaaggggatgaggacgacgatgaagtcagtgaggaggaagaagaatttggacttgatgaagaagatgaagatgaggatgaggatgaagaggaggaagaaggtgggaaaggtgaaaagaggaagagagaaacagatgatgaaggagaagatgattaagaccccagatgacctgcagaaacagaactgttcagtattggttggactgctcatggattttgtagctgtttaaaaaaaaaaaaaaggtagctgtgatacaaaccccaggacacccacccacccaaagagccaaagaatagttcctgtgacattccgccttccttccatgtagtccctcttggtaatctaccaccaagcttgtggacttcaccccaacaaaattgtaagcgttgttaggtttttgtgtaagattcttgctgtagcgtggatagctgtgattggtgagtcaaccgtctgtggctaccagttacactgagattgtaacagcatttttactttctgtacaacaaaaaagctttgtaaataaaatcttaacattttgggtct

SEQ ID NO: 342986 - DNA, 978 bp, Homo sapiens
atcgagctcggtcccccggaagttgcccaattgaaaaagcttgaactcagtgaaaatagaatctttggaggtctggacatgttagctgaaaaacttccaaatctcacacatctaaacttaagtggaaataaactgaaagatatcagcaccttggaacctttgaaaaagttagaatgtctgaaaagcctggacctctttaactgtgaggttaccaacctgaatgactaccgagagagtgtcttcaagctcctgccccagcttacctacttggatggctatgaccgagaggaccaggaagcacctgactcagatgccgaggtggatggtgtggatgaagaggaggaggacgaagaaggagaagatgaggaagacgaggacgatgaggatggtgaagaagaggagtttgatgaagaagatgatgaagatgaagatgtagaaggggatgaggacgacgatgaagtcagtgaggaggaagaagaatttggacttgatgaagaagatgaagatgaggatgaggatgaagaggaggaagaaggtgggaaaggtgaaaagaggaagagagaaacagatgatgaaggagaagatgattaagaccccagatgacctgcagaaacagaactgttcagtattggttggactgctcatggattttgtagctgtttaaaaaaaaaaaaaaggtagctgtgatacaaaccccaggacacccacccacccaaagagccaaagaatagttcctgtgacattccgccttccttccatgtagtccctcttggtaatctaccaccaagcttgtggacttcaccccaacaaaattgtaagcgttgttaggtttttgtgtaagattcttgctgtagcgtggatagctgtgattggtgagtcaaccgtctgtggctaccagttacactgagattgtaacagcatttttactttctgtacaacaaaaaagctttgtaaataaaatcttaacattttgggtct

SEQ ID NO: 342987 - DNA, 967 bp, Homo sapiens
cggacgcgtgggtcgacccacgcgtccgcttgaactcagtgaaaatagaatctttggaggtctggacatgttagctgaaaaacttccaaatctcacacatctaaacttaagtggaaataaactgaaagatatcagcaccttggaacctttgaaaaagttagaatgtctgaaaagcctggacctctttaactgtgaggttaccaacctgaatgactaccgagagagtgtcttcaagctcctgccccagcttacctacttggatggctatgaccgagaggaccaggaagcacctgactcagatgccgaggtggatggtgtggatgaagaggaggaggacgaagaaggagaagatgaggaagacgaggacgatgaggatggtgaagaagaggagtttgatgaagaagatgatgaagatgaagatgtagaaggggatgaggacgacgatgaagtcagtgaggaggaagaagaatttggacttgatgaagaagatgaagatgaggatgaggatgaagaggaggaagaaggtgggaaaggtgaaaagaggaagagagaaacagatgatgaaggagaagatgattaagaccccagatgacctgcagaaacagaactgttcagtattggttggactgctcatggattttgtagctgtttaaaaaaaaaaaaaaggtagctgtgatacaaaccccaggacacccacccacccaaagagccaaagaatagttcctgtgacattccgccttccttccatgtagtccctcttggtaatctaccaccaagcttgtggacttcaccccaacaaaattgtaagcgttgttaggtttttgtgtaagattcttgctgtagcgtggatagctgtgattggtgagtcaaccgtctgtggctaccagttacactgagattgtaacagcatttttactttctgtacaacaaaaaagctttgtaaataaaatcttaacattttgggtct

SEQ ID NO: 342988 - DNA, 918 bp, Homo sapiens
ggaaattgaatatagagcctagaattttacctcttcaagagatggatttgttacttatattcctttggtttaggagttgtggtttttgatccttttcttcagaaaaagttagaatgtctgaaaagcctggacctctttaactgtgaggttaccaacctgaatgactaccgagagagtgtcttcaagctcctgccccagcttacctacttggatggctatgaccgagaggaccaggaagcacctgactcagatgccgaggtggatggtgtggatgaagaggaggaggacgaagaaggagaagatgaggaagacgaggacgatgaggatggtgaagaagaggagtttgatgaagaagatgatgaagatgaagatgtagaaggggatgaggacgacgatgaagtcagtgaggaggaagaagaatttggacttgatgaagaagatgaagatgaggatgaggatgaagaggaggaagaaggtgggaaaggtgaaaagaggaagagagaaacagatgatgaaggagaagatgattaagaccccagatgacctgcagaaacagaactgttcagtattggttggactgctcatggattttgtagctgtttaaaaaaaaaaaaaaggtagctgtgatacaaaccccaggacacccacccacccaaagagccaaagaatagttcctgtgacattccgccttccttccatgtagtccctcttggtaatctaccaccaagcttgtggacttcaccccaacaaaattgtaagcgttgttaggtttttgtgtaagattcttgctgtagcgtggatagctgtgattggtgagtcaaccgtctgtggctaccagttacactgagattgtaacagcatttttactttctgtacaacaaaaaagctttgtaaataaaatcttaacattttgggtct

SEQ ID NO: 342989 - DNA, 858 bp, Homo sapiens
  misc_feature (35)..(35): n is a, c, g, or t
  misc_feature (37)..(37): n is a, c, g, or t
gtgatcgatctgagaggatcccctcagcacttggnanctttgaaaaagttagaatgtctgaaaagcctggacctctttaactgtgaggttaccaacctgaatgactaccgagagagtgtcttcaagctcctgccccagcttacctacttggatggctatgaccgagaggaccaggaagcacctgactcagatgccgaggtggatggtgtggatgaagaggaggaggacgaagaaggagaagatgaggaagacgaggacgatgaggatggtgaagaagaggagtttgatgaagaagatgatgaagatgaagatgtagaaggggatgaggacgacgatgaagtcagtgaggaggaagaagaatttggacttgatgaagaagatgaagatgaggatgaggatgaagaggaggaagaaggtgggaaaggtgaaaagaggaagagagaaacagatgatgaaggagaagatgattaagaccccagatgacctgcagaaacagaactgttcagtattggttggactgctcatggattttgtagctgtttaaaaaaaaaaaaaaggtagctgtgatacaaaccccaggacacccacccacccaaagagccaaagaatagttcctgtgacattccgccttccttccatgtagtccctcttggtaatctaccaccaagcttgtggacttcaccccaacaaaattgtaagcgttgttaggtttttgtgtaagattcttgctgtagcgtggatagctgtgattggtgagtcaaccgtctgtggctaccagttacactgagattgtaacagcatttttactttctgtacaacaaaaaagctttgtaaataaaatcttaacattttgggtct

SEQ ID NO: 342990 - DNA, 1203 bp, Homo sapiens
tgacaaccttacaggctaggtacgaggcctgggttgtggagccgagcagctgccgcgccgcgtcgccggtttaagcgcagtgcaggccgcggccgggggcggcggtagtgagcccagttaccaacctgaatgactactgaggaaccggaccccggcagctgttcgagaacttgtcttggacaattgcaaatcaaatgatggaaaaattgagggcttaacagctgaatttgtgaacttagagttcctcagtttaataaatgtaggcttgatctcagtttcaaatctccccaagctgcctaaattgaaaaagcttgaactcagtgaaaatagaatctttggaggtctggacatgttagctgaaaaacttccaaatctcacacatctaaacttaagtggaaataaactgaaagatatcagcaccttggaacctttgaaaaagttagaatgtctgaaaagcctggacctctttaactgtgaggttaccaacctgaatgactaccgagagagtgtcttgaccaggaagcacctgactcagatgccgaggtggatggtgtggatgaagaggaggaggacgaagaaggagaagatgaggaagacgaggacgatgaggatggtgaagaagaggagtttgatgaagaagatgatgaagatgaagatgtagaaggggatgaggacgacgatgaagtcagtgaggaggaagaagaatttggacttgatgaagaagatgaagatgaggatgaggatgaagaggaggaagaaggtgggaaaggtgaaaagaggaagagagaaacagatgatgaaggagaagatgattaagaccccagatgacctgcagaaacagaactgttcagtattggttggactgctcatggattttgtagctgtttaaaaaaaaaaaaaaggtagctgtgatacaaaccccaggacacccacccacccaaagagccaaagaatagttcctgtgacattccgccttccttccatgtagtccctcttggtaatctaccaccaagcttgtggacttcaccccaacaaaattgtaagcgttgttaggtttttgtgtaagattcttgctgtagcgtggatagctgtgattggtgagtcaaccgtctgtggctaccagttacactgagattgtaacagcatttttactttctgtacaacaaaaaagctttgtaaataaaatcttaacattttgggtct

SEQ ID NO: 342991 - DNA, 791 bp, Homo sapiens
ccacgcgtcggccgaggtggatggtgtggatgaagaggaactctaagttcacaaattcagctgttaagccctcaatttttccatcatttgatttgcaattgtccaagacaagttctcgatcagatgccgaggtggatggtgtggatgaagaggaggaggacgaagaaggagaagatgaggaagacgaggacgatgaggatggtgaagaagaggagtttgatgaagaagatgatgaagatgaagatgtagaaggggatgaggacgacgatgaagtcagtgaggaggaagaagaatttggacttgatgaagaagatgaagatgaggatgaggatgaagaggaggaagaaggtgggaaaggtgaaaagaggaagagagaaacagatgatgaaggagaagatgattaagaccccagatgacctgcagaaacagaactgttcagtattggttggactgctcatggattttgtagctgtttaaaaaaaaaaaaaaggtagctgtgatacaaaccccaggacacccacccacccaaagagccaaagaatagttcctgtgacattccgccttccttccatgtagtccctcttggtaatctaccaccaagcttgtggacttcaccccaacaaaattgtaagcgttgttaggtttttgtgtaagattcttgctgtagcgtggatagctgtgattggtgagtcaaccgtctgtggctaccagttacactgagattgtaacagcatttttactttctgtacaacaaaaaagctttgtaaataaaatcttaacattttgggtct

SEQ ID NO: 342992 - DNA, 947 bp, Homo sapiens
ggtcatagctgatcttattttattcctgcatacccttaccttcttccccactccatataattttgaagcaaatcttagccattgtatcatttcatcagcgagaattatagtgtttgtcttatctaccaggacttctagctctctgattttatgggactctatcggacaaagggactgagctgtagcacatagtagaaagaaagtgactgcagttcgtggccttacagcatttgttctgtgagccagcccacagatcctcaacactttgtcccctgtggagcgtcgaggatatttaatgaatcccttttggactatttttagaaggagaagatgaggaagacgaggacgatgaggatggtgaagaagaggagtttgatgaagaagatgatgaagatgaagatgtagaaggggatgaggacgacgatgaagtcagtgaggaggaagaagaatttggacttgatgaagaagatgaagatgaggatgaggatgaagaggaggaagaaggtgggaaaggtgaaaagaggaagagagaaacagatgatgaaggagaagatgattaagaccccagatgacctgcagaaacagaactgttcagtattggttggactgctcatggattttgtagctgtttaaaaaaaaaaaaaaggtagctgtgatacaaaccccaggacacccacccacccaaagagccaaagaatagttcctgtgacattccgccttccttccatgtagtccctcttggtaatctaccaccaagcttgtggacttcaccccaacaaaattgtaagcgttgttaggtttttgtgtaagattcttgctgtagcgtggatagctgtgattggtgagtcaaccgtctgtggctaccagttacactgagattgtaacagcatttttactttctgtacaacaaaaaagctttgtaaataaaatcttaacattttgggtct

SEQ ID NO: 342993 - DNA, 593 bp, Homo sapiens
gcacgagtgccggattattcggcacgagagatgatgaagatgaagatgtagaaggggatgaggacgacgatgaagtcagtgaggaggaagaagaatttggacttgatgaagaagatgaagatgaggatgaggatgaagaggaggaagaaggtgggaaaggtgaaaagaggaagagagaaacagatgatgaaggagaagatgattaagaccccagatgacctgcagaaacagaactgttcagtattggttggactgctcatggattttgtagctgtttaaaaaaaaaaaaaaggtagctgtgatacaaaccccaggacacccacccacccaaagagccaaagaatagttcctgtgacattccgccttccttccatgtagtccctcttggtaatctaccaccaagcttgtggacttcaccccaacaaaattgtaagcgttgttaggtttttgtgtaagattcttgctgtagcgtggatagctgtgattggtgagtcaaccgtctgtggctaccagttacactgagattgtaacagcatttttactttctgtacaacaaaaaagctttgtaaataaaatcttaacattttgggtct

SEQ ID NO: 342994 - DNA, 825 bp, Homo sapiens
caacgatggtcctcagctctgacggctgatccctcaaagagtgatggaccagcacaaacttaccaggaccagtgggaggaccggatccaggtgtggcatgcggaacaccgtgggatgctcaaagataatgctatgttggaatacctgaagattgctcaggacctggaaatgtatggaatcaactatttcgagataaaaaacaagaaaggaacagacctttggcttggagttgatgcccttggactgaatatttatgagaaagatgatgaagatgaagatgtagaaggggatgaggacgacgatgaagtcagtgaggaggaagaagaatttggacttgatgaagaagatgaagatgaggatgaggatgaagaggaggaagaaggtgggaaaggtgaaaagaggaagagagaaacagatgatgaaggagaagatgattaagaccccagatgacctgcagaaacagaactgttcagtattggttggactgctcatggattttgtagctgtttaaaaaaaaaaaaaaggtagctgtgatacaaaccccaggacacccacccacccaaagagccaaagaatagttcctgtgacattccgccttccttccatgtagtccctcttggtaatctaccaccaagcttgtggacttcaccccaacaaaattgtaagcgttgttaggtttttgtgtaagattcttgctgtagcgtggatagctgtgattggtgagtcaaccgtctgtggctaccagttacactgagattgtaacagcatttttactttctgtacaacaaaaaagctttgtaaataaaatcttaacattttgggtct

SEQ ID NO: 342995 - DNA, 968 bp, Homo sapiens
gcggccgccgagccgagcagcgccgcgcggggccgagtggagccgagcagctgccgcgccgcgtcgccggtttaagcgcagtgcaggccgcggccgggggcggcggtagtgagcccagcgctgcgctccagcccccttttccctccatggtttctctccgctcccgtgagtaacttggctccgggggctccgctcgcctgcccgcacgccgcccgccacccaggaccgcgccgccggcctccgccgctagcaaacccttccgacggccctcgctgcgcaagccgggacgcctctcccccctccgcccccgccgcggaaagttaagtttgaagaggggggaagaggggaacatggacatgaagaggaggatccacctggagctgaggaaccggaccccggcagctgttcgagaacttgtcttggacaattgcaaatcaaatgatggaaaaattgagggcttaacagctgaatttgtgaacttagagttcctcagtttaataaatgtaggcttgatctcagtttcaaatctccccaagctgcctaaattgaaaaagcttgaactcagtgaaaatagaatctttggaggtctggacatgttagctgaaaaacttccaaatctcacacatctaaacttaagtggaaataaactgaaagatatcagcaccttggaacctttgaaaaagttagaatgtctgaaaagcctggacctctttaactgtgaggttaccaacctgaatgactaccgagagagtgtctttcttggtaatctaccaccaagcttgtggacttcaccccaacaaaattgtaagcgttgttaggtttttgtgtaagattcttgctgtagcgtggatagctgtgattggtgagtcaaccgtctgtggctaccagttacactgagattgtaacagcatttttactttctgtacaacaaaaaagctttgtaaataaaatcttaacattttgggtct

SEQ ID NO: 342996 - DNA, 2102 bp, Homo sapiens
tgacaaccttacaggctaggtacgaggcctgggttgggtttctctccgctcccgtgagtaacttggctccgggggctccgctcgcctgcccgcacgccgcccgccacccaggaccgcgccgccggcctccgccgctagcaaacccttccgacggccctcgctgcgcaagccgggacgcctctcccccctccgcccccgccgcggaaagttaagtttgaagaggggggaagaggggaacatggacatgaagaggaggatccacctggagctgaggaaccggaccccggcagctgttcgagaacttgtcttggacaattgcaaatcaaatgatggaaaaattgagggcttaacagctgaatttgtgaacttagagttcctcagtttaataaatgtaggcttgatctcagtttcaaatctccccaagctgcctaaattgaaaaagcttgaactcagtgaaaatagaatctttggaggtctggacatgttagctgaaaaacttccaaatctcacacatctaaacttaagtggaaataaactgaaagatatcagcaccttggaacctttgccaaagaatagttcctgtgacattccgccttccttccatgtagtccctcttggtaatctaccaccaagcttgtggacttcaccccaacaaaattgtaagcgttgttaggtttttgtgtaagattcttgctgtagcgtggatagctgtgattggtgagtcaaccgtctgtggctaccagttacactgagattgtaacagcatttttactttctgtacaacaaaaaagctttgtaaataaaatcttaacattttgggtctgttttttcatgctttgctttttaattattattattattttttttacattaggacattttatgtgacaactgccaaaaaagtatttttaagaatttaagcgaaataaacagttactctttggtaaagcctagttgtatgcttacatttttaaattatactctcattgtaagctcatgttaaaacaccaaagaactggtttatttggcatttttatattagtagttgttgaggggaattgcacaagtgtgtaggatctttgagcatttagatcaaatcctcattgataactgggagtaaatgaagcatactttaaaaaataacgttcaaaatggaatactctggggccctgaaaaccagtaaaatgttaggttcaagtattatgtgaattaagggaaagaagatagtgtaaagcaaaaggccttcaccagaatcccaagagatctgaattctagttctggctctgcccctgattttctgtgtgaccttgtgttgactctgggtcaccacccagtctggaaaattgaaggggtgtgaccaaatggcttctgaagtcacttgtagcactgatgttctgtgacccttgctgacaggaaggtctgaagagaaaaatgggctttccactagtctgaagcatgtagggtttgactgatgggtgaacacagtatggtttgttgccaagacaggcgtgaaaagggggaatgacatgtgaaaagcctcaccaagcagtgggtaggcactgcctgaggtcaactcaggttttccataagatggaaattttctctattcttacagatcttaaagggatttgagaaaggaggatattctgtctgtattcagtgattaaccgtttagcgaaaatagatgtatgactgcattatcaatacagttttttatagtggaagatttaaggattgtttcagtaaattttagcttatagctgctggaatgagtgaggtttttgatgcatgtaaatgcaatatgtaaaattggaatctaatttgaatttataacaagtcacagtctctatggagcccccaaatactgtactttaaaatcaaaatctcccatagactttaaaatggagtttcttttttgcaaagaaaatccaagaaaatttgatttctgattttacaggtattacacatcattttccccaaccataaggccattttggcaaaccttcaatacattgtaaaatggtttcttctgtagcctaagtgtgtccttaaggttttgcttatttgtcaaatatcaaacacagtaactttgagtgattatt

SEQ ID NO: 342997 - DNA, 2660 bp, Homo sapiens
tgacaaccttacaggctaggtacgaggcctgggttgggtttctctccgctcccgtgagtaacttggctccgggggctccgctcgcctgcccgcacgccgcccgccacccaggaccgcgccgccggcctccgccgctagcaaacccttccgacggccctcgctgcgcaagccgggacgcctctcccccctccgcccccgccgcggaaagttaagtttgaagaggggggaagaggggaacatggacatgaagaggaggatccacctggagctgaggaaccggaccccggcagctgttcgagaacttgtcttggacaattgcaaatcaaatgatggaaaaattgagggcttaacagctgaatttgtgaacttagagttcctcagtttaataaatgtaggcttgatctcagtttcaaatctccccaagctgcctaaattgaaaaagcttgaactcagtgaaaatagaatctttggaggtctggacatgttagctgaaaaacttccaaatctcacacatctaaacttaagtggaaataaactgaaagatatcagcaccttggaacctttgaaaaagttagaatgtctgaaaagcctggacctctttaactgtgaggttaccaacctgaatgactaccgagagagtgtcttcaagctcctgccccagcttacctacttggatggctatgaccgagaggaccaggaagcacctgactcagatgccgaggtggatggtgtggatgaagaggaggaggacgaagaaggagaagatgaggaagacgaggacgatgaggatggtgaagaagaggagtttgatgaagaagatgatgaagatgaagatgtagaaggggatgaggacgacgatgaagtcagtgaggaggaagaagaatttggacttgatgaagaagatgaagatgaggatgaggatgaagaggaggaagaaggtgggaaaggtgaaaagaggaagagagaaacagatgatgaaggagaagatgattaagaccccagatgacctgcagaaacagaactgttcagtattggttggactgctcatggattttgtagctgtttaaaaaaaaaaaaaaggtagctgtgatacaaaccccaggacacccacccacccaaagagccaaagaatagttcctgtgacattccgccttccttccatgtagtccctcttggtaatctaccaccaagcttgtggacttcaccccaacaaaattgtaagcgttgttaggtttttgtgtaagattcttgctgtagcgtggatagctgtgattggtgagtcaaccgtctgtggctaccagttacactgagattgtaacagcatttttactttctgtacaacaaaaaagctttgtaaataaaatcttaacattttgggtctgttttttcatgctttgctttttaattattattattattttttttacattaggacattttatgtgacaactgccaaaaaagtatttttaagaatttaagcgaaataaacagttactctttggtaaagcctagttgtatgcttacatttttaaattatactctcattgtaagctcatgttaaaacaccaaagaactggtttatttggcatttttatattagtagttgttgaggggaattgcacaagtgtgtaggatctttgagcatttagatcaaatcctcattgataactgggagtaaatgaagcatactttaaaaaataacgttcaaaatggaatactctggggccctgaaaaccagtaaaatgttaggttcaagtattatgtgaattaagggaaagaagatagtgtaaagcaaaaggccttcaccagaatcccaagagatctgaattctagttctggctctgcccctgattttctgtgtgaccttgtgttgactctgggtcaccacccagtctggaaaattgaaggggtgtgaccaaatggcttctgaagtcacttgtagcactgatgttctgtgacccttgctgacaggaaggtctgaagagaaaaatgggctttccactagtctgaagcatgtagggtttgactgatgggtgaacacagtatggtttgttgccaagacaggcgtgaaaagggggaatgacatgtgaaaagcctcaccaagcagtgggtaggcactgcctgaggtcaactcaggttttccataagatggaaattttctctattcttacagatcttaaagggatttgagaaaggaggatattctgtctgtattcagtgattaaccgtttagcgaaaatagatgtatgactgcattatcaatacagttttttatagtggaagatttaaggattgtttcagtaaattttagcttatagctgctggaatgagtgaggtttttgatgcatgtaaatgcaatatgtaaaattggaatctaatttgaatttataacaagtcacagtctctatggagcccccaaatactgtactttaaaatcaaaatctcccatagactttaaaatggagtttcttttttgcaaagaaaatccaagaaaatttgatttctgattttacaggtattacacatcattttccccaaccataaggccattttggcaaaccttcaatacattgtaaaatggtttcttctgtagcctaagtgtgtccttaaggttttgcttatttgtcaaatatcaaacacagtaactttgagtgattatt

SEQ ID NO: 342998 - DNA, 499 bp, Homo sapiens
cggacgcgtgggtcgacccacgcgtccgcttgaactcagtgaaaatagaatctttggaggtctggacatgttagctgaaaaacttccaaatctcacacatctaaacttaagtggaaataaactgaaagatatcagcaccttggaacctttgaaaaagttagaatgtctgaaaagcctggacctctttaactgtgaggttaccaacctgaatgactaccgagagagtgtcttcaagctcctgccccagcttacctacttggatggctatgaccgagaggaccaggaagcacctgactcagatgccgaggtggatggtgtggatgaagaggaggaggacgaagaaggagaagaaaaggaagaagaggaagaagaaaggaaagaaagaaaaagaagatagaaggaaagaagatagaagaagaaaagaagagaagaagaataaggaacaagaagaaagaagaaagaagaaaaggaagaagaggaagaagaaagaaaaaaaaaa

SEQ ID NO: 342999 - DNA, 1386 bp, Homo sapiens
  misc_feature (6)..(8): n is a, c, g, or t
aaatannngtaggtagaggctggtgttaatcggccgaggggggtttctctccgctcccgtgagtaacttggctccgggggctccgctcgcctgcccgcacgccgcccgccacccaggaccgcgccgccggcctccgccgctagcaaacccttccgacggccctcgctgcgcaagccgggacgcctctcccccctccgcccccgccgcggaaagttaagtttgaagaggggggaagaggggaacatggacatgaagaggaggatccacctggagctgaggaaccggaccccggcagctgttcgagaacttgtcttggacaattgcaaatcaaatgatggaaaaattgagggcttaacagctgaatttgtgaacttagagttcctcagtttaataaatgtaggcttgatctcagtttcaaatctccccaagctgcctaaattgaaaaagcttgaactcagtgaaaatagaatctttggaggtctggacatgttagctgaaaaacttccaaatctcacacatctaaacttaagtggaaataaactgaaagatatcagcaccttggaacctttgaaaaagttagaatgtctgaaaagcctggacctctttaactgtgaggttaccaacctgaatgactaccgagagagtgtcttcaagctcctgccccagcttacctacttggatggctatgaccgagaggaccaggaagcacctgactcagatgccgaggtggatggtgtggatgaagaggaggaggacgaagaaggagaagatgaggaagacgaggacgatgaggatggtgaagaagaggagtttgatgaagaagatgatgaagatgaagatgtagaaggggatgaggacgacgatgaagtcagtgaggaggaagaagaatttggacttgatgaagaagatgaagatgaggatgaggatgaagaggaggaagaaggtgggaaaggtgaaaagaggaagagagaaacagatgatgaaggagaagatgattaagaccccagatgacctgcagaaacagaactgttcagtattggttggactgctcatggattttgtagctgtttaaaaaaaaaaaaaaggtagctgtgatacaaaccccaggacacccacccacccaaagagccaaagaatagttcctgtgacattccgccttccttccatgtagtccctcttggtaatctaccaccaagcttgtggacttcaccccaacaaaattgtaagcgttgttaggtttttgtgtaagattcttgctgtagcgtggatagctgtgattggtgagtcaaccgtctgtggctaccagttacactgagattgtaacagcatttttactttctgtacaacaaaaaagctttgtaaataaaatcttaacattttgggtct

SEQ ID NO: 343000 - DNA, 1373 bp, Homo sapiens
agctaggctagtacgaggccgggtgttaggtttctctccgctcccgtgagtaacttggctccgggggctccgctcgcctgcccgcacgccgcccgccacccaggaccgcgccgccggcctccgccgctagcaaacccttccgacggccctcgctgcgcaagccgggacgcctctcccccctccgcccccgccgcggaaagttaagtttgaagaggggggaagaggggaacatggacatgaagaggaggatccacctggagctgaggaaccggaccccggcagctgttcgagaacttgtcttggacaattgcaaatcaaatgatggaaaaattgagggcttaacagctgaatttgtgaacttagagttcctcagtttaataaatgtaggcttgatctcagtttcaaatctccccaagctgcctaaattgaaaaagcttgaactcagtgaaaatagaatctttggaggtctggacatgttagctgaaaaacttccaaatctcacacatctaaacttaagtggaaataaactgaaagatatcagcaccttggaacctttgaaaaagttagaatgtctgaaaagcctggacctctttaactgtgaggttaccaacctgaatgactaccgagagagtgtcttcaagctcctgccccagcttacctacttggatggctatgaccgagaggaccaggaagcacctgactcagatgccgaggtggatggtgtggatgaagaggaggaggacgaagaaggagaagatgaggaagacgaggacgatgaggatggtgaagaagaggagtttgatgaagaagatgatgaagatgaagatgtagaaggggatgaggacgacgatgaagtcagtgaggaggaagaagaatttggacttgatgaagaagatgaagatgaggatgaggatgaagaggaggaagaaggtgggaaaggtgaaaagaggaagagagaaacagatgatgaaggagaagatgattaagaccccagatgacctgcagaaacagaactgttcagtattggttggactgctcatggattttgtagctgtttaaaaaaaaaaaaaaggtagctgtgatacaaaccccaggacacccacccacccaaagagccaaagaatagttcctgtgacattccgccttccttccatgtagtccctcttggtaatctaccaccaagcttgtggacttcaccccaacaaaattgtaagcgttgttaggtttttgtgtaagattcttgctgtagcgtggatagctgtgattggtgagtcaaccgtctgtggctaccagttacactgagattgtaacagcatttttactttctgtacaacaaaaaagctttgtaaataaaatcttaacattttgggtct

SEQ ID NO: 343001 - DNA, 2092 bp, Homo sapiens
gcggccgccgagccgagcagcgccgcgcggggccgagtggagccgagcagctgccgcgccgcgtcgccggtttaagcgcagtgcaggccgcggccgggggcggcggtagtgagcccagcgctgcgctccagcccccttttccctccatggtttctctccgctcccgtgagtaacttggctccgggggctccgctcgcctgcccgcacgccgcccgccacccaggaccgcgccgccggcctccgccgctagcaaacccttccgacggccctcgctgcgcaagccgggacgcctctcccccctccgcccccgccgcggaaagttaagtttgaagaggggggaagaggggaacatggacatgaagaggaggatccacctggagctgaggaaccggaccccggcagctgttcgagaacttgtcttggacaattgcaaatcaaatgatggaaaaattgagggcttaacagctgaatttgtgaacttagagttcctcagtttaataaatgtaggcttgatctcagtttcaaatctccccaagctgcctaaattgaaaaagcttgaactcagtgaaaatagaatctttggaggtctggacatgttagctgaaaaacttccaaatctcacacatctaaacttaagtggaaataaactgaaagatatcagcaccttggaacctttgaaaaagttagaatgtctgaaaagcctggacctctttaactgtgaggttaccaacctgaatgactaccgagagagtgtcttcaagctcctgccccagcttacctacttggatggctatgaccgagaggaccaggaagcacctgactcagatgccgaggtggatggtgtggatgaagaggaggaggacgaagaaggagaagatgaggaagacgaggacgatgaggatggtgaagaagaggagtttgatgaagaagatgatgaagatgaagatgtagaaggggatgaggacgacgatgaagtcagtgaggaggaagaagaatttggacttgatgaagaagatgaagatgaggatgaggatgaagaggaggaagaaggtgggaaaggtgaaaagaggaagagagaaacagatgatgaaggagaagatgattaagaccccagatgacctgcagaaacagaactgttcagtattggttggactgctcatggattttgtagctgtttaaaaaaaaaaaaaaggtagctgtgatacaaaccccaggacacccacccacccaaagagccaaagaatagttcctgtgacattccgccttccttccatgtagtccctcttggtaatctaccaccaagcttgtggacttcaccccaacaaaattgtaagcgttgttaggtttttgtgtaagattcttgctgtagcgtggatagctgtgattggtgagtcaaccgtctgtggctaccagttacactgagattgtaacagcatttttactttctgtacaacaaaaaagctttgtaaataaaatcttaacattttgggtctaaaaaaacaaaaaaaaaacaacaaacaaacaacaaaaaaaaaaaaaaaaaacaaacaaaaacacaaaaaaaaaaaaaacaaaaacaacaaacacaaacaaaaaaacaaaaaaaacacaaacacaacagcacaagaaacaaaagcaaaacacaaagaaaagacgagctgggcgctgcgcgcgcgcccgagacagaggaaagagagagacgacccaggcaaaggagaggggagaggcgagcgagagagaacagagaaagacagagacaaagaggggcggcagacatggggcaagggacagaggtgagagagcgagcgcgctccgtggcacgcaccaagcatggtcggcgggggacgacatgcagcacacagcgaaagaacagacaaaacgcgcgaggcggccaggcagaagccagtagacggagcagaggtggcgcacaacaaacaacagaacgaggaaggcgaggggcgcgccaagagacagtagcgagacacagagagcggggggcacgacatagaagaaaacgagacgacgcccagagggggggaagaggcagaaagaaataaagcagcagcaggcgcggcagcccggggggggggac

SEQ ID NO: 343002 - DNA, 2607 bp, Homo sapiens
gcggccgccgagccgagcagcgccgcgcggggccgagtggagccgagcagctgccgcgccgcgtcgccggtttaagcgcagtgcaggccgcggccgggggcggcggtagtgagcccagcgctgcgctccagcccccttttccctccatggtttctctccgctcccgtgagtaacttggctccgggggctccgctcgcctgcccgcacgccgcccgccacccaggaccgcgccgccggcctccgccgctagcaaacccttccgacggccctcgctgcgcaagccgggacgcctctcccccctccgcccccgccgcggaaagttaagtttgaagaggggggaagaggggaacatggacatgaagaggaggatccacctggagctgaggaaccggaccccggcagctgttcgagaacttgtcttggacaattgcaaatcaaatgatggaaaaattgagggcttaacagctgaatttgtgaacttagagttcctcagtttaataaatgtaggcttgatctcagtttcaaatctccccaagctgcctaaattgaaaaagcttgaactcagtgaaaatagaatctttggaggtctggacatgttagctgaaaaacttccaaatctcacacatctaaacttaagtggaaataaactgaaagatatcagcaccttggaacctttgaaaaagttagaatgtctgaaaagcctggacctctttaactgtgaggttaccaacctgaatgactaccgagagagtgtcttcaagctcctgccccagcttacctacttggatggctatgaccgagaggaccaggaagcacctgactcagatgccgaggtggatggtgtggatgaagaggaggaggacgaagaaggagaagatgaggaagacgaggacgatgaggatggtgaagaagaggagtttgatgaagaagaagatgattaagaccccagatgacctgcagaaacagaactgttcagtattggttggactgctcatggattttgtagctgtttaaaaaaaaaaaaaaggtagctgtgatacaaaccccaggacacccacccacccaaagagccaaagaatagttcctgtgacattccgccttccttccatgtagtccctcttggtaatctaccaccaagcttgtggacttcaccccaacaaaattgtaagcgttgttaggtttttgtgtaagattcttgctgtagcgtggatagctgtgattggtgagtcaaccgtctgtggctaccagttacactgagattgtaacagcatttttactttctgtacaacaaaaaagctttgtaaataaaatcttaacattttgggtctgttttttcatgctttgctttttaattattattattattttttttacattaggacattttatgtgacaactgccaaaaaagtatttttaagaatttaagcgaaataaacagttactctttggtaaagcctagttgtatgcttacatttttaaattatactctcattgtaagctcatgttaaaacaccaaagaactggtttatttggcatttttatattagtagttgttgaggggaattgcacaagtgtgtaggatctttgagcatttagatcaaatcctcattgataactgggagtaaatgaagcatactttaaaaaataacgttcaaaatggaatactctggggccctgaaaaccagtaaaatgttaggttcaagtattatgtgaattaagggaaagaagatagtgtaaagcaaaaggccttcaccagaatcccaagagatctgaattctagttctggctctgcccctgattttctgtgtgaccttgtgttgactctgggtcaccacccagtctggaaaattgaaggggtgtgaccaaatggcttctgaagtcacttgtagcactgatgttctgtgacccttgctgacaggaaggtctgaagagaaaaatgggctttccactagtctgaagcatgtagggtttgactgatgggtgaacacagtatggtttgttgccaagacaggcgtgaaaagggggaatgacatgtgaaaagcctcaccaagcagtgggtaggcactgcctgaggtcaactcaggttttccataagatggaaattttctctattcttacagatcttaaagggatttgagaaaggaggatattctgtctgtattcagtgattaaccgtttagcgaaaatagatgtatgactgcattatcaatacagttttttatagtggaagatttaaggattgtttcagtaaattttagcttatagctgctggaatgagtgaggtttttgatgcatgtaaatgcaatatgtaaaattggaatctaatttgaatttataacaagtcacagtctctatggagcccccaaatactgtactttaaaatcaaaatctcccatagactttaaaatggagtttcttttttgcaaagaaaatccaagaaaatttgatttctgattttacaggtattacacatcattttccccaaccataaggccattttggcaaaccttcaatacattgtaaaatggtttcttctgtagcctaagtgtgtccttaaggttttgcttatttgtcaaatatcaaacacagtaactttgagtgattatt

SEQ ID NO: 343003 - DNA, 1100 bp, Homo sapiens
gcggccgccgagccgagcagcgccgcgcggggccgagtggagccgagcagctgccgcgccgcgtcgccggtttaagcgcagtgcaggccgcggccgggggcggcggtagtgagcccagcgctgcgctccagcccccttttccctccatggtttctctccgctcccgtgagtaacttggctccgggggctccgctcgcctgcccgcacgccgcccgccacccaggaccgcgccgccggcctccgccgctagcaaacccttccgacggccctcgctgcgcaagccgggacgcctctcccccctccgcccccgccgcggaaagttaagtttgaagaggggggaagaggggaacatggacatgaagaggaggatccacctggagctgaggaaccggaccccggcagctgttcgagaacttgtcttggacaattgcaaatcaaatgatggaaaaattgagggcttaacagctgaatttgtgaacttagagttcctcagtttaataaatgtaggcttgatctcagtttcaaatctccccaagctgcctaaattgaaaaagcttgaactcagtgaaaatagaatctttggaggtctggacatgttagctgaaaaacttccaaatctcacacatctaaacttaagtggaaataaactgaaagatatcagcaccttggaacctttgaaaaagttagaatgtctgaaaagcctggacctctttaactgtgaggttaccaacctgaatgactaccgagagagtgtcttcaagctcctgccccagcttacctacttggatggctatgaccgagaggaccaggaagcacctgactcagatgccgaggtggatggtgtggatgaagaggaggaggacgaagaaggagaagatgaggaagacgaggacgatgaggatggtgaagaagaggagtttgatgaagaagatgatgaagatgaagatgtagaaggggatgaggacgacgatgaagtcagtgaggagagaagaagaatttgggcttgatgaagacgatgaagattaggattaggattaagaggacgaagaatgtgggaatcgtgaaacgaggaagagtgccgttgatgaacgaggattttt

SEQ ID NO: 343004 - DNA, 1116 bp, Homo sapiens
gcggccgccgagccgagcagcgccgcgcggggccgagtggagccgagcagctgccgcgccgcgtcgccggtttaagcgcagtgcaggccgcggccgggggcggcggtagtgagcccagcgctgcgctccagcccccttttccctccatggtttctctccgctcccgtgagtaacttggctccgggggctccgctcgcctgcccgcacgccgcccgccacccaggaccgcgccgccggcctccgccgctagcaaacccttccgacggccctcgctgcgcaagccgggacgcctctcccccctccgcccccgccgcggaaagttaagtttgaagaggggggaagaggggaacatggacatgaagaggaggatccacctggagctgaggaaccggaccccggcagctgttcgagaacttgtcttggacaattgcaaatcaaatgatggaaaaattgagggcttaacagctgaatttgtgaacttagagttcctcagtttaataaatgtaggcttgatctcagtttcaaatctccccaagctgcctaaattgaaaaagcttgaactcagtgaaaatagaatctttggaggtctggacatgttagctgaaaaacttccaaatctcacacatctaaacttaagtggaaataaactgaaagatatcagcaccttggaacctttgaaaaagttagaatgtctgaaaagcctggacctctttaactgtgaggttaccaacctgaatgactaccgagagagtgtcttcaagctcctgccccagcttacctacttggatggctatgaccgagaggaccaggaagcacctgactcagatgccgaggtggatggtgtggatgaagaggaggaggacgaagaaggagaagatgaggaagacgaggacgatgaggatggtgaagaagaggagtttgatgaagaaggaagaagaatttggacttgatgaagaagatgaagatgaggatgaggatgaagagggacggagacagtgggaccgtcgaaacgcggacagcgaaaccgtgtgacgggcacattgttaaacgcgttgactgggaaacgactgtccgttggtggagcggcacggacggtctcgtaaccaaacggtgcgg

SEQ ID NO: 343005 - DNA, 1387 bp, Homo sapiens
ggagtctccctgccgcgtctggattgcgaacccgtgtgctgcctatccgtatagctccgccgacgggagccgaggtggaagcgctgagtcgggctgcacggggtcggagtagacaggtaagacgacgtagtgacatgccgctagcaaacccttccgacggccctcgctgcgcaagccgggacgcctctcccccctccgcccccgccgcggaaagttaagtttgaagaggggggaagaggggaacatggacatgaagaggaggatccacctggagctgaggaaccggaccccggcagctgttcgagaacttgtcttggacaattgcaaatcaaatgatggaaaaattgagggcttaacagctgaatttgtgaacttagagttcctcagtttaataaatgtaggcttgatctcagtttcaaatctccccaagctgcctaaattgaaaaagcttgaactcagtgaaaatagaatctttggaggtctggacatgttagctgaaaaacttccaaatctcacacatctaaacttaagtggaaataaactgaaagatatcagcaccttggaacctttgaaaaagttagaatgtctgaaaagcctggacctctttaactgtgaggttaccaacctgaatgactaccgagagagtgtcttcaagctcctgccccagcttacctacttggatggctatgaccgagaggaccaggaagcacctgactcagatgccgaggtggatggtgtggatgaagaggaggaggacgaagaaggagaagatgaggaagacgaggacgatgaggatggtgaagaagaggagtttgatgaagaagatgatgaagatgaagatgtagaaggggatgaggacgacgatgaagtcagtgaggaggaagaagaatttggacttgatgaagaagatgaagatgaggatgaggatgaagaggaggaagaaggtgggaaaggtgaaaagaggaagagagaaacagatgatgaaggagaagatgattaagaccccagatgacctgcagaaacagaactgttcagtattggttggactgctcatggattttgtagctgtttaaaaaaaaaaaaaaggtagctgtgatacaaaccccaggacacccacccacccaaagagccaaagaatagttcctgtgacattccgccttccttccatgtagtccctcttggtaatctaccaccaagcttgtggacttcaccccaacaaaattgtaagcgttgttaggtttttgtgtaagattcttgctgtagcgtggatagctgtgattggtgagtcaaccgtctgtggctaccagttacactgagattgtaacagcatttttactttctgtacaacaaaaaagctttgtaaataaaatcttaacattttgggtct

SEQ ID NO: 343006 - DNA, 1217 bp, Homo sapiens
gaagcagaggaagaacaagaagagaaccttgaagcaagtggagactataaatattcaggaaggaagaggggaacatggacatgaagaggaggatccacctggagctgaggaaccggaccccggcagctgttcgagaacttgtcttggacaattgcaaatcaaatgatggaaaaattgagggcttaacagctgaatttgtgaacttagagttcctcagtttaataaatgtaggcttgatctcagtttcaaatctccccaagctgcctaaattgaaaaagcttgaactcagtgaaaatagaatctttggaggtctggacatgttagctgaaaaacttccaaatctcacacatctaaacttaagtggaaataaactgaaagatatcagcaccttggaacctttgaaaaagttagaatgtctgaaaagcctggacctctttaactgtgaggttaccaacctgaatgactaccgagagagtgtcttcaagctcctgccccagcttacctacttggatggctatgaccgagaggaccaggaagcacctgactcagatgccgaggtggatggtgtggatgaagaggaggaggacgaagaaggagaagatgaggaagacgaggacgatgaggatggtgaagaagaggagtttgatgaagaagatgatgaagatgaagatgtagaaggggatgaggacgacgatgaagtcagtgaggaggaagaagaatttggacttgatgaagaagatgaagatgaggatgaggatgaagaggaggaagaaggtgggaaaggtgaaaagaggaagagagaaacagatgatgaaggagaagatgattaagaccccagatgacctgcagaaacagaactgttcagtattggttggactgctcatggattttgtagctgtttaaaaaaaaaaaaaaggtagctgtgatacaaaccccaggacacccacccacccaaagagccaaagaatagttcctgtgacattccgccttccttccatgtagtccctcttggtaatctaccaccaagcttgtggacttcaccccaacaaaattgtaagcgttgttaggtttttgtgtaagattcttgctgtagcgtggatagctgtgattggtgagtcaaccgtctgtggctaccagttacactgagattgtaacagcatttttactttctgtacaacaaaaaagctttgtaaataaaatcttaacattttgggtct

SEQ ID NO: 343007 - DNA, 1037 bp, Homo sapiens
tgactagaggttcccgactagtccaaccattcctcagtttaataaatgtaggcttgatctcagtttcaaatctccccaagctgcctaaattgaaaaagcttgaactcagtgaaaatagaatctttggaggtctggacatgttagctgaaaaacttccaaatctcacacatctaaacttaagtggaaataaactgaaagatatcagcaccttggaacctttgaaaaagttagaatgtctgaaaagcctggacctctttaactgtgaggttaccaacctgaatgactaccgagagagtgtcttcaagctcctgccccagcttacctacttggatggctatgaccgagaggaccaggaagcacctgactcagatgccgaggtggatggtgtggatgaagaggaggaggacgaagaaggagaagatgaggaagacgaggacgatgaggatggtgaagaagaggagtttgatgaagaagatgatgaagatgaagatgtagaaggggatgaggacgacgatgaagtcagtgaggaggaagaagaatttggacttgatgaagaagatgaagatgaggatgaggatgaagaggaggaagaaggtgggaaaggtgaaaagaggaagagagaaacagatgatgaaggagaagatgattaagaccccagatgacctgcagaaacagaactgttcagtattggttggactgctcatggattttgtagctgtttaaaaaaaaaaaaaaggtagctgtgatacaaaccccaggacacccacccacccaaagagccaaagaatagttcctgtgacattccgccttccttccatgtagtccctcttggtaatctaccaccaagcttgtggacttcaccccaacaaaattgtaagcgttgttaggtttttgtgtaagattcttgctgtagcgtggatagctgtgattggtgagtcaaccgtctgtggctaccagttacactgagattgtaacagcatttttactttctgtacaacaaaaaagctttgtaaataaaatcttaacattttgggtct

SEQ ID NO: 343008 - DNA, 873 bp, Homo sapiens
  misc_feature (8)..(8): n is a, c, g, or t
gtgatggngttctagaggatccctactctgaaagatatcagcaccttggaacctttgaaaaagttagaatgtctgaaaagcctggacctctttaactgtgaggttaccaacctgaatgactaccgagagagtgtcttcaagctcctgccccagcttacctacttggatggctatgaccgagaggaccaggaagcacctgactcagatgccgaggtggatggtgtggatgaagaggaggaggacgaagaaggagaagatgaggaagacgaggacgatgaggatggtgaagaagaggagtttgatgaagaagatgatgaagatgaagatgtagaaggggatgaggacgacgatgaagtcagtgaggaggaagaagaatttggacttgatgaagaagatgaagatgaggatgaggatgaagaggaggaagaaggtgggaaaggtgaaaagaggaagagagaaacagatgatgaaggagaagatgattaagaccccagatgacctgcagaaacagaactgttcagtattggttggactgctcatggattttgtagctgtttaaaaaaaaaaaaaaggtagctgtgatacaaaccccaggacacccacccacccaaagagccaaagaatagttcctgtgacattccgccttccttccatgtagtccctcttggtaatctaccaccaagcttgtggacttcaccccaacaaaattgtaagcgttgttaggtttttgtgtaagattcttgctgtagcgtggatagctgtgattggtgagtcaaccgtctgtggctaccagttacactgagattgtaacagcatttttactttctgtacaacaaaaaagctttgtaaataaaatcttaacattttgggtct

SEQ ID NO: 343009 - DNA, 1447 bp, Homo sapiens
gcggccgccgagccgagcagcgccgcgcggggccgagtggagccgagcagctgccgcgccgcgtcgccggtttaagcgcagtgcaggccgcggccgggggcggcggtagtgagcccagcgctgcgctccagcccccttttccctccatggtttctctccgctcccgtgagtaacttggctccgggggctccgctcgcctgcccgcacgccgcccgccacccaggaccgcgccgccggcctccgccgctagcaaacccttccgacggccctcgctgcgcaagccgggacgcctctcccccctccgcccccgccgcggaaagttaagtttgaagaggggggaagaggggaacatggacatgaagaggaggatccacctggagctgaggaaccggaccccggcagctgttcgagaacttgtcttggacaattgcaaatcaaatgatggaaaaattgagggcttaacagctgaatttgtgaacttagagttcctcagtttaataaatgtaggcttgatctcagtttcaaatctccccaagctgcctaaattgaaaaagcttgaactcagtgaaaatagaatctttggaggtctggacatgttagctgaaaaacttccaaatctcacacatctaaacttaagtggaaataaactgaaagatatcagcaccttggaacctttgaaaaagttagaatgtctgaaaagcctggacctctttaactgtgaggttaccaacctgaatgactaccgagagagtgtcttgaccaggaagcacctgactcagatgccgaggtggatggtgtggatgaagaggaggaggacgaagaaggagaagatgaggaagacgaggacgatgaggatggtgaagaagaggagtttgatgaagaagatgatgaagatgaagatgtagaaggggatgaggacgacgatgaagtcagtgaggaggaagaagaatttggacttgatgaagaagatgaagatgaggatgaggatgaagaggaggaagaaggtgggaaaggtgaaaagaggaagagagaaacagatgatgaaggagaagatgattaagaccccagatgacctgcagaaacagaactgttcagtattggttggactgctcatggattttgtagctgtttaaaaaaaaaaaaaaggtagctgtgatacaaaccccaggacacccacccacccaaagagccaaagaatagttcctgtgacattccgccttccttccatgtagtccctcttggtaatctaccaccaagcttgtggacttcaccccaacaaaattgtaagcgttgttaggtttttgtgtaagattcttgctgtagcgtggatagctgtgattggtgagtcaaccgtctgtggctaccagttacactgagattgtaacagcatttttactttctgtacaacaaaaaagctttgtaaataaaatcttaacattttgggtct

SEQ ID NO: 343010 - DNA, 1003 bp, Homo sapiens
gcggccgcctactactactaaattcgcggccgcgtcgactaaactgaaagatatcagcaccttggaacctttgagtttatttccacttaagtttagatgtgtgagatttggaagtttttcagctaacatgtccagtctaaacttaagtggaaataaactgaaagatatcagcaccttggaacctttgaaaaagttagaatgtctgaaaagcctggacctctttaactgtgaggttaccaacctgaatgactaccgagagagtgtcttcaagctcctgccccagcttacctacttggatggctatgaccgagaggaccaggaagcacctgactcagatgccgaggtggatggtgtggatgaagaggaggaggacgaagaaggagaagatgaggaagacgaggacgatgaggatggtgaagaagaggagtttgatgaagaagatgatgaagatgaagatgtagaaggggatgaggacgacgatgaagtcagtgaggaggaagaagaatttggacttgatgaagaagatgaagatgaggatgaggatgaagaggaggaagaaggtgggaaaggtgaaaagaggaagagagaaacagatgatgaaggagaagatgattaagaccccagatgacctgcagaaacagaactgttcagtattggttggactgctcatggattttgtagctgtttaaaaaaaaaaaaaaggtagctgtgatacaaaccccaggacacccacccacccaaagagccaaagaatagttcctgtgacattccgccttccttccatgtagtccctcttggtaatctaccaccaagcttgtggacttcaccccaacaaaattgtaagcgttgttaggtttttgtgtaagattcttgctgtagcgtggatagctgtgattggtgagtcaaccgtctgtggctaccagttacactgagattgtaacagcatttttactttctgtacaacaaaaaagctttgtaaataaaatcttaacattttgggtct

SEQ ID NO: 343011 - DNA, 903 bp, Homo sapiens
ctctagactatcccctgcacacgccgagacaccaatctaaacttaagtggaaataaactgaaagatatcagcaccttggaacctttgaaaaagttagaatgtctgaaaagcctggacctctttaactgtgaggttaccaacctgaatgactaccgagagagtgtcttcaagctcctgccccagcttacctacttggatggctatgaccgagaggaccaggaagcacctgactcagatgccgaggtggatggtgtggatgaagaggaggaggacgaagaaggagaagatgaggaagacgaggacgatgaggatggtgaagaagaggagtttgatgaagaagatgatgaagatgaagatgtagaaggggatgaggacgacgatgaagtcagtgaggaggaagaagaatttggacttgatgaagaagatgaagatgaggatgaggatgaagaggaggaagaaggtgggaaaggtgaaaagaggaagagagaaacagatgatgaaggagaagatgattaagaccccagatgacctgcagaaacagaactgttcagtattggttggactgctcatggattttgtagctgtttaaaaaaaaaaaaaaggtagctgtgatacaaaccccaggacacccacccacccaaagagccaaagaatagttcctgtgacattccgccttccttccatgtagtccctcttggtaatctaccaccaagcttgtggacttcaccccaacaaaattgtaagcgttgttaggtttttgtgtaagattcttgctgtagcgtggatagctgtgattggtgagtcaaccgtctgtggctaccagttacactgagattgtaacagcatttttactttctgtacaacaaaaaagctttgtaaataaaatcttaacattttgggtct

SEQ ID NO: 343012 - DNA, 871 bp, Homo sapiens
  misc_feature (8)..(8): n is a, c, g, or t
  misc_feature (42)..(42): n is a, c, g, or t
  misc_feature (47)..(47): n is a, c, g, or t
gtgatggngttctagaggatccctactctgaaagacatcagnacctnggaacttgaaaaagttagaatgtctgaaaagcctggacctctttaactgtgaggttaccaacctgaatgactaccgagagagtgtcttcaagctcctgccccagcttacctacttggatggctatgaccgagaggaccaggaagcacctgactcagatgccgaggtggatggtgtggatgaagaggaggaggacgaagaaggagaagatgaggaagacgaggacgatgaggatggtgaagaagaggagtttgatgaagaagatgatgaagatgaagatgtagaaggggatgaggacgacgatgaagtcagtgaggaggaagaagaatttggacttgatgaagaagatgaagatgaggatgaggatgaagaggaggaagaaggtgggaaaggtgaaaagaggaagagagaaacagatgatgaaggagaagatgattaagaccccagatgacctgcagaaacagaactgttcagtattggttggactgctcatggattttgtagctgtttaaaaaaaaaaaaaaggtagctgtgatacaaaccccaggacacccacccacccaaagagccaaagaatagttcctgtgacattccgccttccttccatgtagtccctcttggtaatctaccaccaagcttgtggacttcaccccaacaaaattgtaagcgttgttaggtttttgtgtaagattcttgctgtagcgtggatagctgtgattggtgagtcaaccgtctgtggctaccagttacactgagattgtaacagcatttttactttctgtacaacaaaaaagctttgtaaataaaatcttaacattttgggtct

SEQ ID NO: 343013 - DNA, 825 bp, Homo sapiens
ctctaaggatcccctccactcgcaaatcacaccatccacctctttaactgtgaggttaccaacctgaatgactaccgagagagtgtcttcaagctcctgccccagcttacctacttggatggctatgaccgagaggaccaggaagcacctgactcagatgccgaggtggatggtgtggatgaagaggaggaggacgaagaaggagaagatgaggaagacgaggacgatgaggatggtgaagaagaggagtttgatgaagaagatgatgaagatgaagatgtagaaggggatgaggacgacgatgaagtcagtgaggaggaagaagaatttggacttgatgaagaagatgaagatgaggatgaggatgaagaggaggaagaaggtgggaaaggtgaaaagaggaagagagaaacagatgatgaaggagaagatgattaagaccccagatgacctgcagaaacagaactgttcagtattggttggactgctcatggattttgtagctgtttaaaaaaaaaaaaaaggtagctgtgatacaaaccccaggacacccacccacccaaagagccaaagaatagttcctgtgacattccgccttccttccatgtagtccctcttggtaatctaccaccaagcttgtggacttcaccccaacaaaattgtaagcgttgttaggtttttgtgtaagattcttgctgtagcgtggatagctgtgattggtgagtcaaccgtctgtggctaccagttacactgagattgtaacagcatttttactttctgtacaacaaaaaagctttgtaaataaaatcttaacattttgggtct

SEQ ID NO: 343014 - DNA, 778 bp, Homo sapiens
cacagctgcagaactattcaagtcttttgaacgattacatatcaggaaaactgaattggtcattttgtgtcgtatatgcacagatggagcggctgccatggctggacggctttctggtttcactactcgagtcagagaggtcgcttctggataaggagaagatgaggaagacgaggacgatgaggatggtgaagaagaggagtttgatgaagaagatgatgaagatgaagatgtagaaggggatgaggacgacgatgaagtcagtgaggaggaagaagaatttggacttgatgaagaagatgaagatgaggatgaggatgaagaggaggaagaaggtgggaaaggtgaaaagaggaagagagaaacagatgatgaaggagaagatgattaagaccccagatgacctgcagaaacagaactgttcagtattggttggactgctcatggattttgtagctgtttaaaaaaaaaaaaaaggtagctgtgatacaaaccccaggacacccacccacccaaagagccaaagaatagttcctgtgacattccgccttccttccatgtagtccctcttggtaatctaccaccaagcttgtggacttcaccccaacaaaattgtaagcgttgttaggtttttgtgtaagattcttgctgtagcgtggatagctgtgattggtgagtcaaccgtctgtggctaccagttacactgagattgtaacagcatttttactttctgtacaacaaaaaagctttgtaaataaaatcttaacattttgggtct

SEQ ID NO: 343015 - DNA, 2214 bp, Homo sapiens
gcggccgccgagccgagcagcgccgcgcggggccgagtggagccgagcagctgccgcgccgcgtcgccggtttaagcgcagtgcaggccgcggccgggggcggcggtagtgagcccagcgctgcgctccagcccccttttccctccatggtttctctccgctcccgtgagtaacttggctccgggggctccgctcgcctgcccgcacgccgcccgccacccaggaccgcgccgccggcctccgccgctagcaaacccttccgacggccctcgctgcgcaagccgggacgcctctcccccctccgcccccgccgcggaaagttaagtttgaagaggggggaagaggggaacatggacatgaagaggaggatccacctggagctgaggaaccggaccccggcagctgttcgagaacttgtcttggacaattgcaaatcaaatgatggaaaaattgagggcttaacagctgaatttgtgaacttagagttcctcagtttaataaatgtaggcttgatctcagtttcaaatctccccaagctgcctaaattgaaaaagcttgaactcagtgaaaatagaatctttggaggtctggacatgttagctgaaaaacttccaaatctcacacatctaaacttaagtggaaataaactgaaagatatcagcaccttggaacctttgccaaagaatagttcctgtgacattccgccttccttccatgtagtccctcttggtaatctaccaccaagcttgtggacttcaccccaacaaaattgtaagcgttgttaggtttttgtgtaagattcttgctgtagcgtggatagctgtgattggtgagtcaaccgtctgtggctaccagttacactgagattgtaacagcatttttactttctgtacaacaaaaaagctttgtaaataaaatcttaacattttgggtctgttttttcatgctttgctttttaattattattattattttttttacattaggacattttatgtgacaactgccaaaaaagtatttttaagaatttaagcgaaataaacagttactctttggtaaagcctagttgtatgcttacatttttaaattatactctcattgtaagctcatgttaaaacaccaaagaactggtttatttggcatttttatattagtagttgttgaggggaattgcacaagtgtgtaggatctttgagcatttagatcaaatcctcattgataactgggagtaaatgaagcatactttaaaaaataacgttcaaaatggaatactctggggccctgaaaaccagtaaaatgttaggttcaagtattatgtgaattaagggaaagaagatagtgtaaagcaaaaggccttcaccagaatcccaagagatctgaattctagttctggctctgcccctgattttctgtgtgaccttgtgttgactctgggtcaccacccagtctggaaaattgaaggggtgtgaccaaatggcttctgaagtcacttgtagcactgatgttctgtgacccttgctgacaggaaggtctgaagagaaaaatgggctttccactagtctgaagcatgtagggtttgactgatgggtgaacacagtatggtttgttgccaagacaggcgtgaaaagggggaatgacatgtgaaaagcctcaccaagcagtgggtaggcactgcctgaggtcaactcaggttttccataagatggaaattttctctattcttacagatcttaaagggatttgagaaaggaggatattctgtctgtattcagtgattaaccgtttagcgaaaatagatgtatgactgcattatcaatacagttttttatagtggaagatttaaggattgtttcagtaaattttagcttatagctgctggaatgagtgaggtttttgatgcatgtaaatgcaatatgtaaaattggaatctaatttgaatttataacaagtcacagtctctatggagcccccaaatactgtactttaaaatcaaaatctcccatagactttaaaatggagtttcttttttgcaaagaaaatccaagaaaatttgatttctgattttacaggtattacacatcattttccccaaccataaggccattttggcaaaccttcaatacattgtaaaatggtttcttctgtagcctaagtgtgtccttaaggttttgcttatttgtcaaatatcaaacacagtaactttgagtgattatt

SEQ ID NO: 343016 - DNA, 456 bp, Homo sapiens
  misc_feature (8)..(8): n is a, c, g, or t
gtgatggngttctagaggatccctactctgaaagatatcagcaccttggaacctttgaaaaagttagaatgtctgaaaagcctggacctctttaactgtgaggttaccaacctgaatgactaccgagagagtgtcttcaagctcctgccccagcttacctacttggatggctatgaccgagaggaccaggaagcacctgactcagatgccgaggtggatggtgtggatgaagaggaggaggacgaaggtgagtaggctcagcatctggtgaacctgatgtctgcctttcaaagcctctgataaaagctattggatgttggccgggcgcagtggcacacaactgtaatcccagcactttgggtggccgaggcagggggcattgcttgagcccaggagtttgagactagcctgggcaacatggcaataccttgtttctacagaaaatagaaaaaaaaa

SEQ ID NO: 343017 - DNA, 356 bp, Homo sapiens
ctgcagacagaactcagttagtcggggacaatttccctcaatgttaacagcactgttccaccgcaacgtggaacaacagctttaaaacgtgctcttcgtaggcccggctactccaagaacagtgcctcccgccagacccaggcggcttccttcacccgcaacccgagagacgacccgccgggcccgccccgcggaagccgccggttgccaggccaaggagtggactagggtcgccggggaagcgggtgagtggtccccgccctggcgggctgcctctagaacgaggagggcggcgcgtggtcgcggcgcggagccgagtgggagcgaggggtagacgcgccccggacgcgcggccg

SEQ ID NO: 343018 - DNA, 2329 bp, Homo sapiens
ctgcagacagaactcagttagtcggggacaatttccctcaatgttaacagcactgttccaccgcaacgtggaacaacagctttaaaacgtgctcttcgtaggcccggctactccaagaacagtgcctcccgccagacccaggcggcttccttcacccgcaacccgagagacgacccgccgggcccgccccgcggaagccgccggttgccaggccaaggagtggactagggtcgccggggaagcggtttgggagagcccatggtgactgcgtgagtggagcccagctgtgtggatgccccagcatggatgactacatggtcctgagaatgattggggagggctccttcggcagagctcttttggttcagcatgaaagcagtaatcagatgtttgccatgaaagaaataaggcttcccaagtctttctctaatacacagaattctaggaaggaggctgttcttttagccaaaatgaaacaccctaatattgttgccttcaaagaatcatttgaagctgaaggacacttgtatattgtgatggaatactgtgatggaggggatctaatgcaaaagattaaacagcagaaaggaaagttatttcctgaagacatgatacttaattggtttacccaaatgtgccttggagtaaatcacattcacaagaaacgtgtgctacacagagatatcaagtccaagaatatcttcctcactcagaatggaaaagtgaaattgggagactttggatctgcccgtcttctctccaatccgatggcatttgcttgtacctatgtgggaactccttattatgtgcctccagaaatttgggaaaacctgccttataacaataaaagtgacatctggtccttgggttgcatcctgtatgaactctgtacccttaagcatccatttcaggcaaatagttggaaaaatcttatcctcaaagtatgtcaagggtgcatcagtccactgccgtctcattactcctatgaacttcagttcctagtcaagcagatgtttaaaaggaatccctcacatcgcccctcggctacaacgcttctctctcgaggcatcgtagctcggcttgtccagaagtgcttaccccccgagatcatcatggaatatggtgaggaagtattagaagaaataaaaaattcgaagcataacacaccaagaaaaaaaacaaaccccagcagaatcaggatagctttgggaaatgaagcaagcacagtgcaagaggaagaacaagatagaaagggtagccatactgatttggaaagcattaatgaaaatttagttgaaagtgcattgagaagagtaaacagagaagaaaaaggtaataagtcagtccatctgaggaaagccagttcaccaaatcttcatagacgacagtgggagaaaaatgtacccaatacagctcttacagctttggaaaatgcatccatactcacctccagtttaacagcagaggacgatagaggtggttctgtaataaagtacagcaaaaatactactcgtaagcagtggctcaaagagacccctgacactttgttgaacatccttaagaatgctgatctcagcttggcttttcaaacatacacaatatatagaccaggttcagaagggttcttgaaaggccccctgtctgaagaaacagaagcatcggacagtgttgatggaggtcacgattctgtcattttggatccagagcgacttgagcctgggctagatgaggaggacacggactttgaggaggaagatgacaaccccgactgggtgtcagagctgaagaagcgagctggatggcaaggcctgtgcgacagataatgcctgaggaaatgttcctgagtcacgctgaggagagccttcactcaggagttcatgctgagatgatcatgagttcatgcgacgtatattttcctttggaaacagaatgaagcagaggaaactcttaatacttaaaatcgttcttgattagtatcgtgagtttgaaaagtctagaactcctgtaagtttttgaactcaagggagaaggtatagtggaatgagtgtgagcatcgggctttgcagtcccatagaacagaaatgggatgctagcgtgccactacctacttgtgtgattgtgggaaattacttaacctcttcaagccccaatttcctcaaccataaaatgaagataataatgcctacctcagagggatgctgaccacagacctttatagcagcccgtatgatattattcacattatgatatgtgtttattattatgtgactctttttacatttcctaaaggtttgagaattaaatatatttaattatgaaaaaaaaaaaa

SEQ ID NO: 343019 - DNA, 2194 bp, Homo sapiens
ctgcagacagaactcagttagtcggggacaatttccctcaatgttaacagcactgttccaccgcaacgtggaacaacagctttaaaacgtgctcttcgtaggcccggctactccaagaacagtgcctcccgccagacccaggcggcttccttcacccgcaacccgagagacgacccgccgggcccgccccgcggaagccgccggttgccaggccaaggagtggactagggtcgccggggaagcggtttgggagagcccatggtgactgcgtgagtggagcccagctgtgtggatgccccagcatggatgactacatggtcctgagaatgattggggagggctccttcggcagagctcttttggttcagcatgaaagcagtaatcagatgtttgccatgaaagaaataaggcttcccaagtctttctctaatacacagaattctaggaaggaggctgttcttttagccaaaatgaaacaccctaatattgttgccttcaaagaatcatttgaagctgaaggacacttgtatattgtgatggaatactgtgatggaggggatctaatgcaaaagattaaacagcagaaaggaaagttatttcctgaagacatgatacttaattggtttacccaaatgtgccttggagtaaatcacattcacaagaaacgtgtgctacacagagatatcaagtccaagaatatcttcctcactcagaatggaaaagtgaaattgggagactttggatctgcccgtcttctctccaatccgatggcatttgcttgtacctatgtgggaactccttattatgtgcctccagaaatttgggaaaacctgccttataacaataaaagtgacatctggtccttgggttgcatcctgtatgaactctgtacccttaagcatccatttcaggcaaatagttggaaaaatcttatcctcaaagtatgtcaagggtgcatcagtccactgccgtctcattactcctatgaacttcagttcctagtcaagcagatgtttaaaaggaatccctcacatcgcccctcggctacaacgcttctctctcgaggcatcgtagctcggcttgtccagaagtgcttaccccccgagatcatcatggaatatggtgaggaagtattagaagaaataaaaaattcgaagcataacacaccaagaaaaaaaacaaaccccagcagaatcaggatagctttgggaaatgaagcaagcacagtgcaagaggaagaacaagatagaaagggtagccatactgatttggaaagcattaatgaaaatttagttgaaagtgcattgagaagagtaaacagagaagaaaaaggtaataagtcagtccatctgaggaaagccagttcaccaaatcttcatagacgacagtgggagaaaaatgtacccaatacagctcttacagctttggaaaatgcatccatactcacctccagtttaacagcagaggacgatagaggttcagaagggttcttgaaaggccccctgtctgaagaaacagaagcatcggacagtgttgatggaggtcacgattctgtcattttggatccagagcgacttgagcctgggctagatgaggaggacacggactttgaggaggaagatgacaaccccgactgggtgtcagagctgaagaagcgagctggatggcaaggcctgtgcgacagataatgcctgaggaaatgttcctgagtcacgctgaggagagccttcactcaggagttcatgctgagatgatcatgagttcatgcgacgtatattttcctttggaaacagaatgaagcagaggaaactcttaatacttaaaatcgttcttgattagtatcgtgagtttgaaaagtctagaactcctgtaagtttttgaactcaagggagaaggtatagtggaatgagtgtgagcatcgggctttgcagtcccatagaacagaaatgggatgctagcgtgccactacctacttgtgtgattgtgggaaattacttaacctcttcaagccccaatttcctcaaccataaaatgaagataataatgcctacctcagagggatgctgaccacagacctttatagcagcccgtatgatattattcacattatgatatgtgtttattattatgtgactctttttacatttcctaaaggtttgagaattaaatatatttaattatgaaaaaaaaaaaa

SEQ ID NO: 343020 - DNA, 2264 bp, Homo sapiens
ctgcagacagaactcagttagtcggggacaatttccctcaatgttaacagcactgttccaccgcaacgtggaacaacagctttaaaacgtgctcttcgtaggcccggctactccaagaacagtgcctcccgccagacccaggcggcttccttcacccgcaacccgagagacgacccgccgggcccgccccgcggaagccgccggttgccaggccaaggagtggactagggtcgccggggaagcggtttgggagagcccatggtgactgcgtgagtggagcccagctgtgtggatgccccagcatggatgactacatggtcctgagaatgattggggagggctccttcggcagagctcttttggttcagcatgaaagcagtaatcagatgtttgccatgaaagaaataaggcttcccaagtctttctctaatacacagaattctaggaaggaggctgttcttttagccaaaatgaaacaccctaatattgttgccttcaaagaatcatttgaagctgaaggacacttgtatattgtgatggaatactgtgatggaggggatctaatgcaaaagattaaacagcagaaaggaaagttatttcctgaagacatgatacttaattggtttacccaaatgtgccttggagtaaatcacattcacaagaaacgtgtgctacacagagatatcaagtccaagaatatcttcctcactcagaatggaaaagtgaaattgggagactttggatctgcccgtcttctctccaatccgatggcatttgcttgtacctatgtgggaactccttattatgtgcctccagaaatttgggaaaacctgccttataacaataaaagtgacatctggtccttgggttgcatcctgtatgaactctgtacccttaagcatccatttcaggcaaatagttggaaaaatcttatcctcaaagtatgtcaagggtgcatcagtccactgccgtctcattactcctatgaacttcagttcctagtcaagcagatgtttaaaaggaatccctcacatcgcccctcggctacaacgcttctctctcgaggcatcgtagctcggcttgtccagaagtgcttaccccccgagatcatcatggaatatggtgaggaagtattagaagaaataaaaaattcgaagcataacacaccaagaaaaaaaacaaaccccagcagaatcaggatagctttgggaaatgaagcaagcacagtgcaagaggaagaacaagatagaaagggtagccatactgatttggaaagcattaatgaaaatttagttgaaagtgcattgagaagagtaaacagagaagaaaaaggtaataagtcagtccatctgaggaaagccagttcaccaaatcttcatagacgacagtgggagaaaaatgtacccaatacagctcttacagctttggaaaatgcatccatactcacctccagtttaacagcagaggacgatagaggtggttctgtaataaagtacagcaaaaatactactcgtaagcagtggctcaaagagacccctgacactttgttgaacatccttaagaatgctgatctcagcttggcttttcaaacatacacaatatatagaccaggttcagaagggttcttgaaaggccccctgtctgaagaaacagaagcatcggacagtgttgatggaggtcacgattctgtcattttggatccagagcgacttgagcctgggctagatgaggaggacacggactttgaggaggaagatgacaaccccgactgggtgtcagagctgaagaagcgagctggatggcaaggcctgtgcgacagataatgcctgagttcatgcgacgtatattttcctttggaaacagaatgaagcagaggaaactcttaatacttaaaatcgttcttgattagtatcgtgagtttgaaaagtctagaactcctgtaagtttttgaactcaagggagaaggtatagtggaatgagtgtgagcatcgggctttgcagtcccatagaacagaaatgggatgctagcgtgccactacctacttgtgtgattgtgggaaattacttaacctcttcaagccccaatttcctcaaccataaaatgaagataataatgcctacctcagagggatgctgaccacagacctttatagcagcccgtatgatattattcacattatgatatgtgtttattattatgtgactctttttacatttcctaaaggtttgagaattaaatatatttaattatgaaaaaaaaaaaa

SEQ ID NO: 343021 - DNA, 2079 bp, Homo sapiens
ctgcagacagaactcagttagtcggggacaatttccctcaatgttaacagcactgttccaccgcaacgtggaacaacagctttaaaacgtgctcttcgtaggcccggctactccaagaacagtgcctcccgccagacccaggcggcttccttcacccgcaacccgagagacgacccgccgggcccgccccgcggaagccgccggttgccaggccaaggagtggactagggtcgccggggaagcggtttgggagagcccatggtgactgcgtgagtggagcccagctgtgtggatgccccagcatggatgactacatggtcctgagaatgattggggagggctccttcggcagagctcttttggttcagcatgaaagcagtaatcagatgtttgccatgaaagaaataaggcttcccaagtctttctctaatacacagaattctaggaaggaggctgttcttttagccaaaatgaaacaccctaatattgttgccttcaaagaatcatttgaagctgaaggacacttgtatattgtgatggaatactgtgatggaggggatctaatgcaaaagattaaacagcagaaaggaaagttatttcctgaagacatgatacttaattggtttacccaaatgtgccttggagtaaatcacattcacaagaaacgtgtgctacacagagatatcaagtccaagaatatcttcctcactcagaatggaaaagtgaaattgggagactttggatctgcccgtcttctctccaatccgatggcatttgcttgtacctatgtgggaactccttattatgtgcctccagaaatttgggaaaacctgccttataacaataaaagtgacatctggtccttgggttgcatcctgtatgaactctgtacccttaagcatccatttcaggcaaatagttggaaaaatcttatcctcaaagtatgtcaagggtgcatcagtccactgccgtctcattactcctatgaacttcagttcctagtcaagcagatgtttaaaaggaatccctcacatcgcccctcggctacaacgcttctctctcgaggcatcgtagctcggcttgtccagaagtgcttaccccccgagatcatcatggaatatggtgaggaagtattagaagaaataaaaaattcgaagcataacacaccaagaaaaaaaacaagaggaagaacaagatagaaagggtagccatactgatttggaaagcattaatgaaaatttagttgaaagtgcattgagaagagtaaacagagaagaaaaaggtaataagtcagtccatctgaggaaagccagttcaccaaatcttcatagacgacagtgggagaaaaatgtacccaatacagctcttacagctttggaaaatgcatccatactcacctccagtttaacagcagaggacgatagaggttcagaagggttcttgaaaggccccctgtctgaagaaacagaagcatcggacagtgttgatggaggtcacgattctgtcattttggatccagagcgacttgagcctgggctagatgaggaggacacggactttgaggaggaagatgacaaccccgactgggtgtcagagctgaagaagcgagctggatggcaaggcctgtgcgacagataatgcctgagttcatgcgacgtatattttcctttggaaacagaatgaagcagaggaaactcttaatacttaaaatcgttcttgattagtatcgtgagtttgaaaagtctagaactcctgtaagtttttgaactcaagggagaaggtatagtggaatgagtgtgagcatcgggctttgcagtcccatagaacagaaatgggatgctagcgtgccactacctacttgtgtgattgtgggaaattacttaacctcttcaagccccaatttcctcaaccataaaatgaagataataatgcctacctcagagggatgctgaccacagacctttatagcagcccgtatgatattattcacattatgatatgtgtttattattatgtgactctttttacatttcctaaaggtttgagaattaaatatatttaattatgaaaaaaaaaaaa

SEQ ID NO: 343022 - DNA, 1177 bp, Homo sapiens
ctgcagacagaactcagttagtcggggacaatttccctcaatgttaacagcactgttccaccgcaacgtggaacaacagctttaaaacgtgctcttcgtaggcccggctactccaagaacagtgcctcccgccagacccaggcggcttccttcacccgcaacccgagagacgacccgccgggcccgccccgcggaagccgccggttgccaggccaaggagtggactagggtcgccggggaagcggtttgggagagcccatggtgactgcgtgagtggagcccagctgtgtggatgccccagcatggatgactacatggtcctgagaatgattggggagggctccttcggcagagctcttttggttcagcatgaaagcagtaatcagatgtttgccatgaaagaaataaggcttcccaagtctttctctaatacacagaattctaggaaggaggctgttcttttagccaaaatgaaacaccctaatattgttgccttcaaagaatcatttgaagctgaaggacacttgtatattgtgatggaatactgtgatggaggggatctaatgcaaaagattaaacagcagaaaggaaagttatttcctgaagacatgatacttaattggtttacccaaatgtgccttggagtaaatcacattcacaagaaacgtgtgctacacagagatatcaagtccaagaatatcttcctcactcagaatggaaaagtgaaattgggagactttggatctgcccgtcttctctccaatccgatggcatttgcttgtacctatgtgggaactccttattatgtgcctccagaaatttgggaaaacctgccttataacaataaaagtgacatctggtccttgggttgcatcctgtatgaactctgtacccttaagcatccatttcaggcaaatagttggaaaaatcttatcctcaaagtatgtcaagggtgcatcagtccactgccgtctcattactcctatgaacttcagttcctagtcaagcagatgtttaaaaggaatccctcacatcgcccctcggctacaacgcttctctctcgaggcatcgtagctcggcttgtccagaagtgcttaccccccgagatcatcatgaatatgtgaggaatattagaagatataaatattcgaagcatattaaggatcgctctagatca

SEQ ID NO: 343023 - DNA, 636 bp, Homo sapiens
atttcttgattgtaagatgaatcattcagaatttcatcctcatagagtaagttagggataaatggttttggaaacttactttgcttgccatctttgttcatccttgatgcagtaatataccagcatactctttttttatctggaccagtggactcctctaagtgatgcagacagtcaaaacatgaaatccctcactcccttttttttttcttttaggataaaacatttctttttctttttttctacatcacaagtcatcaagcaaaagatacattatttttgatggtaaactggctctctaagtcaggtgatacttaggctgatattaaaactatttacattctgtatgtgtaaggaatgaaaaaagaaaataaaaatacaatgaaggggtcagctcaagcatgaaaatatagccagagttgaaaaatcaacatgcattttctcttgtcatttgacaaacttaagttgagccacagtgtgttataaaactgcatctagcattaaagtgtcatataaaccatgttattgtaaagttatgtattttaaaatgcagtattaagtttatgcttatttaaaatgtttttctagtctttctctaatacacagaattctaggaaggaggctgttcttttagcc

SEQ ID NO: 343024 - DNA, 447 bp, Homo sapiens
tttattgtgctatccaccataaaaagcatagcatactgtgtgtatgtaagtcctcccagggcttcattcttgtataatatagaatatgtaactatatacatattatttttttaactcagtcactgtaatggttcgttttaatttttcattttggatttttttttaaatttcctttgctacttagattagaaagaacattgatctttcaaacatagatctgaatatgaaagagaaaagaaacacttccatatttgttagagtctatgtgtggacagagatggatacataatttcacatgcttggcattcctttttcacactttaaaatcaggtaataagtcagtccatctgaggaaagccagttcaccaaatcttcatagacgacagtgggagaaaaatgtacccaatacagctcttacagctttggaaaatgcatccatactcacct

SEQ ID NO: 343025 - DNA, 2274 bp, Homo sapiens
ccgcaagtccctcgccgccttggggtctgggcgcgcggtgccgtgggggtcagcagggcggagcggcttttccaggagaaagggccctcacgggtgagcggggcgactgggctcccccgcggtgcagttgccccgcgggcgccggccccggctcaacggattcttctcgctcgctgcccggaaagaaccatttgggagagcccatggtgactgcgtgagtggagcccagctgtgtggatgccccagcatggatgactacatggtcctgagaatgattggggagggctccttcggcagagctcttttggttcagcatgaaagcagtaatcagatgtttgccatgaaagaaataaggcttcccaagtctttctctaatacacagaattctaggaaggaggctgttcttttagccaaaatgaaacaccctaatattgttgccttcaaagaatcatttgaagctgaaggacacttgtatattgtgatggaatactgtgatggaggggatctaatgcaaaagattaaacagcagaaaggaaagttatttcctgaagacatgatacttaattggtttacccaaatgtgccttggagtaaatcacattcacaagaaacgtgtgctacacagagatatcaagtccaagaatatcttcctcactcagaatggaaaagtgaaattgggagactttggatctgcccgtcttctctccaatccgatggcatttgcttgtacctatgtgggaactccttattatgtgcctccagaaatttgggaaaacctgccttataacaataaaagtgacatctggtccttgggttgcatcctgtatgaactctgtacccttaagcatccatttcaggcaaatagttggaaaaatcttatcctcaaagtatgtcaagggtgcatcagtccactgccgtctcattactcctatgaacttcagttcctagtcaagcagatgtttaaaaggaatccctcacatcgcccctcggctacaacgcttctctctcgaggcatcgtagctcggcttgtccagaagtgcttaccccccgagatcatcatggaatatggtgaggaagtattagaagaaataaaaaattcgaagcataacacaccaagaaaaaaaacaaaccccagcagaatcaggatagctttgggaaatgaagcaagcacagtgcaagaggaagaacaagatagaaagggtagccatactgatttggaaagcattaatgaaaatttagttgaaagtgcattgagaagagtaaacagagaagaaaaaggtaataagtcagtccatctgaggaaagccagttcaccaaatcttcatagacgacagtgggagaaaaatgtacccaatacagctcttacagctttggaaaatgcatccatactcacctccagtttaacagcagaggacgatagaggtggttctgtaataaagtacagcaaaaatactactcgtaagcagtggctcaaagagacccctgacactttgttgaacatccttaagaatgctgatctcagcttggcttttcaaacatacacaatatatagaccaggttcagaagggttcttgaaaggccccctgtctgaagaaacagaagcatcggacagtgttgatggaggtcacgattctgtcattttggatccagagcgacttgagcctgggctagatgaggaggacacggactttgaggaggaagatgacaaccccgactgggtgtcagagctgaagaagcgagctggatggcaaggcctgtgcgacagataatgcctgaggaaatgttcctgagtcacgctgaggagagccttcactcaggagttcatgctgagatgatcatgagttcatgcgacgtatattttcctttggaaacagaatgaagcagaggaaactcttaatacttaaaatcgttcttgattagtatcgtgagtttgaaaagtctagaactcctgtaagtttttgaactcaagggagaaggtatagtggaatgagtgtgagcatcgggctttgcagtcccatagaacagaaatgggatgctagcgtgccactacctacttgtgtgattgtgggaaattacttaacctcttcaagccccaatttcctcaaccataaaatgaagataataatgcctacctcagagggatgctgaccacagacctttatagcagcccgtatgatattattcacattatgatatgtgtttattattatgtgactctttttacatttcctaaaggtttgagaattaaatatatttaattatgaaaaaaaaaaaa

SEQ ID NO: 343026 - DNA, 2180 bp, Homo sapiens
ctgcagacagaactcagttagtcggggacaatttccctcaatgttaacagcactgttccaccgcaacgtggaacaacagctttaaaacgtgctcttcgtaggcccggctactccaagaacagtgcctcccgccagacccaggcggcttccttcacccgcaacccgagagacgacccgccgggcccgccccgcggaagccgccggttgccaggccaaggagtggactagggtcgccggggaagcggtttgggagagcccatggtgactgcgtgagtggagcccagctgtgtggatgccccagcatggatgactacatggtcctgagaatgattggggagggctccttcggcagagctcttttggttcagcatgaaagcagtaatcagatgtttgccatgaaagaaataaggcttcccaagtctttctctaatacacagaattctaggaaggaggctgttcttttagccaaaatgaaacaccctaatattgttgccttcaaagaatcatttgaagctgaaggacacttgtatattgtgatggaatactgtgatggaggggatctaatgcaaaagattaaacagcagaaaggaaagttatttcctgaagacatgatacttaattggtttacccaaatgtgccttggagtaaatcacattcacaagaaacgtgtgctacacagagatatcaagtccaagaatatcttcctcactcagaatggaaaagtgaaattgggagactttggatctgcccgtcttctctccaatccgatggcatttgcttgtacctatgtgggaactccttattatgtgcctccagaaatttgggaaaacctgccttataacaataaaagtgacatctggtccttgggttgcatcctgtatgaactctgtacccttaagcatccatttcaggcaaatagttggaaaaatcttatcctcaaagtatgtcaagggtgcatcagtccactgccgtctcattactcctatgaacttcagttcctagtcaagcagatgtttaaaaggaatccctcacatcgcccctcggctacaacgcttctctctcgaggcatcgtagctcggcttgtccagaagtgcttaccccccgagatcatcatggaatatggtgaggaagtattagaagaaataaaaaattcgaagcataacacaccaagaaaaaaaacaaaccccagcagaatcaggatagctttgggaaatgaagcaagcacagtgcaagaggaagaacaagatagaaagggtagccatactgatttggaaagcattaatgaaaatttagttgaaagtgcattgagaagagtaaacagagaagaaaaaggtaataagtcagtccatctgaggaaagccagttcaccaaatcttcatagacgacagtgggagaaaaatgtacccaatacagctcttacagctttggaaaatgcatccatactcacctccagtttaacagcagaggacgatagaggtggttctgtaataaagtacagcaaaaatactactcgtaagcagtggctcaaagagacccctgacactttgttgaacatccttaagaatgctgatctcagcttggcttttcaaacatacacaatatatagaccagaaccccgactgggtgtcagagctgaagaagcgagctggatggcaaggcctgtgcgacagataatgcctgaggaaatgttcctgagtcacgctgaggagagccttcactcaggagttcatgctgagatgatcatgagttcatgcgacgtatattttcctttggaaacagaatgaagcagaggaaactcttaatacttaaaatcgttcttgattagtatcgtgagtttgaaaagtctagaactcctgtaagtttttgaactcaagggagaaggtatagtggaatgagtgtgagcatcgggctttgcagtcccatagaacagaaatgggatgctagcgtgccactacctacttgtgtgattgtgggaaattacttaacctcttcaagccccaatttcctcaaccataaaatgaagataataatgcctacctcagagggatgctgaccacagacctttatagcagcccgtatgatattattcacattatgatatgtgtttattattatgtgactctttttacatttcctaaaggtttgagaattaaatatatttaattatgaaaaaaaaaaaa

SEQ ID NO: 343027 - DNA, 2008 bp, Homo sapiens
ctgcagacagaactcagttagtcggggacaatttccctcaatgttaacagcactgttccaccgcaacgtggaacaacagctttaaaacgtgctcttcgtaggcccggctactccaagaacagtgcctcccgccagacccaggcggcttccttcacccgcaacccgagagacgacccgccgggcccgccccgcggaagccgccggttgccaggccaaggagtggactagggtcgccggggaagcggtttgggagagcccatggtgactgcgtgagtggagcccagctgtgtggatgccccagcatggatgactacatggtcctgagaatgattggggagggctccttcggcagagctcttttggttcagcatgaaagcagtaatcagatgtttgccatgaaagaaataaggcttcccaagtctttctctaatacacagaattctaggaaggaggctgttcttttagccaaaatgaaacaccctaatattgttgccttcaaagaatcatttgaagctgaaggacacttgtatattgtgatggaatactgtgatggaggggatctaatgcaaaagattaaacagcagaaaggaaagttatttcctgaagacatgatacttaattggtttacccaaatgtgccttggagtaaatcacattcacaagaaacgtgtgctacacagagatatcaagtccaagaatatcttcctcactcagaatggaaaagtgaaattgggagactttggatctgcccgtcttctctccaatccgatggcatttgcttgtacctatgtgggaactccttattatgtgcctccagaaatttgggaaaacctgccttataacaataaaagtgacatctggtccttgggttgcatcctgtatgaactctgtacccttaagcatccatttcaggcaaatagttggaaaaatcttatcctcaaagtatgtcaagggtgcatcagtccactgccgtctcattactcctatgaacttcagttcctagtcaagcagatgtttaaaaggaatccctcacatcgcccctcggctacaacgcttctctctcgaggcatcgtagctcggcttgtccagaagtgcttaccccccgagatcatcatggaatatggtgaggaagtattagaagaaataaaaaattcgaagcataacacaccaagaaaaaaaacaaaccccagcagaatcaggatagctttgggaaatgaagcaagcacagtgcaagaggaagaacaagatagaaagggtagccatactgatttggaaagcattaatgaaaatttagttgaaagtgcattgagaagagtaaacagagaagaaaaaggtaataagtcagtccatctgaggaaagccagttcaccaaatcttcatagacgacagtgggagaaaaatgtacccaatacagctcttacagctttggaaaatgcatccatactcacctccagtttaacagcagaggacgatagaggtggttctgtaataaagtacagcaaaaatactactcgtaagcagtggctcaaagagacccctgacactttgttgaacatccttaagaatgctgatctcagcttggcttttcaaacatacacaatatatagaccaggttcagaagggttcttgaaaggccccctgtctgaagaaacagaagcatcggacagtgttgatggaggtcacgattctgtcattttggatccagagcgacttgagcctgggctagatgaggaggacacgtacgttgtgatatgcatagaaagctgtagctggggttgggggtgtgtgtgtgtgtgatttaaattagaccatgataatttcagatttagtagggacctcttatattacttttcatcataaatggatatttatatcctgatcttttgtctgggatgggtaatgccttacaatatgattataaaattcctgattgagccctacacctatagcctttcagcttggacttgttattttttaatatattaggatttatatttttaaaagtttta

SEQ ID NO: 343028 - DNA, 3425 bp, Homo sapiens
gctgagattacaggcatgagccaccatactcagccatagtttcctaatccatcattgcttttttgatatcctggactcactccattgtggacagcaccccactttatgtttttttctctcaaatgggagctttcttgatggaaacctgtagtccagaaacctattaagtttgctttccccggttttccgttgttttcttttaggcatctgggaacaaagtcagtcgccagtcagtgttgtgtggaagccagaacatcgttctcaatggcaagaccattgtgatgaatgactgtattatccgaggggatctggcaaatgtaagagttggacgtcattgtgttgtgaaaagtcgtagtgtcataaggccaccattcaagaagttcagcaaaggtgttgcattctttcctttacatattggagaccatgtctttattgaggaagattgtgtggtcaacgcagcacagattggttcctatgttcatgttgggaagaactgtgtgattgggcgccgatgtgtgttgaaagactgctgcaaaattcttgacaacacagtattacctccagaaactgtggttccaccattcactgtcttctcaggctgcccaggactcttctcaggggagctcccggagtgcactcaggagctgatgattgacgtcaccaagagctactaccagaagtttttgcccctgacgcaagtctagcatctctgcctcatgtcttgaatctgcttgagctctaagatgaacctggggacaaagtgagccagtcagcacctacaaagagcttttgtgtctttgacatctaccaccctcctccttttaaaaaatttctttagaatttctcaatcttcaaggctctaagtgcttaagaattcactaacagacagaccatctggaggagctgtcttcaaatgctgtgcttacaccttatctatgaacagtcactttgtaccattatctgtggaacacagaatcatctgttcccaacactccagccccttggtcctgtggatggctggatcccgcctgaaacggacctgcagagcagcagcacccttccggtgtggaggctatgtagctggtgcgctgctcacggccattcactgcccatgctgagcgcctctcacacaggtaatgcccagcttttctgctgctaacacatttggccagttgttgcagttgctcatcatcttgggaaaggtgtttgtgacttttcagagcccagattcctgttgtctattaaaacttgaagggaggggtgaatagtgtttctctcttcttcccaaaatgaccttagctgtcctaggatagttagtaaaagactttttagcattttgacctagggcctttggctttcactaaaagtggggacctcagtatcccagattgtaattttgccaagtgttagatttgagtctctcatgtggatgcattagtcaggtggttactccttgcttcaaggtacttaccttatttcattgaagacaccgcatttgtgaactcttgcttcctggcctagaaccattcagcctaccctgtatttgccataaactccacaattcacaccaaaatgtctgtacttagagctaattcgcatatatacaggaagggctcttagaatcagtttgtgggcacagagcctcaggagtaaatgaagttactagggctgttcttaccatctccttctggccaaatagcacaacatttcctcgttctgctctgacctcttagcttagaaggaagattcagaagtgaggggctaagaaggttgtccttgcctaatgctctgatctgtaagtgaatagggcagaacagttcagccttgaggttagaatttagcaggagctatcctgacttaatatccagttgtggggtttgcaaaacaaaacagctgtatgtaatcattgccactagttccatctagaactcctttctagtttgttatttttaaaatgtttatacataaaaccaccaaaatacatagcttcgacaagatggaagtttatttctctctcccataacagtgcagtgatagtcagctggtccaggccaggcaaggggctggtccatgatgtcatcaggcacccaggttcctactgtcttgccatgtggccacagttagcaacaaaggaggctgtaaatttagtttctacttgggcagccaaaactctgaggaaggagattctgctagtaaaaaggagtgggggaagaatggccattgggagacaacaagcagactcaaccaggcctctttgttggcttcctttcctcctgctgcacatgagccttcgccgtgcatttggagccatgacagctgatagctccagacctgcatcctcctagcttgggggctctgaatgaaaggtttcttcccttccagttcgaatttggaaactcccaaagttctcaatggtttgttgtgagttccatgtcctcttggatcagtcactgtggccatgcatgtttggccacatgattaatccagtctgggtcatgaccttttcttcatccaaaacaaggtgatgggaagacaaaaacaatagctactacaaacaataggagtttataattatgtgctgatgtattcgaagatgtgttgacagtcgtgagtgtgtatcctaggaaaggcgagctggactctgtctccatggtggctctcaccccagggacctaggaacagcctgtcaccacacaattacttttataaccctggagatgaaaatctccttgtcctcaaaatacttccagaagaacaaccagatgggaaggaccttggttgggactctttccagttcacttggggcagagggaatttaatggctcacgtagctgaaaaggatgggctagattgggcttcaggctgcatcccaggactccaaacagggatctgtctctttggctctcagctctgctttcatttgagttggctttattcttgggcttcacagtgtggccccacagcaccagttattgataaaaagagctcccctttgctgacagaactgctggatttggttctcattggtccagacgaggaaggtatccagcctcaagtcatcattgtggccaggaagatggaatacaccaaatggacaggcctggcatgtacccacagagactgagagttggtgctggtggttgtggtggcagatgatattacctgaagaagggacgaatgggtgctgggcaggacaaagcatcagctgtccagttcaggcctctcctctttccctggtgtcttcattttcctccgtctccctgctgtcccttaccctctgcccaatctctcattactcctggtcttgggagttgccttctgaggatactccactgggggtacctgagcctggattagagggcagggggaggatattgcctagccaaagtgggtgttcaataaagaaccatttggagatggtcttc

SEQ ID NO: 343029 - DNA, 2287 bp, Homo sapiens
gcggaagtggaggagcggccggaagtagccggaatctctgaaagactgaccgactgactctgacaggatccggggctgagggaaggaggcggcggccatggagttgggcgagctgctctacaacaagtctgagtacatcgagacggcatctgggaacaaagtcagtcgccagtcagtgttgtgtggaagccagaacatcgttctcaatggcaagaccattgtgatgaatgactgtattatccgaggggatctggcaaatgtaagagttggacgtcattgtgttgtgaaaagtcgtagtgtcataaggccaccattcaagaagttcagcaaaggtgttgcattctttcctttacatattggagaccatgtctttattgaggaagattgtgtggtcaacgcagcacagattggttcctatgttcatgttgggaagaactgtgtgattgggcgccgatgtgtgttgaaagactgctgcaaaattcttgacaacacagtattacctccagaaactgtggttccaccattcactgtcttctcaggctgcccaggactcttctcaggggagctcccggagtgcactcaggagctgatgattgacgtcaccaagagctactaccagaagtttttgcccctgacgcaagtctagcatctctgcctcatgtcttgaatctgcttgagctctaagatgaacctggggacaaagtgagccagtcagcacctacaaagagcttttgtgtctttgacatctaccaccctcctccttttaaaaaatttctttagaatttctcaatcttcaaggctctaagtgcttaagaattcactaacagacagaccatctggaggagctgtcttcaaatgctgtgcttacaccttatctatgaacagtcactttgtaccattatctgtggaacacagaatcatctgttcccaacactccagccccttggtcctgtggatggctggatcccgcctgaaacggacctgcagagcagcagcacccttccggtgtggaggctatgtagctggtgcgctgctcacggccattcactgcccatgctgagcgcctctcacacaggtaatgcccagcttttctgctgctaacacatttggccagttgttgcagttgctcatcatcttgggaaaggtgtttgtgacttttcagagcccagattcctgttgtctattaaaacttgaagggaggggtgaatagtgtttctctcttcttcccaaaatgaccttagctgtcctaggatagttagtaaaagactttttagcattttgacctagggcctttggctttcactaaaagtggggacctcagtatcccagattgtaattttgccaagtgttagatttgagtctctcatgtggatgcattagtcaggtggttactccttgcttcaaggtacttaccttatttcattgaagacaccgcatttgtgaactcttgcttcctggcctagaaccattcagcctaccctgtatttgccataaactccacaattcacaccaaaatgtctgtacttagagctaattcgcatatatacaggaagggctcttagaatcagtttgtgggcacagagcctcaggagtaaatgaagttactagggctgttcttaccatctccttctggccaaatagcacaacatttcctcgttctgctctgacctcttagcttagaaggaagattcagaagtgaggggctaagaaggttgtccttgcctaatgctctgatctgtaagtgaatagggcagaacagttcagccttgaggttagaatttagcaggagctatcctgacttaatatccagttgtggggtttgcaaaacaaaacagctgtatgtaatcattgccactagttccatctagaactcctttctagtttgttatttttaaaatgtttatacataaaaccaccaaaatacatagcttcgacaagatggaatacaccaaatggacaggcctggcatgtacccacagagactgagagttggtgctggtggttgtggtggcagatgatattacctgaagaagggacgaatgggtgctgggcaggacaaagcatcagctgtccagttcaggcctctcctctttccctggtgtcttcattttcctccgtctccctgctgtcccttaccctctgcccaatctctcattactcctggtcttgggagttgccttctgaggatactccactgggggtacctgagcctggattagagggcagggggaggatattgcctagccaaagtgggtgttcaataaagaaccatttggagatggtcttc

SEQ ID NO: 343030 - DNA, 2470 bp, Homo sapiens
gcggaagtggaggagcggccggaagtagccggaatctctgaaagactgaccgactgactctgacaggatccggggctgagggaaggaggcggcggccatggagttgggcgagctgctctacaacaagtctgagtacatcgagacggcatctgggaacaaagtcagtcgccagtcagtgttgtgtggaagccagaacatcgttctcaatggcaagaccattgtgatgaatgactgtattatccgaggggatctggcaaatgtaagagttggacgtcattgtgttgtgaaaagtcgtagtgtcataaggccaccattcaagaagttcagcaaaggtgttgcattctttcctttacatattggagaccatgtctttattgaggaagattgtgtggtcaacgcagcacagattggttcctatgttcatgttgggaagaactgtgtgattgggcgccgatgtgtgttgaaagactgctgcaaaattcttgacaacacagtattacctccagaaactgtggttccaccattcactgtcttctcaggctgcccaggactcttctcaggggagctcccggagtgcactcaggagctgatgattgacgtcaccaagagctactaccagaagtttttgcccctgacgcaagtctagcatctctgcctcatgtcttgaatcttttgtgggcacagagcctcaggagtaaatgaagttactagggctgttcttaccatctccttctggccaaatagcacaacatttcctcgttctgctctgacctcttagcttagaaggaagattcagaagtgaggggctaagaaggttgtccttgcctaatgctctgatctgtaagtgaatagggcagaacagttcagccttgaggttagaatttagcaggagctatcctgacttaatatccagttgtggggtttgcaaaacaaaacagctgtatgtaatcattgccactagttccatctagaactcctttctagtttgttatttttaaaatgtttatacataaaaccaccaaaatacatagcttcgacaagatggaagtttatttctctctcccataacagtgcagtgatagtcagctggtccaggccaggcaaggggctggtccatgatgtcatcaggcacccaggttcctactgtcttgccatgtggccacagttagcaacaaaggaggctgtaaatttagtttctacttgggcagccaaaactctgaggaaggagattctgctagtaaaaaggagtgggggaagaatggccattgggagacaacaagcagactcaaccaggcctctttgttggcttcctttcctcctgctgcacatgagccttcgccgtgcatttggagccatgacagctgatagctccagacctgcatcctcctagcttgggggctctgaatgaaaggtttcttcccttccagttcgaatttggaaactcccaaagttctcaatggtttgttgtgagttccatgtcctcttggatcagtcactgtggccatgcatgtttggccacatgattaatccagtctgggtcatgaccttttcttcatccaaaacaaggtgatgggaagacaaaaacaatagctactacaaacaataggagtttataattatgtgctgatgtattcgaagatgtgttgacagtcgtgagtgtgtatcctaggaaaggcgagctggactctgtctccatggtggctctcaccccagggacctaggaacagcctgtcaccacacaattacttttataaccctggagatgaaaatctccttgtcctcaaaatacttccagaagaacaaccagatgggaaggaccttggttgggactctttccagttcacttggggcagagggaatttaatggctcacgtagctgaaaaggatgggctagattgggcttcaggctgcatcccaggactccaaacagggatctgtctctttggctctcagctctgctttcatttgagttggctttattcttgggcttcacagtgtggccccacagcaccagttattgataaaaagagctcccctttgctgacagaactgctggatttggttctcattggtccagacgaggaaggtatccagcctcaagtcatcattgtggccaggaagatggaatacaccaaatggacaggcctggcatgtacccacagagactgagagttggtgctggtggttgtggtggcagatgatattacctgaagaagggacgaatgggtgctgggcaggacaaagcatcagctgtccagttcaggcctctcctctttccctggtgtcttcattttcctccgtctccctgctgtcccttaccctctgcccaatctctcattactcctggtcttgggagttgccttctgaggatactccactgggggtacctgagcctggattagagggcagggggaggatattgcctagccaaagtgggtgttcaataaagaaccatttggagatggtcttc

SEQ ID NO: 343031 - DNA, 1452 bp, Homo sapiens
cagaacaaaaacaaaagatagacaggccgcgaggtaatcaggccgaggtacagtgcagtgatagtcagctggtccaggccaggcaaggggctggtccatgatgtcatcaggcacccaggttcctactgtcttgccatgtggccacagttagcaacaaaggaggctgtaaatttagtttctacttgggcagccaaaactctgaggaaggagattctgctagtaaaaaggagtgggggaagaatggccattgggagacaacaagcagactcaaccaggcctctttgttggcttcctttcctcctgctgcacatgagccttcgccgtgcatttggagccatgacagctgatagctccagacctgcatcctcctagcttgggggctctgaatgaaaggtttcttcccttccagttcgaatttggaaactcccaaagttctcaatggtttgttgtgagttccatgtcctcttggatcagtcactgtggccatgcatgtttggccacatgattaatccagtctgggtcatgaccttttcttcatccaaaacaaggtgatgggaagacaaaaacaatagctactacaaacaataggagtttataattatgtgctgatgtattcgaagatgtgttgacagtcgtgagtgtgtatcctaggaaaggcgagctggactctgtctccatggtggctctcaccccagggacctaggaacagcctgtcaccacacaattacttttataaccctggagatgaaaatctccttgtcctcaaaatacttccagaagaacaaccagatgggaaggaccttggttgggactctttccagttcacttggggcagagggaatttaatggctcacgtagctgaaaaggatgggctagattgggcttcaggctgcatcccaggactccaaacagggatctgtctctttggctctcagctctgctttcatttgagttggctttattcttgggcttcacagtgtggccccacagcaccagttattgataaaaagagctcccctttgctgacagaactgctggatttggttctcattggtccagacgaggaaggtatccagcctcaagtcatcattgtggccaggaagatggaatacaccaaatggacaggcctggcatgtacccacagagactgagagttggtgctggtggttgtggtggcagatgatattacctgaagaagggacgaatgggtgctgggcaggacaaagcatcagctgtccagttcaggcctctcctctttccctggtgtcttcattttcctccgtctccctgctgtcccttaccctctgcccaatctctcattactcctggtcttgggagttgccttctgaggatactccactgggggtacctgagcctggattagagggcagggggaggatattgcctagccaaagtgggtgttcaataaagaaccatttggagatggtcttc

SEQ ID NO: 343032 - DNA, 607 bp, Homo sapiens
gcggaagtggaggagcggccggaagtagccggaatctctgaaagactgaccgactgactctgacaggatccggggctgagggaaggaggcggcggccatggagttgggcgagctgctctacaacaagtctgagtacatcgagacggcatctgggaacaaagtcagtcgccagtcagtgttgtgtggaagccagaacatcgttctcaatggcaagaactttgtcatttctgttttcctgagcccatatatcagatgtcacagtgcctgcagggatagaaagagatcagatgagtcagtaagactgagtgtgaacaatagagagtggtggggcctggtgaattggagaatgtgaccaatctaagcccaagctggttgttactgtgtgggaatacaggcccacgtggcaacaatcagctttccagagcgtctgattctttttcaaaagcaactggaaatctcactttttaaaatgcaagatgttccactactcaaatagtaatgtttaattttaaatgatttgttaaaatgccacgtgtccttcctgtaggagatagctaaaaaaaattaaaagaaataaataataaaaatgctgcatgagccaaacaaa

SEQ ID NO: 343033 - DNA, 592 bp, Homo sapiens
agctgaaatcatgtagcatatacagaggcacgtcataaattcacagatggaaaataatatgaacagagagatttggacagtatatgatacctaccactgagtggtttaattgtttttccaattaaaaaataaatctcatctctcagatcattgaatctgagtttctaagatgaacaaaatcatcactcagattcttcggggaggcatttggccattctaccgtgtcatgcatctctgcttttgcagaggaggaaggagagacttttgtttagtaatttctccatattggggtcctgctgtgaaaaagtttagctgttcttagcaagcactggaccagaacagcctcagcgattatttaagtgattgtcagacatgcatctgattgaggtgagaaggatattgccagagaaatatcttaacttcttgtaacttcttcaagctccttagagctgggtctttctttccccaggactcttctcaggggagctcccggagtgcactcaggagctgatgattgacgtcaccaagagctactaccagaagtttttgcccctgacgcaagtctagcatctctgcctcatgtcttgaatct

SEQ ID NO: 343034 - DNA, 3367 bp, Homo sapiens
gcggaagtggaggagcggccggaagtagccggaatctctgaaagactgaccgactgactctgacaggatccggggctgagggaaggaggcggcggccatggagttgggcgagctgctctacaacaagtctgagtacatcgagacggcatctgggaacaaagtcagtcgccagtcagtgttgtgtggaagccagaacatcgttctcaatggcaagaccattgtgatgaatgactgtattatccgaggggatctggcaaatgtaagagttggacgtcattgtgttgtgaaaagtcgtagtgtcataaggccaccattcaagaagttcagcaaaggtgttgcattctttcctttacatattggagaccatgtctttattgaggaagattgtgtggtcaacgcagcacagattggttcctatgttcatgttgggaagaactgtgtgattgggcgccgatgtgtgttgaaagactgctgcaaaattcttgacaacacagtattacctccagaaactgtggttccaccattcactgtcttctcaggctgcccaggactcttctcaggggagctcccggagtgcactcaggagctgatgattgacgtcaccaagagctactaccagaagtttttgcccctgacgcaagtctagcatctctgcctcatgtcttgaatctgcttgagctctaagatgaacctggggacaaagtgagccagtcagcacctacaaagagcttttgtgtctttgacatctaccaccctcctccttttaaaaaatttctttagaatttctcaatcttcaaggctctaagtgcttaagaattcactaacagacagaccatctggaggagctgtcttcaaatgctgtgcttacaccttatctatgaacagtcactttgtaccattatctgtggaacacagaatcatctgttcccaacactccagccccttggtcctgtggatggctggatcccgcctgaaacggacctgcagagcagcagcacccttccggtgtggaggctatgtagctggtgcgctgctcacggccattcactgcccatgctgagcgcctctcacacaggtaatgcccagcttttctgctgctaacacatttggccagttgttgcagttgctcatcatcttgggaaaggtgtttgtgacttttcagagcccagattcctgttgtctattaaaacttgaagggaggggtgaatagtgtttctctcttcttcccaaaatgaccttagctgtcctaggatagttagtaaaagactttttagcattttgacctagggcctttggctttcactaaaagtggggacctcagtatcccagattgtaattttgccaagtgttagatttgagtctctcatgtggatgcattagtcaggtggttactccttgcttcaaggtacttaccttatttcattgaagacaccgcatttgtgaactcttgcttcctggcctagaaccattcagcctaccctgtatttgccataaactccacaattcacaccaaaatgtctgtacttagagctaattcgcatatatacaggaagggctcttagaatcagtttgtgggcacagagcctcaggagtaaatgaagttactagggctgttcttaccatctccttctggccaaatagcacaacatttcctcgttctgctctgacctcttagcttagaaggaagattcagaagtgaggggctaagaaggttgtccttgcctaatgctctgatctgtaagtgaatagggcagaacagttcagccttgaggttagaatttagcaggagctatcctgacttaatatccagttgtggggtttgcaaaacaaaacagctgtatgtaatcattgccactagttccatctagaactcctttctagtttgttatttttaaaatgtttatacataaaaccaccaaaatacatagcttcgacaagatggaagtttatttctctctcccataacagtgcagtgatagtcagctggtccaggccaggcaaggggctggtccatgatgtcatcaggcacccaggttcctactgtcttgccatgtggccacagttagcaacaaaggaggctgtaaatttagtttctacttgggcagccaaaactctgaggaaggagattctgctagtaaaaaggagtgggggaagaatggccattgggagacaacaagcagactcaaccaggcctctttgttggcttcctttcctcctgctgcacatgagccttcgccgtgcatttggagccatgacagctgatagctccagacctgcatcctcctagcttgggggctctgaatgaaaggtttcttcccttccagttcgaatttggaaactcccaaagttctcaatggtttgttgtgagttccatgtcctcttggatcagtcactgtggccatgcatgtttggccacatgattaatccagtctgggtcatgaccttttcttcatccaaaacaaggtgatgggaagacaaaaacaatagctactacaaacaataggagtttataattatgtgctgatgtattcgaagatgtgttgacagtcgtgagtgtgtatcctaggaaaggcgagctggactctgtctccatggtggctctcaccccagggacctaggaacagcctgtcaccacacaattacttttataaccctggagatgaaaatctccttgtcctcaaaatacttccagaagaacaaccagatgggaaggaccttggttgggactctttccagttcacttggggcagagggaatttaatggctcacgtagctgaaaaggatgggctagattgggcttcaggctgcatcccaggactccaaacagggatctgtctctttggctctcagctctgctttcatttgagttggctttattcttgggcttcacagtgtggccccacagcaccagttattgataaaaagagctcccctttgctgacagaactgctggatttggttctcattggtccagacgaggaaggtatccagcctcaagtcatcattgtggccaggaagatggaatacaccaaatggacaggcctggcatgtacccacagagactgagagttggtgctggtggttgtggtggcagatgatattacctgaagaagggacgaatgggtgctgggcaggacaaagcatcagctgtccagttcaggcctctcctctttccctggtgtcttcattttcctccgtctccctgctgtcccttaccctctgcccaatctctcattactcctggtcttgggagttgccttctgaggatactccactgggggtacctgagcctggattagagggcagggggaggatattgcctagccaaagtgggtgttcaataaagaaccatttggagatggtcttc

SEQ ID NO: 343035 - DNA, 1498 bp, Homo sapiens
gcggaagtggaggagcggccggaagtagccggaatctctgaaagactgaccgactgactctgacaggatccggggctgagggaaggaggcggcggccatggagttgggcgagctgctctacaacaagtctgagtacatcgagacggcatctgggaacaaagtcagtcgccagtcagtgttgtgtggaagccagaacatcgttctcaatggcaagaccattgtgatgaatgactgtattatccgaggggatctggcaaatgtaagagttggacgtcattgtgttgtgaaaagtcgtagtgtcataaggccaccattcaagaagttcagcaaaggtgttgcattctttcctttacatattggagaccatgtctttattgaggaagattgtgtggtcaacgcagcacagattggttcctatgttcatgttgggaagaactgtgtgattgggcgccgatgtgtgttgaaagactgctgcaaaattcttgacaacacagtattacctccagaaactgtggttccaccattcactgtcttctcaggctgcccaggactcttctcaggggagctcccggagtgcactcaggagctgatgattgacgtcaccaagagctactaccagaagtttttgcccctgacgcaagtctagcatctctgcctcatgtcttgaatctgcttgagctctaagatgaacctggggacaaagtgagccagtcagcacctacaaagagcttttgtgtctttgacatctaccaccctcctccttttaaaaaatttctttagaatttctcaatcttcaaggctctaagtgcttaagaattcactaacagacagaccatctggaggagctgtcttcaaatgctgtgcttacaccttatctatgaacagtcactttgtaccattatctgtggaacacagaatcatctgttcccaacactccagccccttggtcctgtggatggctggatcccgcctgaaacggacctgcagagcagcagcacccttccggtgtggaggctatgtagctggtgcgctgctcacggccattcactgcccatgctgagcgcctctcacacagaactgctggatttggttctcattggtccagacgaggaaggtatccagcctcaagtcatcattgtggccaggaagatggaatacaccaaatggacaggcctggcatgtacccacagagactgagagttggtgctggtggttgtggtggcagatgatattacctgaagaagggacgaatgggtgctgggcaggacaaagcatcagctgtccagttcaggcctctcctctttccctggtgtcttcattttcctccgtctccctgctgtcccttaccctctgcccaatctctcattactcctggtcttgggagttgccttctgaggatactccactgggggtacctgagcctggattagagggcagggggaggatattgcctagccaaagtgggtgttcaataaagaaccatttggagatggtcttc

SEQ ID NO: 343036 - DNA, 1206 bp, Homo sapiens
gcggaagtggaggagcggccggaagtagccggaatctctgaaagactgaccgactgactctgacaggatccggggctgagggaaggaggcggcggccatggagttgggcgagctgctctacaacaagtctgagtacatcgagacggcatctgggaacaaagtcagtcgccagtcagtgttgtgtggaagccagaacatcgttctcaatggcaagaccattgtgatgaatgactgtattatccgaggggatctggcaaatgtaagagttggacgtcattgtgttgtgaaaagtcgtagtgtcataaggccaccattcaagaagttcagcaaaggtgttgcattctttcctttacatattggagaccatgtctttattgaggaagattgtgtggtcaacgcagcacagattggttcctatgttcatgttgggaagaactgtgtgattgggcgccgatgtgtgttgaaagactgctgcaaaattcttgacaacacagtattacctccagaaactgtggttccaccattcactgtcttctcaggctgcccaggactcttctcaggggagctcccggagtgcactcaggagctgatgattgacgtcaccaagagctactaccagaagtttttgcccctgacgcaagtctagcatctctgcctcatgtcttgaatctgcttgagctctaagatgaacctggggacaaagtgagccagtcagcacctacaaagagcttttgtgtctttgacatctaccaccctcctccttttaaaaaatttctttagaatttctcaatcttcaaggctctaagtgcttaagaattcactaacagacagaccatctggaggagctgtcttcaaatgctgtgcttacaccttatctatgaacagtcactttgtaccattatctgtggaacacagaatcatctgttcccaacactccagccccttggtcctgtggatggctggatcccgcctgaaacggacctgcagagcagcagcacccttccggtgtggaggctatgtagctggtgcgctgctcacggccattcactgcccatgctgagcgcctctcacacaggtaatgcccagcttttctgctgctaacacatttggccagttgttgcagttgctcatcatcttgggaaaggtgtttgtgacttttcagagcccagattcctgttgtctattaaaacttgaagggaggggtga

SEQ ID NO: 343037 - DNA, 748 bp, Homo sapiens
ctttggcctccattctctcttctcacctacaagtattggccctttcagatgccagtaggtgcttacacacatacacatacacacacaaacacacacacacacacaaacactctgaccatccctacttcctagttctctaattcagcctctactcattgccctgactccatatgaaaaaggcccaggcactaaactaaccaagagaaacttctccttagaaggtagtgttactaggaaagttgagtaatagacaatagaattctcttttgcagagagaagaggagaaagtccatgaacactcacagtggcatgtggcaagaggtggtggatgctggaagctaatgcctagtagtgctaaatgtcaccactcagatcagctgggcccagcttcagaaaagatgctctttatatccaagttaaacctctgctgcagacagaaccccagcacagccattaataaaccacaccaccctacctccaaaagtttctcaacacactgcctggctatatccatctctacattacctgggataacgcagtaaatagagaggggtatttcccaggtctctgtctatagcagagattcatcttggtgctgggagaagttaacaattacctgaatatgaggaactgtgggcctagcaccatgaagaacttctaaaatagctctgcttgtacaaatagttcgttctgtcactctccatgcactgaggaagtttgggaggcagtgaggactaaaacagagaaa

SEQ ID NO: 343038 - DNA, 612 bp, Homo sapiens
  misc_feature (18)..(18): n is a, c, g, or t
  misc_feature (26)..(26): n is a, c, g, or t
  misc_feature (79)..(79): n is a, c, g, or t
gcctagaagggaaggatnggaggtangtggctttggtgacacactcacttctttctcagcctccaggacactatggccngttttaagagacatcttatttttctaaaggtgaattctcagatgataggtgaacctgagttgcagatataccaacttctgcttgtatttcttaaatgacaaagattacctggctagacccaggataaagacttggttctgcattctatggtgtggtcatcttggctggtcagaaacctaaaacaatgtaatttaaatcaatttactttatcctgataaataaggaatggggtttcattgaactattttaatatactgatccaaaacaatttcacatatgaattccaaggcagctagaagaatggcaaatgcgtgaaattaacttggtgggtgaactagaaccatatcaagaaatatttcaaaaatcacaccaatcttactaaggccactattcagagaacttgtcccttaatgccatggttcagcatcaccattcactgtgatttatatgcctgaactacatagttcactcaaagtcatattgctggtactgtatcagccaggataaagacttggttctgcattctatggtgt

SEQ ID NO: 343039 - DNA, 480 bp, Homo sapiens
  misc_feature (52)..(53): n is a, c, g, or t
atgcagcaaatgaggcacaagaagttagtaccccgctaggtagtaagaggtnntcctgggtctagccaggataaagacttggttctgcattctatggtgtggtcatcttggctggtcagaaacctaaaacaatgtaatttaaatcaatttactttatcctgataaataaggaatggggtttcattgaactattttaatatactgatccaaaacaatttcacatatgaattccaaggcagctagaagaatggcaaatgcgtgaaattaacttggtgggtgaactagaaccatatcaagaaatatttcaaaaatcacaccaatcttactaaggccactattcagagaacttgtcccttaatgccatggttcagcatcaccattcactgtgatttatatgcctgaactacatagttcactcaaagtcatattgctggtactgtatcagccaggataaagacttggttctgcattctatggtgt

SEQ ID NO: 343040 - DNA, 555 bp, Homo sapiens
  misc_feature (12)..(12): n is a, c, g, or t
  misc_feature (19)..(19): n is a, c, g, or t
atggtgtctagnggatccntcgctatcatcggacccttcagcagcttctcatagggcatagaacaaaatccacactcttccctgaggcccacaaagccctgtcccccgtgactgctgcctccctctagggaacacatgccttccagccgttcctgcctcctggcctttgtctctgctgttcctacccccaagacagccttgtgccccagacactaccaggtagctcttcatcactcagccttccctgaccaccattcatcagggcttgctcagccagtcgccctgtcacatcatccagacaagggctttcttcacagtcctggccacctctgaaatgcccctgtttatatttctttatgcattgcctgcctgtctcctcccgccccacactgtatgctcctataaggccagaggtttgccatcttgctctgcactgctacctctgcccttagcacagcacctaagcacatgagcatgcatgaagccttaatgaatggtggttgccttattgtcttccccattggttgggccatgacagatgcaagagagtctgtg

SEQ ID NO: 343041 - DNA, 590 bp, Homo sapiens
cgtctcaaaaaaataaattaataaaaaataaaagcagaaatcagataacattgtatctctgcctagcacccttcagcagcttctcatagggcatagaacaaaatccacactcttccctgaggcccacaaagccctgtcccccgtgactgctgcctccctctagggaacacatgccttccagccgttcctgcctcctggcctttgtctctgctgttcctacccccaagacagccttgtgccccagacactaccaggtagctcttcatcactcagccttccctgaccaccattcatcagggcttgctcagccagtcgccctgtcacatcatccagacaagggctttcttcacagtcctggccacctctgaaatgcccctgtttatatttctttatgcattgcctgcctgtctcctcccgccccacactgtatgctcctataaggccagaggtttgccatcttgctctgcactgctacctctgcccttagcacagcacctaagcacatgagcatgcatgaagccttaatgaatggtggttgccttattgtcttccccattggttgggccatgacagatgcaagagagtctgtg

SEQ ID NO: 343042 - DNA, 398 bp, Homo sapiens
  misc_feature (12)..(12): n is a, c, g, or t
  misc_feature (19)..(19): n is a, c, g, or t
atggtgtctagnggatccntcgctatcatcggacccttcagcagcttctcatagggcatagaacaaaatccacactcttccctgaggcccacaaagccctgtcccccgtgactgctgcctccctctagggaacacatgccttccagccgttcctgcctcctggcctttgtctctgctgttcctacccccaagacagccttgtgccccagacactaccaggtagctcttcatcactcagccttccctgaccaccattcatcagggcttgctcagccagtcgccctctttagcccgatacctcccccagcccgcaggtcaatgggtgataccattgtggtcacataaccagccacaaagcagaagagttctccatgtggtgccgatgaatagcgagggta

SEQ ID NO: 343043 - DNA, 375 bp, Homo sapiens
cattgaacacctgccgtttggtcaagcatttctaggcactggagattcaaagtattcacatattccttttctttataagactagcaagattctgaagattcatgtactcattcactcaacaaatatttgccaatcactactaaggttgccagacactattttagtgcttgggatgtatcagtaaacagaagagagagagaaaacaaatacccttccctgttggagctttcattctaatataaggagaaagatgataaacgtaagagaattatgtaatatgttagaaggcatatggggaaaaaaaaatacaccagggtaaggggtatgaggaaaactggaggaagggggtttgcaattttttttaagagggaatcc

SEQ ID NO: 343044 - DNA, 509 bp, Homo sapiens
tctattgacattgtgtcagagttcacaaatgtatgatgtggagttacacagtgtgacaaagaacactgatatcatgtgcatttagaacaagcttcgtagaaatattgtggctgctctgattcctccactaagccagagcctcatatttggtgtgtagtgggaggcatctcagccccagcaagtgggagggagggttaatgctctaaacaaggaacttcctcttctgttggaggcgtgggttagtgatctgtgctgttgtgtgggaagccttgttgatttatccccttgatcttgcctccacccttcagcttgagggtgtgtgtgtgtgtgtgtgtgtgtgtgtgtgtgtgtgtgtgcatgcgcatgggcaactttctaaataccaaaatatacattctaattataaactagtgccattcgttccttgcccccaccctcccttgtttactttcttttggataaagtgctgcttctttcgaagggcccctgtttctgtggcacagcctatt

SEQ ID NO: 343045 - DNA, 783 bp, Homo sapiens
catgaacatagatttaaaaatcttaaaaaattatcgagtagtatctggtgatatataacatgaataatatatccaaattaggttattctagggatgcaagattaacttaacacatgaaaattagtcaattaccttaccatattaacagaataatacagacaaccacgcataatcatgtgcaatagataacaacaaacattatgcttcggtggaaaatgatggtaaagcttttcatttgagtttagagacaagataaagatgatggaaatgactgcttgtattcaaccagtggaatgggcaagaaaaataaataaatgtataaattagggaaaggaagaaataaaactatcattatttgcggttatgactctataaatagtgcaaaacaaatctacagagatgttcttagaattaatactgagatcgataaggtttctggatacgaggttaatttacaaattaattttatctgtgtatagcaagaaatagaaagtgaatgaggctgccttccactttcatgtcaagtgactttgggcatatcttctaacttctattgtcttagttcactcatctataaaatatggatgataatactatattctactgattttattttttccatattttaacatctttgattaattgtattctgtattttaacatatatgccatattttttcctagtcaaccataaaaaacattttcctccccaaaatggctgtcttctctaatagtttcccaaaggcaaagaggattaaagtcattttagaaatatgattccca

SEQ ID NO: 343046 - DNA, 627 bp, Homo sapiens
ttaatcatcttttgcacacggggttgtaatacacttagaaatttgaagaaatttacagatacgtcaggtgtcactggattacaatgcaaggttgcaggcaaaaaccttcagccaaagaggacggctcttaccttcgagagcagtactagaattcataaagtatgaaattaggtctcagtgtgacactctaggcccaacagaaaccaacatggaatcttgctccacctgactccagtcctaagatggaaattactcagaaggaaggcaggacgaatatcgctgatgagaccagggagatgttttacaaaggctgtcatctgctcgaccatgcccctcaggtccctggtcactcttcctgggggagaaggttggtgtcaaccctttcacgaaaaggcagcagctctacagcttactgcccagtaaggccaatgggcctctggccccctttctgcttctgaatgacagaaaagtgcctatcattggatggcactaccattgtttcactatctcacagggggaccccaacccctctcccattcagcctggtgtttctcagccttcaatccactgccctttggataaaccaaaaaccgctccaaacctcccttcatgttatttgaaatttca

SEQ ID NO: 343047 - DNA, 521 bp, Homo sapiens
ggcggtgtttgtagcttgagagctactagccaggagctctgagtgacaggtcccagacagagtcaacaggcgtctccaacaggtggatgttaagaagacaaggcagagagaagaggaagtctcaccgatgactccaggcttcctggcatggaaatgaggtgtgttggggtgggcggaggctatcttactgattcagaggacactggatcttcctctgtaattttaacattatgcacatgttatgggacacccagattgaatgtttgggtgttataccagcatggagctcacgcttgtgcagaatcccgatgcagaaggaggatctcacctctggggtgcaggtttgaaggtgtgcactggaggctgcctggagacacctaaagagaagtaagcactagggtctgtgcagatgggcctggccttcaacagagacacctggacaggagggatgcctttagcacataagccaacgagtggaatttgagccatgaaagtgcaggagcttcccccttagacagtag

SEQ ID NO: 343048 - DNA, 183 bp, Homo sapiens
catcacctaacaccatacaaaaattaacttgaaatggatcaaagaccgaaatgcaaatgtaaaacaacataatacttagaaggaaatacaggtcaaaagttttatgacattgtatttagcaatgatttctgggatatgactcctaaggcacaaccaacaaaacaaaaaaaattggccgggtgc

SEQ ID NO: 343049 - DNA, 536 bp, Homo sapiens
tttgctgatgggctggatgtagagcaggaaagaaagacatgagaaggcaactgaatttttctacctaagtgactagaatgagaaggcaagacgaaggtgttgcggggaaacagcagggctagctggttctgaacactgtacatccagtcctctaagtgaccatgtcaagtaggtagctggagggatgagtctcaaattggagacatggtctaggatggagatagaaatttggcagtgaccagatcttggggtaataaaggccactggactgatgagacactttagggtatggagatgagggcaggctgagacccgaatgctataatattaaaagattaggttgctgaagagaaaccagcaaaggaaactgattttaaaatgaagaaggagagccaagcaaggtaagggtttaaaggaggagtcagagatcatttgacaaatgctgttgcagggcaaggaggaccaggactgaggactggccgccaggctaaacaacatgggctccctgcattgggaaggctgttccagcggaggga

SEQ ID NO: 343050 - DNA, 504 bp, Homo sapiens
ggcgggccggggatgcgccatggccatggcccggctgggctcgtggctcggggaggcgcagtggctcgcgctggtgtcgctcttcgtcgcggccctggccacggtaggcctgtacctggcgcagtgggcgctggccagggcgcgaccccagccccagcggcgggcggtggagcctggagaggggccgcgcccggggtccgacgcgctgctctcctggatcctgacgctgggcagctggaggagccagtggcaggcggcctgggtgaccgccctgaacgaggaggccgagaggaaaggggtgctccaggccctgggctccgcgagggacaggctggcagttggagggaccgtcagaagtgctcatccgcgccagccagtacctgccttgcctggagtcccggggcgaattcccgtgcccgatcggacacttactgagcttgcacatgatacatgaatagctgtgaccccaatgtgcttccgcctctcatagagctgaatttcacc

SEQ ID NO: 343051 - DNA, 939 bp, Homo sapiens
gtcatgctgttggagaacatcatcctgttgctgttggccaccgactttctccagggggcatctgtggaccagcctgcagaccatagctggggtcctgtctggatttctgattgcacagcaggcttccaccactgtcactctcaggcctgcggtgggaccgtcaaagccagcacctgcacctctcacgtggggcctcgtgcttctgcaacatgggccaggacagagattccccagtcctctgcaacaactcctgccctccctccagagcctgctctctgtcacccacaccctgaagaggtgcctggaagtggcctcgggttcttttcttgctcacagcagccgggggttggatgtggcctgtgtgagtggcctggacctgggaaaggaatgacctggacacaaacacttagtgagatgcaggggctgttcacgggtcagagaaatgtcacacactgtggcttcgtaacaagcatttgagagccacaggccaccctgggtttcagctctgttcttcttcatgagacgtcacgggtcctcacttcttccagcttcaggttttcccccagtggtaatatctcgcaaaacggtggcacaacatcacagccaggatctcaaagtagtacgtcgaggtgcagggagaacccttccatcaccacgaggacccttcatgtggcccccttcctctcgcccctgccacctccttccctcctggcaaccattattctgttctctgtttctattattctatcacttggagaatgcgttgtgaaagtaccacacagtgtgtgcaccctggggatcggtcttgttcacttggcagagctctccggagagcctcccgggttgctccttgcttttgatggctgagtcgcatcccatggtttggacggaccacagcttgtttcatcgtcgacccatggacgggcatctggttcatcc

SEQ ID NO: 343052 - DNA, 333 bp, Homo sapiens
cgacagcagcagtgagcatgagatcattgcattgcagcactgtagcaaactggcaccctgcctttgcacccctttggttcaggagacaaacgtgtgtaatcctcatttctaaagtcagcacagcctggaaggattcctggtctctcccaccttctaccattctgctgccagtgacggcaaggattggtgtagcttctgcgcagtgctttgtgcctggaataccgagaaggaagaaaaagaagacaagcaccctggtccttttctaagaaattacaggcgcccttgaagaaaaaatctgagtgtgtcctactacatgcaagagtgctggaaaaa

SEQ ID NO: 343053 - DNA, 1009 bp, Homo sapiens
agctttgacgggagcttcccgggagccgtttgtgcccggggtaaccccgttccggccaagccgcttcagcgggggacgtagccatgaaggaagagaaggagcacaggcctaaggagaagcgagtaaccctgttaacccccgccggggccacaggcagcggtggtgggacctcgggggacagctccaagggggaagataagcaggatcgcaacaaggagaagaaagaagcgctgagcaaggtgcccggtcggccgctggcccgggagagggcgggacgagtccgcagcgcggggaggatggctgggaatggggctgccccctttctttctcaggttctccttctatctcttcgcctgaatggaagtcgcatcatcctggttcatccattcacccgaaatggggagagcccctcccggccaaatcctgggtgggggtgaggaaaagaggggactccccaaacgggaagggtttaggtcagagctgtgagatgataatgggagggaagagcgacggtataaagaatgaggaactaaaggtgtaattggggagaaatattaaatagtgaaggagacatgagggatgggaatattattcatggaggcgagttgggggagagtgcagggtgattaatggtacaggagggtagatcgagagcatcctattttgagagcaatgggtagatttttcgtattcgttagagttttgaattcttaagttcaatgggcaaggattttgttttaagatgtgttggacgtgggagaaacttgttgctaaatcaagatttcgtggcacccacaaagaccagcgttggcttactaagttattgccactagatctgttaaaaaatgggtgatcgaaaatgatgcacaaacctggtaaactgcagggctgctgtaaagagcaaaacctgcgatttttccttgctccaggtggttctcatttccaagggtttttttaaaccgcgttactattatgtttgactaattctgagcattgggctgcagaagaa

SEQ ID NO: 343054 - DNA, 396 bp, Homo sapiens
cacactttcgttgatacaaaaatgtgttctatccttcactgtacctgtactacaaggacagaacacactttcgttgatacaaaaatttaaatagttatgttacttctgtatccagtgtcctaaagttttaggattagttttagttttttgtttgcttatatgagcttagcgtaaagaatatttttaaacttcgtgttttgtcatcagcatcttttctattaagaggtaaaatgtagtccttgtttgactcttgacaatccagtgtgtttgatcttaggtctcatgatctgagtgcataccctctccaggaaggaaactgcaccagtgtctattcctgttaaatagcaacttttagtctcagcttgtttcgttttgatgtcaataaatagtaacagc

SEQ ID NO: 343055 - DNA, 562 bp, Homo sapiens
gcggggcaatctattccgatctgtgggattccttaccacgcttttgaaggctacctgatacaactgttggaagtggattactcagcttgtctttaatatatgcatacttgtaattgggccagacacctgcgagtacatttacataattgctttcctctctgcagtttgtatcctcatatgtatgccagagcatacatcaactttaaaaaccaagaggacattattttgttcagggatcgctttgatggttatgtattccttgacaataaaggtgagtcctggtaactgaagtaaaaagggaatttctttgtcatttgtatgtttaagacaactcgtgcattgcgttgcttcctagagttttacacatttaataagcttattgcagtcttataaatagacgtgacttttcacagtccttggttatttttattaacctactatttttttagtttgatcaactgagtgaaattgcaactgttttctcctcgtgtgacacattttttgccctggcttaaacctgctgttttgactgtagaatttcagccgcagtactgataagtga

SEQ ID NO: 343056 - DNA, 2514 bp, Homo sapiens
  misc_feature (2384)..(2384): n is a, c, g, or t
agctttgacgggagcttcccgggagccgtttgtgcccggggtaaccccgttccggccaagccgcttcagcgggggacgtagccatgaaggaagagaaggagcacaggcctaaggagaagcgagtaaccctgttaacccccgccggggccacaggcagcggtggtgggacctcgggggacagctccaagggggaagataagcaggatcgcaacaaggagaagaaagaagcgctgagcaaggtggtaattcgaagattacctcccactttgaccaaggagcagcttcaggaacatcttcaacctatgcctgagcatgattattttgagtttttttctaatgatacgagtttgtatcctcatatgtatgccagagcatacatcaactttaaaaaccaagaggacattattttgttcagggatcgctttgatggttatgtattccttgacaataaaggtcaggaatatcccgctatagtagaatttgcaccttttcaaaaagctgcaaaaaagaagactaagaaaagagataccaaagtcgggactatcgatgatgatccagaatatagaaagtttttggaaagttatgccacagataatgagaaaatgacatctactccagagacactgctagaggaaatagaagcaaaaaatagagaattaatagctaaaaagacaaccccacttttgagcttcctgaaaaacaagcagagaatgagagaagaaaagagagaagaaaggaggaggagagaaatagaaagaaaaagacaaagagaagaagagaggaggaaatggaaagaagaagagaaacgaaaaaggaaagatatagaaaagctaaagaagatagacagaattccagaaagggacaaattaaaggatgaaccaaagattaaggtacacaggtttctgttacaagctgtgaatcagaaaaatctgctcaagaagccagaaaaaggagatgaaaaagaattggacaaaagagaaaaagccaagaaattggacaaagagaatctcagtgatgaaagagccagtgggcaaagttgtacattgcccaagcgttctgatagcgaacttaaagatgaaaaaccaaagagacctgaagatgagagcggcagagactatagggagagggaacgggaatatgaacgagatcaggagcgcatacttcgagaaagagagaggctgaagcggcaagaagaagagcgccgtaggcagaaggagcgctatgagaaagagaagacttttaagagaaaagaagaagaaatgaaaaaagagaaagacacacttcgggataaaggaaagaaggctgaaagtacagaatcaataggcagctcagaaaaaactgaaaagaaagaagaagtggtcaagagagatcgaataagaaacaaggatcgtccagcgatgcagctttaccaaccaggagctcgaagccgaaatcgactctgtccccctgatgacagcaccaagtctggagattcagcagcagaaaggaagcaggaaagtggtattagccatagaaaagaaggaggagaggagtgataagtccagatggccttaggtgtcctgactgtctaggcagccaaagagcacacgttaagcaatccagaggtgccttcagggcaaagaatagagagaaagggagccgctgtgctggtggggtacactgcagaggagtaagtcttgtgtcaaagcaggaatctgatcagaggttcagaattggaagtacaatttcattgcttttgcaatttctacaaattaattttaaagtgtcagaaaaaggtgacggcaaggacatgcattgcaatttgcagggggaattgtcaagtgaggacttcatcacatatgacacgagagaaaagtaagagctggttctaaaatcaaaagctgttgttcatcctgaattgaattttctgaatttgggtggagcagagtcgctttgaagccttgttccgatctaattctattgtattgttgatgataagtgttgacattgggtagtgtagaagcaacaagcatgtccttgtagtacaggtacagtgaaggatagaacacactttcgttgatacaaaaatttaaatagttatgttacttctgtatccagtgtcctaaagttttaggattagttttagttttttgtttgcttatatgagcttagcgtaaagaatatttttaaacttcgtgttttgtcatcagcatcttttctattaagaggtaaaatgtagtccttgtttgactcttgacaatccagtgtgtttgatcttaggtctcatgatctgagtgcataccctctccaggaaggaaactgcaccagtgtctattcctgttaaatagcaacttttagtctcagcttgtttcgttttgatgtcaataaatagtaacagcccttcncacaactcctcgttattctagcgcccaaccctaccctatacctatcccccttactttgggggggggccgggacccaattgcccctatggggagtggtttacaattaattgcccgcgttttaaacgtcgga

SEQ ID NO: 343057 - DNA, 2593 bp, Homo sapiens
agctttgacgggagcttcccgggagccgtttgtgcccggggtaaccccgttccggccaagccgcttcagcgggggacgtagccatgaaggaagagaaggagcacaggcctaaggagaagcgagtaaccctgttaacccccgccggggccacaggcagcggtggtgggacctcgggggacagctccaagggggaagataagcaggatcgcaacaaggagaagaaagaagcgctgagcaaggtggtaattcgaagattacctcccactttgaccaaggagcagcttcaggaacatcttcaacctatgcctgagcatgattattttgagtttttttctaatgatacgagtttgtatcctcatatgtatgccagagcatacatcaactttaaaaaccaagaggacattattttgttcagggatcgctttgatggttatgtattccttgacaataaaggtcaggaatatcccgctatagtagaatttgcaccttttcaaaaagctgcaaaaaagaagactaagaaaagagataccaaagtcgggactatcgatgatgatccagaatatagaaagtttttggaaagttatgccacagataatgagaaaatgacatctactccagagacactgctagaggaaatagaagcaaaaaatagagaattaatagctaaaaagacaaccccacttttgagcttcctgaaaaacaagcagagaatgagagaagaaaagagagaagaaaggaggaggagagaaatagaaagaaaaagacaaagagaagaagagaggaggaaatggaaagaagaagagaaacgaaaaaggaaagatatagaaaagctaaagaagatagacagaattccagaaagggacaaattaaaggatgaaccaaagattaaggtacacaggtttctgttacaagctgtgaatcagaaaaatctgctcaagaagccagaaaaaggagatgaaaaagaattggacaaaagagaaaaagccaagaaattggacaaagagaatctcagtgatgaaagagccagtgggcaaagttgtacattgcccaagcgttctgatagcgaacttaaagatgaaaaaccaaagagacctgaagatgagagcggcagagactatagggagagggaacgggaatatgaacgagatcaggagcgcatacttcgagaaagagagaggctgaagcggcaagaagaagagcgccgtaggcagaaggagcgctatgagaaagagaagacttttaagagaaaagaagaagaaatgaaaaaagagaaagacacacttcgggataaaggaaagaaggctgaaagtacagaatcaataggcagctcagaaaaaactgaaaagaaagaagaagtggtcaagagagatcgaataagaaacaaggatcgtccagcgatgcagctttaccaaccaggagctcgaagccgaaatcgactctgtccccctgatgacagcaccaagtctggagattcagcagcagaaaggaagcaggaaagtggtattagccatagaaaagaaggaggagaggagtgataagtccagatggccttaggtgtcctgactgtctaggcagccaaagagcacacgttaagcaatccagaggtgccttcagggcaaagaatagagagaaagggagccgctgtgctggtggggtacactgcagaggagtaagtcttgtgtcaaagcaggaatctgatcagaggttcagaattggaagtacaatttcattgcttttgcaatttctacaaattaattttaaagtgtcagaaaaaggtgacggcaaggacatgcattgcaatttgcagggggaattgtcaagtgaggacttcatcacatatgacacgagagaaaagtaagagctggttctaaaatcaaaagctgttgttcatcctgaattgaattttctgaatttgggtggagcagagtcgctttgaagccttgttccgatctaattctattgtattgttgatgataagtgttgacattgggtagtgtagaagcaacaagcatgtccttgtagtacaggtacagtgaaggatagaacacactttcgttgatacaaaaatttaaatagttatgttacttctgtatccagtgtcctaaagttttaggattagttttagttttttgtttgcttatatgagcttagcgtaaaaactaaagataatcctaattctatggtatggtcgatgataagtgttgacagtgggtagtgtagaagcaacaagcatgtccttgtagtacagggtacagcgaaggatagaacgacatttcgttgatacaaaattttaatagtatggtacctgccggagtcccgcgtcccaacagtccagacgcagccaagacaccgcggccccaaagagggcaaccgcgaacgcacatctctctaaacctcggcgtgtgcgagcacgagcaccactacagaaaaaagggagaacaggggcccgcccagagaaaccttagaaacaaccgcggcgtgaacccccacgcaccccagtccgaggaaaccccccacgcagaacaagaggcgagaacatacatcaccaagaacacacacacccgtcacggcaggatacacacagaccgtcaca

SEQ ID NO: 343058 - DNA, 2306 bp, Homo sapiens
  misc_feature (20)..(20): n is a, c, g, or t
  misc_feature (33)..(33): n is a, c, g, or t
  misc_feature (35)..(35): n is a, c, g, or t
taaaaacgtacggctaggtncgaggccgggtgntngagaaggagcacaggcctaaggagaagcgagtaaccctgttaacccccgccggggccacaggcagcggtggtgggacctcgggggacagctccaagggggaagataagcaggatcgcaacaaggagaagaaagaagcgctgagcaaggtggtaattcgaagattacctcccactttgaccaaggagcagcttcaggaacatcttcaacctatgcctgagcatgattattttgagtttttttctaatgatacgagtttgtatcctcatatgtatgccagagcatacatcaactttaaaaaccaagaggacattattttgttcagggatcgctttgatggttatgtattccttgacaataaaggtcaggaatatcccgctatagtagaatttgcaccttttcaaaaagctgcaaaaaagaagactaagaaaagagataccaaagtcgggactatcgatgatgatccagaatatagaaagtttttggaaagttatgccacagataatgagaaaatgacatctactccagagacactgctagaggaaatagaagcaaaaaatagagaattaatagctaaaaagacaaccccacttttgagcttcctgaaaaacaagcagagaatgagagaagaaaagagagaagaaaggaggaggagagaaatagaaagaaaaagacaaagagaagaagagaggaggaaatggaaagaagaagagaaacgaaaaaggaaagatatagaaaagctaaagaagatagacagaattccagaaagggacaaattaaaggatgaaccaaagattaagctgctcaagaagccagaaaaaggagatgaaaaagaattggacaaaagagaaaaagccaagaaattggacaaagagaatctcagtgatgaaagagccagtgggcaaagttgtacattgcccaagcgttctgatagcgaacttaaagatgaaaaaccaaagagacctgaagatgagagcggcagagactatagggagagggaacgggaatatgaacgagatcaggagcgcatacttcgagaaagagagaggctgaagcggcaagaagaagagcgccgtaggcagaaggagcgctatgagaaagagaagacttttaagagaaaagaagaagaaatgaaaaaagagaaagacacacttcgggataaaggaaagaaggctgaaagtacagaatcaataggcagctcagaaaaaactgaaaagaaagaagaagtggtcaagagagatcgaataagaaacaaggatcgtccagcgatgcagctttaccaaccaggagctcgaagccgaaatcgactctgtccccctgatgacagcaccaagtctggagattcagcagcagaaaggaagcaggaaagtggtattagccatagaaaagaaggaggagaggagtgataagtccagatggccttaggtgtcctgactgtctaggcagccaaagagcacacgttaagcaatccagaggtgccttcagggcaaagaatagagagaaagggagccgctgtgctggtggggtacactgcagaggagtaagtcttgtgtcaaagcaggaatctgatcagaggttcagaattggaagtacaatttcattgcttttgcaatttctacaaattaattttaaagtgtcagaaaaaggtgacggcaaggacatgcattgcaatttgcagggggaattgtcaagtgaggacttcatcacatatgacacgagagaaaagtaagagctggttctaaaatcaaaagctgttgttcatcctgaattgaattttctgaatttgggtggagcagagtcgctttgaagccttgttccgatctaattctattgtattgttgatgataagtgttgacattgggtagtgtagaagcaacaagcatgtccttgtagtacaggtacagtgaaggatagaacacactttcgttgatacaaaaatttaaatagttatgttacttctgtatccagtgtcctaaagttttaggattagttttagttttttgtttgcttatatgagcttagcgtaaagaatatttttaaacttcgtgttttgtcatcagcatcttttctattaagaggtaaaatgtagtccttgtttgactcttgacaatccagtgtgtttgatcttaggtctcatgatctgagtgcataccctctccaggaaggaaactgcaccagtgtctattcctgttaaatagcaacttttagtctcagcttgtttcgttttgatgtcaataaatagtaacagcattcaagtgtgaaaaaaaagtgtg

SEQ ID NO: 343059 - DNA, 2194 bp, Homo sapiens
agctttgacgggagcttcccgggagccgtttgtgcccggggtaaccccgttccggccaagccgcttcagcgggggacgtagccatgaaggaagagaaggagcacaggcctaaggagaagcgagtaaccctgttaacccccgccggggccacaggcagcggtggtgggacctcgggggacagctccaagggggaagataagcaggatcgcaacaaggagaagaaagaagcgctgagcaaggtggtaattcgaagattacctcccactttgaccaaggagcagcttcaggaacatcttcaacctatgcctgagcatgattattttgagtttttttctaatgatacgagtttgtatcctcatatgtatgccagagcatacatcaactttaaaaaccaagaggacattattttgttcagggatcgctttgatggttatgtattccttgacaataaaggtcaggaatatcccgctatagtagaatttgcaccttttcaaaaagctgcaaaaaagaagactaagaaaagagataccaaagtcgggactatcgatgatgatccagaatatagaaagtttttggaaagttatgccacagataatgagaaaatgacatctactccagagacactgctagaggaaatagaagcaaaaaatagagaattaatagctaaaaagacaaccccacttttgagcttcctgaaaaacaagcagagaatgagagaagaaaagagagaagaaaggaggaggagagaaatagaaagaaaaagacaaagagaagaagagaggaggaaatggaaagaagaagagaaacgaaaaaggaaagatatagaaaagctaaagaagatagacagaattccagaaagggacaaattaaaggatgaaccaaagattaaggtacacaggtttctgttacaagctgtgaatcagaaaaatctgctcaagaagccagaaaaaggagatgaaaaagaattggacaaaagagaaaaagccaagaaattggacaaagagaatctcagtgatgaaagagccagtgggcaaagttgtacattgcccaagcgttctgatagcgaacttaaagatgaaaaaccaaagagacctgaagatgagagcggcagagactatagggagagggaacgggaatatgaacgagatcaggagcgcatacttcgagaaagagagaggctgaagcggcaagaagaagagcgccgtaggcagaaggagcgctatgagaaagagaagacttttaagagaaaagaagaagaaatgaaaaaagagaaagacacacttcgggataaaggaaagaaggctgaaagtacagaatcaataggcagctcagaaaaaactgaaaagaaagaagaagtggtcaagagagatcgaataagaaacaaggatcgtccagcgatgcagctttaccaaccaggagctcgaagccgaaatcgactctgtccccctgatgacagcaccaagtctggagattcagcagcagaaaggaagcaggaaagtggtattagccatagaaaagaaggaggagaggagtgataagtccagatggccttaggtgtcctgactgtctaggcagccaaagagcacacgttaagcaatccagaggtgccttcagggcaaagaatagagagaaagggagccgctgtgctggtggggtacactgcagaggagtaagtcttgtgtcaaagcaggaatctgatcagaggttcagaattggaagtacaatttcattgcttttgcaatttctacaaattaattttaaagtgtcagaaaaaggtgacggcaaggacatgcattgcaatttgcagggggaattgtcaagtgaggacttcatcacatatgacacgagagaaaagtaagaacacactttcgttgatacaaaaatttaaatagttatgttacttctgtatccagtgtcctaaagttttaggattagttttagttttttgtttgcttatatgagcttagcgtaaagaatatttttaaacttcgtgttttgtcatcagcatcttttctattaagaggtaaaatgtagtccttgtttgactcttgacaatccagtgtgtttgatcttaggtctcatgatctgagtgcataccctctccaggaaggaaactgcaccagtgtctattcctgttaaatagcaacttttagtctcagcttgtttcgttttgatgtcaataaatagtaacagc

SEQ ID NO: 343060 - DNA, 852 bp, Homo sapiens
agctttgacgggagcttcccgggagccgtttgtgcccggggtaaccccgttccggccaagccgcttcagcgggggacgtagccatgaaggaagagaaggagcacaggcctaaggagaagcgagtaaccctgttaacccccgccggggccacaggcagcggtggtgggacctcgggggacagctccaagggggaagataagcaggatcgcaacaaggagaagaaagaagcgctgagcaaggtggtaattcgaagattacctcccactttgaccaaggagcagcttcaggaacatcttcaacctatgcctgagcatgattattttgagtttttttctaatgatacgagtttgtatcctcatatgtatgccagagcatacatcaactttaaaaaccaagaggacattattttgttcagggatcgctttgatggttatgtattccttgacaataaaggtcaggaatatcccgctatagtagaatttgcaccttttcaaaaagctgcaaaaaagaagactaagaaaagagataccaaagtcgggactatcgatgatgatccagaatatagaaagtttttggaaagttatgccacagataatgagaaaatgacatctactccagagacactgctagaggaaatagaagcaaaaaatagagaattaatagctaaaaagacaaccccacttttgagcttcctgaaaaacaagcagagaatgagagaagaaaagagagacgaccgggggggggagagacactcgaacgaaacaagaccagagaagagagagggggactgggacgagagagaacgaaaggaagatttgaaagctagaagatgacgaatccgagggcctctgg

SEQ ID NO: 343061 - DNA, 687 bp, Homo sapiens
  misc_feature (20)..(20): n is a, c, g, or t
  misc_feature (33)..(33): n is a, c, g, or t
  misc_feature (35)..(35): n is a, c, g, or t
taaaaacgtacggctaggtncgaggccgggtgntngagaaggagcacaggcctaaggagaagcgagtaaccctgttaacccccgccggggccacaggcagcggtggtgggacctcgggggacagctccaagggggaagataagcaggatcgcaacaaggagaagaaagaagcgctgagcaaggtggtaattcgaagattacctcccactttgaccaaggagcagcttcaggaacatcttcaacctatgcctgagcatgattattttgagtttttttctaatgatacgagtttgtatcctcatatgtatgccagagcatacatcaactttaaaaaccaagaggacattattttgttcagggatcgctttgatggttatgtattccttgacaataaaggtgagtcctggtaactgaagtaaaaagggaatttctttgtcatttgtatgtttaagacaactcgtgcattgcgttgcttcctagagttttacacatttaataagcttattgcagtcttataaatagacgtgacttttcacagtccttggttatttttattaacctactatttttttagtttgatcaactgagtgaaattgcaactgttttctcctcgtgtgacacattttttgccctggcttaaacctgctgttttgactgtagaatttcagccgcagtactgataagtga

SEQ ID NO: 343062 - DNA, 544 bp, Homo sapiens
ttgattatggttgtgccagtgtgctttatgcctttgggagaccctcttcagatgactgccatcaaaagagtcatagaaagcaatgggttgattcccttatatccacttttgacattttctttgttatagcaagtgtggtattttttttctaaacaggtcaggaatatcccgctatagtagaatttgcaccttttcaaaaagctgcaaaaaagaagactaagaaaagagataccaaagtcgggactatcgatgatggtacagtatagctctaattatataatgctattgctgtggggtttttaaaaataatatctttgtgagagttaattcgaccccaaaattttaaattagaaaatatacaaaataaagtaagtgagaaatgttatttgccgatggaagctttgcttaattgttagactagagagagtttcttgcacagaatctctgctctctttggctagggcatttcattcttcaaccattgaacaatataatgttgactattgagtaacaaatcaccataggtttattgattagaagatag

SEQ ID NO: 343063 - DNA, 2363 bp, Homo sapiens
agctttgacgggagcttcccgggagccgtttgtgcccggggtaaccccgttccggccaagccgcttcagcgggggacgtagccatgaaggaagagaaggagcacaggcctaaggagaagcgagtaaccctgttaacccccgccggggccacaggcagcggtggtgggacctcgggggacagctccaagggggaagataagcaggatcgcaacaaggagaagaaagaagcgctgagcaaggtggtaattcgaagattacctcccactttgaccaaggagcagcttcaggaacatcttcaacctatgcctgagcatgattattttgagtttttttctaatgatacgagtttgtatcctcatatgtatgccagagcatacatcaactttaaaaaccaagaggacattattttgttcagggatcgctttgatggttatgtattccttgacaataaaggtcaggaatatcccgctatagtagaatttgcaccttttcaaaaagctgcaaaaaagaagactaagaaaagagataccaaagtcgggactatcgatgatgatccagaatatagaaagtttttggaaagttatgccacagataatgagaaaatgacatctactccagagacactgctagaggaaatagaagcaaaaaatagagaattaatagctaaaaagacaaccccacttttgagcttcctgaaaaacaagcagagaatgagagaagaaaagagagaagaaaggaggaggagagaaatagaaagaaaaagacaaagagaagaagagaggaggaaatggaaagaagaagagaaacgaaaaaggaaagatatagaaaagctaaagaagatagacagaattccagaaagggacaaattaaaggatgaaccaaagattaagctgctcaagaagccagaaaaaggagatgaaaaagaattggacaaaagagaaaaagccaagaaattggacaaagagaatctcagtgatgaaagagccagtgggcaaagttgtacattgcccaagcgttctgatagcgaacttaaagatgaaaaaccaaagagacctgaagatgagagcggcagagactatagggagagggaacgggaatatgaacgagatcaggagcgcatacttcgagaaagagagaggctgaagcggcaagaagaagagcgccgtaggcagaaggagcgctatgagaaagagaagacttttaagagaaaagaagaagaaatgaaaaaagagaaagacacacttcgggataaaggaaagaaggctgaaagtacagaatcaataggcagctcagaaaaaactgaaaagaaagaagaagtggtcaagagagatcgaataagaaacaaggatcgtccagcgatgcagctttaccaaccaggagctcgaagccgaaatcgactctgtccccctgatgacagcaccaagtctggagattcagcagcagaaaggaagcaggaaagtggtattagccatagaaaagaaggaggagaggagtgataagtccagatggccttaggtgtcctgactgtctaggcagccaaagagcacacgttaagcaatccagaggtgccttcagggcaaagaatagagagaaagggagccgctgtgctggtggggtacactgcagaggagtaagtcttgtgtcaaagcaggaatctgatcagaggttcagaattggaagtacaatttcattgcttttgcaatttctacaaattaattttaaagtgtcagaaaaaggtgacggcaaggacatgcattgcaatttgcagggggaattgtcaagtgaggacttcatcacatatgacacgagagaaaagtaagagctggttctaaaatcaaaagctgttgttcatcctgaattgaattttctgaatttgggtggagcagagtcgctttgaagccttgttccgatctaattctattgtattgttgatgataagtgttgacattgggtagtgtagaagcaacaagcatgtccttgtagtacaggtacagtgaaggatagaacacactttcgttgatacaaaaatttaaatagttatgttacttctgtatccagtgtcctaaagttttaggattagttttagttttttgtttgcttatatgagcttagcgtaaagaatatttttaaacttcgtgttttgtcatcagcatcttttctattaagaggtaaaatgtagtccttgtttgactcttgacaatccagtgtgtttgatcttaggtctcatgatctgagtgcataccctctccaggaaggaaactgcaccagtgtctattcctgttaaatagcaacttttagtctcagcttgtttcgttttgatgtcaataaatagtaacagcattcaagtgtgaaaaaaaagtgtg

SEQ ID NO: 343064 - DNA, 2378 bp, Homo sapiens
agctttgacgggagcttcccgggagccgtttgtgcccggggtaaccccgttccggccaagccgcttcagcgggggacgtagccatgaaggaagagaaggagcacaggcctaaggagaagcgagtaaccctgttaacccccgccggggccacaggcagcggtggtgggacctcgggggacagctccaagggggaagataagcaggatcgcaacaaggagaagaaagaagcgctgagcaaggtggtaattcgaagattacctcccactttgaccaaggagcagcttcaggaacatcttcaacctatgcctgagcatgattattttgagtttttttctaatgatacgagtttgtatcctcatatgtatgccagagcatacatcaactttaaaaaccaagaggacattattttgttcagggatcgctttgatggttatgtattccttgacaataaaggtcaggaatatcccgctatagtagaatttgcaccttttcaaaaagctgcaaaaaagaagactaagaaaagagataccaaagtcgggactatcgatgatgatccagaatatagaaagtttttggaaagttatgccacagataatgagaaaatgacatctactccagagacactgctagaggaaatagaagcaaaaaatagagaattaatagctaaaaagacaaccccacttttgagcttcctgaaaaacaagcagagaatgagagaagaaaagagagaagaaaggaggaggagagaaatagaaagaaaaagacaaagagaagaagagaggaggaaatggaaagaagaagagaaacgaaaaaggaaagatatagaaaagctaaagaagatagacagaattccagaaagggacaaattaaaggatgaaccaaagattaaggtacacaggtttctgttacaagctgtgaatcagaaaaatctgctcaagaagccagaaaaaggagatgaaaaagaattggacaaaagagaaaaagccaagaaattggacaaagagaatctcagtgatgaaagagccagtgggcaaagttgtacattgcccaagcgttctgatagcgaacttaaagatgaaaaaccaaagagacctgaagatgagagcggcagagactatagggagagggaacgggaatatgaacgagatcaggagcgcatacttcgagaaagagagaggctgaagcggcaagaagaagagcgccgtaggcagaaggagcgctatgagaaagagaagacttttaagagaaaagaagaagaaatgaaaaaagagaaagacacacttcgggataaaggaaagaaggctgaaagtacagaatcaataggcagctcagaaaaaactgaaaagaaagaagaagtggtcaagagagatcgaataagaaacaaggatcgtccagcgatgcagctttaccaaccaggagctcgaagccgaaatcgactctgtccccctgatgacagcaccaagtctggagattcagcagcagaaaggaagcaggaaagtggtattagccatagaaaagaaggaggagaggagtgataagtccagatggccttaggtgtcctgactgtctaggcagccaaagagcacacgttaagcaatccagaggtgccttcagggcaaagaatagagagaaagggagccgctgtgctggtggggtacactgcagaggagtaagtcttgtgtcaaagcaggaatctgatcagaggttcagaattggaagtacaatttcattgcttttgcaatttctacaaattaattttaaagtgtcagaaaaaggtgacggcaaggacatgcattgcaatttgcagggggaattgtcaagtgaggacttcatcacatatgacacgagagaaaagtaagagctggttctaaaatcaaaagctgttgttcatcctgaattgaattttctgaatttgggtggagcagagtcgctttgaagccttgttccgatctaattctattgtattgttgatgataagtgttgacattgggtagtgtagaagcaacaagcatgtccttgtagtacaggtacagtgaaggatagaacacactttcgttgatacaaaaatttaaatagttatgttacttctgtatccagtgtcctaaagttttaggattagttttagttttttgtttgcttatatgagcttagcgtaaagaatatttttaaacttcgtgttttgtcatcagcatcttttctattaagaggtaaaatgtagtccttgtttgactcttgacaatccagtgtgtttgatcttaggtctcatgatctgagtgcataccctctccaggaaggaaactgcaccagtgtctattcctgttaaatagcaacttttagtctcagcttgtttcgttttgatgtcaataaatagtaacagc

SEQ ID NO: 343065 - DNA, 2454 bp, Homo sapiens
agctttgacgggagcttcccgggagccgtttgtgcccggggtaaccccgttccggccaagccgcttcagcgggggacgtagccatgaaggaagagaaggagcacaggcctaaggagaagcgagtaaccctgttaacccccgccggggccacaggcagcggtggtgggacctcgggggacagctccaagggggaagataagcaggatcgcaacaaggagaagaaagaagcgctgagcaaggtggtaattcgaagattacctcccactttgaccaaggagcagcttcaggaacatcttcaacctatgcctgagcatgattattttgagtttttttctaatgatacgagtttgtatcctcatatgtatgccagagcatacatcaactttaaaaaccaagaggacattattttgttcagggatcgctttgatggttatgtattccttgacaataaaggtcaggaatatcccgctatagtagaatttgcaccttttcaaaaagctgcaaaaaagaagactaagaaaagagataccaaagtcgggactatcgatgatgatccagaatatagaaagtttttggaaagttatgccacagataatgagaaaatgacatctactccagagacactgctagaggaaatagaagcaaaaaatagagaattaatagctaaaaagacaaccccacttttgagcttcctgaaaaacaagcagagaatgagagaagaaaagagagaagaaaggaggaggagagaaatagaaagaaaaagacaaagagaagaagagaggaggaaatggaaagaagaagagaaacgaaaaaggaaagatatagaaaagctaaagaagatagacagaattccagaaagggacaaattaaaggatgaaccaaagattaaggtacacaggtttctgttacaagctgtgaatcagaaaaatgtaaggaccaagtacatgatacagagcatctagtatcatgtcacacacacagctgctcaagaagccagaaaaaggagatgaaaaagaattggacaaaagagaaaaagccaagaaattggacaaagagaatctcagtgatgaaagagccagtgggcaaagttgtacattgcccaagcgttctgatagcgaacttaaagatgaaaaaccaaagagacctgaagatgagagcggcagagactatagggagagggaacgggaatatgaacgagatcaggagcgcatacttcgagaaagagagaggctgaagcggcaagaagaagagcgccgtaggcagaaggagcgctatgagaaagagaagacttttaagagaaaagaagaagaaatgaaaaaagagaaagacacacttcgggataaaggaaagaaggctgaaagtacagaatcaataggcagctcagaaaaaactgaaaagaaagaagaagtggtcaagagagatcgaataagaaacaaggatcgtccagcgatgcagctttaccaaccaggagctcgaagccgaaatcgactctgtccccctgatgacagcaccaagtctggagattcagcagcagaaaggaagcaggaaagtggtattagccatagaaaagaaggaggagaggagtgataagtccagatggccttaggtgtcctgactgtctaggcagccaaagagcacacgttaagcaatccagaggtgccttcagggcaaagaatagagagaaagggagccgctgtgctggtggggtacactgcagaggagtaagtcttgtgtcaaagcaggaatctgatcagaggttcagaattggaagtacaatttcattgcttttgcaatttctacaaattaattttaaagtgtcagaaaaaggtgacggcaaggacatgcattgcaatttgcagggggaattgtcaagtgaggacttcatcacatatgacacgagagaaaagtaagagctggttctaaaatcaaaagctgttgttcatcctgaattgaattttctgaatttgggtggagcagagtcgctttgaagccttgttccgatctaattctattgtattgttgatgataagtgttgacattgggtagtgtagaagcaacaagcatgtccttgtagtacaggtacagtgaaggatagaacacactttcgttgatacaaaaatttaaatagttatgttacttctgtatccagtgtcctaaagttttaggattagttttagttttttgtttgcttatatgagcttagcgtaaagaatatttttaaacttcgtgttttgtcatcagcatcttttctattaagaggtaaaatgtagtccttgtttgactcttgacaatccagtgtgtttgatcttaggtctcatgatctgagtgcataccctctccaggaaggaaactgcaccagtgtctattcctgttaaatagcaacttttagtctcagcttgtttcgttttgatgtcaataaatagtaacagcattcaagtgtgaaaaaaaagtgtg

SEQ ID NO: 343066 - DNA, 2318 bp, Homo sapiens
agctttgacgggagcttcccgggagccgtttgtgcccggggtaaccccgttccggccaagccgcttcagcgggggacgtagccatgaaggaagagaaggagcacaggcctaaggagaagcgagtaaccctgttaacccccgccggggccacaggcagcggtggtgggacctcgggggacagctccaagggggaagataagcaggatcgcaacaaggagaagaaagaagcgctgagcaaggtggtaattcgaagattacctcccactttgaccaaggagcagcttcaggaacatcttcaacctatgcctgagcatgattattttgagtttttttctaatgatacgagtttgtatcctcatatgtatgccagagcatacatcaactttaaaaaccaagaggacattattttgttcagggatcgctttgatggttatgtattccttgacaataaaggtcaggaatatcccgctatagtagaatttgcaccttttcaaaaagctgcaaaaaagaagactaagaaaagagataccaaagtcgggactatcgatgatgatccagaatatagaaagtttttggaaagttatgccacagataatgagaaaatgacatctactccagagacactgctagaggaaattttgagcttcctgaaaaacaagcagagaatgagagaagaaaagagagaagaaaggaggaggagagaaatagaaagaaaaagacaaagagaagaagagaggaggaaatggaaagaagaagagaaacgaaaaaggaaagatatagaaaagctaaagaagatagacagaattccagaaagggacaaattaaaggatgaaccaaagattaagctgctcaagaagccagaaaaaggagatgaaaaagaattggacaaaagagaaaaagccaagaaattggacaaagagaatctcagtgatgaaagagccagtgggcaaagttgtacattgcccaagcgttctgatagcgaacttaaagatgaaaaaccaaagagacctgaagatgagagcggcagagactatagggagagggaacgggaatatgaacgagatcaggagcgcatacttcgagaaagagagaggctgaagcggcaagaagaagagcgccgtaggcagaaggagcgctatgagaaagagaagacttttaagagaaaagaagaagaaatgaaaaaagagaaagacacacttcgggataaaggaaagaaggctgaaagtacagaatcaataggcagctcagaaaaaactgaaaagaaagaagaagtggtcaagagagatcgaataagaaacaaggatcgtccagcgatgcagctttaccaaccaggagctcgaagccgaaatcgactctgtccccctgatgacagcaccaagtctggagattcagcagcagaaaggaagcaggaaagtggtattagccatagaaaagaaggaggagaggagtgataagtccagatggccttaggtgtcctgactgtctaggcagccaaagagcacacgttaagcaatccagaggtgccttcagggcaaagaatagagagaaagggagccgctgtgctggtggggtacactgcagaggagtaagtcttgtgtcaaagcaggaatctgatcagaggttcagaattggaagtacaatttcattgcttttgcaatttctacaaattaattttaaagtgtcagaaaaaggtgacggcaaggacatgcattgcaatttgcagggggaattgtcaagtgaggacttcatcacatatgacacgagagaaaagtaagagctggttctaaaatcaaaagctgttgttcatcctgaattgaattttctgaatttgggtggagcagagtcgctttgaagccttgttccgatctaattctattgtattgttgatgataagtgttgacattgggtagtgtagaagcaacaagcatgtccttgtagtacaggtacagtgaaggatagaacacactttcgttgatacaaaaatttaaatagttatgttacttctgtatccagtgtcctaaagttttaggattagttttagttttttgtttgcttatatgagcttagcgtaaagaatatttttaaacttcgtgttttgtcatcagcatcttttctattaagaggtaaaatgtagtccttgtttgactcttgacaatccagtgtgtttgatcttaggtctcatgatctgagtgcataccctctccaggaaggaaactgcaccagtgtctattcctgttaaatagcaacttttagtctcagcttgtttcgttttgatgtcaataaatagtaacagcattcaagtgtgaaaaaaaagtgtg

SEQ ID NO: 343067 - DNA, 693 bp, Homo sapiens
attgagcacctgtcctgggtgctctaaggttaaataagagacagaaaattctactctaaaggttatgaaatacttgattagtgaaaatattcatagaataaataatcagataaataaaaagagagtagtgtagattgaatcagataggaagactgcatagactgaatcttaggctgaaagatgaagaaaatgagaggttattggtaggaagaatgcaaagatgtctttcttaggatagggagagagcaaagcagaaaacttggtaggcaattgtaattttggtgggggacactgaggaaatgaataaggtgtcatcttaatggatattttagcatattagtatactctttacttattcattggttcttctatcattggtgacttttggaggacacaaaagtgtcataccttccctgatgtaaagattgtcatattccatcttatttcacagttgaactatatagtcctccttcagtatctgtggagaattggtttcagaacccctagcagatactagattccagatagaaaatgacatagtaatgggctgggcgtggtggctcacgcctgtaatcctagcaacttgggaggctgaggtgggtggatcacttgagatcaggagttcgagaccagcctggccaacatggtgaaaccccatctctactaaaaatacgaaaattagtcaggtgtggt

SEQ ID NO: 343068 - DNA, 407 bp, Homo sapiens
ctagataagacagggaggggagtgtgatatccttgagtatatctttttatgcagtttgaatttttgagtcatatgaatgttttacaatttcagaaataaattgaaaagttgaaagaagcaaaccgtacaattgaatacattcagaaaaaaaaaaaaccacttgacaagttgataacacaatgatgtaggtgaaaagaatgaaagtaacttttgaagatagtaatgtgaatgggatccatcactcaaagatctgcaataaaatctgaaatagtagatttgttattagaagtggcattagagtactgaaattattttatttgtattgcaggctggagaaaaaattgtgttcaggcagttgggaacttaggtttttccctgtttaagaaaagagatttaaatacaaatgg

SEQ ID NO: 343069 - DNA, 551 bp, Homo sapiens
actcatcaacctagaaagtttctgtcttatgcaaacaggcccctttccttccttgtccttcttctccaaggttcctaaaggggcagaaagaccattatttcccatatgctctacagagctccagtgctttttagtcattcagagcacatctccacagagttgcaagactgaaaagccaaatctccagatcctttactttctgtatgatcctcagaagcatggagagaccaagggaacaataagccataggataaagaggatggagagagggaggaacatgaattataggatagaggaaaatgggcaaaaaatagaaaataaaagacgcagaggaaacttgttacttcctctgtctgggaaagaaagtgatagaaacattagttattaattgtctcctttacctctcccttgaacactgtgcaacctgcagatgtggaaaaagaccaagtgaagttgttacttgatatcctgaaaatgtcagaaactcaaagataaggaagagagaatgtactggaaaggtatttataaaggttcatgaaaatcagactggg

SEQ ID NO: 343070 - DNA, 575 bp, Homo sapiens
taatggagaatttagccctgtgcagatgatattgcagaggaggaatgcttagttaatttaggatacctgtgcaggacatgacatgcaggtttgtcatgtaggtaaacatgtgccatggtggtttgctgcacctgtcgacccatcacctagaaggaaaaaattggacacggagataaggacagaggaaagatgatgtgaagacaggggcagaagtcagccatctacaagtcaaagggagacatgtggaacagattcaccctcacagccctcagatggaagcaacaccactaacactttgctcttggacttctagcttccagaactgagagacaatatctttctgttgcttaagtcattctgtctgtgatactgtgtttatggcagccctggcaaactaatacagtcccacaaagatttggttgttgctttgcaagagaatgtataattcctggttatttctacaaataagggcattgactttataaagctacaagtataccccagtattctgtttctggtttttgtttactttcatatatgctatcttttcattcccaggtgaaatcatagtgcat

SEQ ID NO: 343071 - DNA, 376 bp, Homo sapiens
tcacttgaacttcccggggggcggaggttacagtgaaccgagatcgtgtcactgcactccagcctaggcgacagagcgagaccctgtctcagaaacagaaaataaaacaaacaaaaaaaaactattccatagctgactattttctgaaatgattttgttacttttctaatgagaaaaaaatagatctcgtgtgtggagggaattgaagatgtaatttcagactctgcgtacagctaagctcatcgtagttacttaactaacacttaaggaattaaatggcatatctgtgtttgagaggcacactgagatgagacaccagctctttttatttatttctaatggtttgcttggtgtactggtcatttccccgggaagt

SEQ ID NO: 343072 - DNA, 280 bp, Homo sapiens
aacagctcatacataggatgattaggagtagagatgccattaactcagattagaaataaggagagaaaggagtgaggtggggagaaaaaaacattccattttggacacatgataaattatacagaaatagagattcagaaatagatatatagacacagatattatatagttatgtaacctaagcatatttttaggcaaaagtgggtgacagagggaaggttatcaggtataattgtgagggggttagttggataggagacagcatacctgtttctctgaa

SEQ ID NO: 343073 - DNA, 323 bp, Homo sapiens
aagcacaagttaggcaatgccaggagcaaacaaccggacaaactcagaaggtgggacatcatacatgacaactgccctggacacttcaaaaaatatgtacaaaacaaagaggcaggaaagagaccgttcttattaagatataatcgaggctgggcgtggtggcttatgcctgtaatcccagcactttggaaggctgaggcaggcggatcacaaggtcaggagttcgagaccagcctggccagcatggtgaaaccccgtctctactaaaaataccaaaaattagccaagcatggtcgtgcgcgcctgtagtcccagctattcgg

SEQ ID NO: 343074 - DNA, 785 bp, Homo sapiens
gaattccgcaaaccccccacaaaagccttccctcgtccgaatttggcacaagcacctttttcacccaggtgccacatatgacccctttccacatttggtccacgcagagctgcatccctcttccttctggctccgggggctgctgggggttgtcggggccgccgtggccgcagtcctcagcttctcactctacagggtcctggtgaagagccagtgaggcccctggtacccaagccccctcccctgacctgggtgtgcctcgctgctggggctctgcaggggcagcacagctggggtgcaggccaggctgccactccgggaacgcctttgcgccgggactttttgtttctgaaggcagtcgatctgcagcggggccttatgctgccatgcactgccctggctcctgccggacccccagggtgggccgtggcaggtggctgagcaggagctcccaagtgccggccaccgctgtcagggattgcccacccctgggcatcatgtgtgtggggccggggagcacaggtgtgggagctggtgaccccagacccagaattctcagggctctacccccctttcctggtcctaggtggccagtgggtatgaggagggctggaaggcagagctttgggccaaaagcaggcgttggggggtcccccctcaagtttggagccgtttccgtggttgtagcagaggaccggaggttgggttcctgattaaacttcactgtgtgttttctatctcggatcccagtctctgaagacaacttgctttgattcaacctagaa

SEQ ID NO: 343075 - DNA, 174 bp, Homo sapiens
acacgtaggctaggtacgaggctgggtggcgcggaggttgggttctgattaaccacggaaacggctcaagcgttggggggtcccccctcaagtttggagccgtttccgtggttgtagcagaggaccggaggttgggttcctgattaaacttcactgtgtgttttctatctcgga

SEQ ID NO: 343076 - DNA, 4451 bp, Homo sapiens
agcgggggaaccggaagtgcggggcgggcgcgggggcagagcgaaaggcttgaggaccaggtcggggccgggttccgggtcggggagcggctccgggcggcagctatgaggcgggacgtgcgcatcctgttactgggcgaggcccaggtggggaagacgtcgctgatcctgtccctggtgggcgaggagttccccgaggaggtaaggggcacgcccgccgcgggggtgggagcgggcccagccgggggtccctggtgagcgcgcgggtcccttgcaggtccctccccgcgcggaggagatcacgatccccgcggacgtcaccccggagaaggtgcccacccacatcgtggactactcagaagccgagcagacggacgaggagctgcgggaggagatccacaaggtacccgtggtgcgcgggacgagggaggggctgggcgcgggctcggcctaatccgcttcgcagcctgggggattggaccgaggtgctccgggtgtccttggccctgataattctgtgacctccgcactgagggttgtcggggcccctacagcgcaccccgctgggagccggcaccgctcagtccagtggtgctccagggataacaggacccttccccgcgggctctccctccctcctgccggggtggcagcagcgtttgctcttcctgtgggctctgtgtgcgccacgtccccgtgctgtgtgctccagcccaccgtcccggcctccgggcacccggagctcccagtaccagagcacgtgtgccggggacatctccaggcaagggcacaggccacagccacccagggcagcccctgctgttggcacccctcactgcggtcctgtcactctgtctgtagcgaggggggaggcaggggccaaggcggcggctgtcttgcagggtgttgggttgcaggtgtggccgtgtctgtcctgagccctctgctccaagggtcttgctgaccacagttatgcttctggggcctggtgtccctgcactggcagtgggcggggaagaggcttctctgagggttcagcagcagctcccagtgtgacactggggagtgcctgctctgccaacaccaggctggaggcaggttttagggaaggctgggctttcccggcctcagagctgcacccatgctacctgtgagcttctggggcctcctggagcctcgagatggcgtggaacggccagggtcgtcggtggtgagccagcagccctgtcacccacacctcatcactgttccctcaggcaaacgtggtgtgtgtggtgtatgacgtctctgaggaggccaccattgagaaggtgagccctcagtgcagaccccaacagcagagacacagtggccggtggtggcccaggtggaccttcacccaacccgtggccagtgccatcgctcacagcattttggggagcctgacgtggagttgcctgacgtggagtcacccggccctctcctgtgatcccacttcccctgagagggtctggggcgtcccgcagtctgagccattgaggccggcagtcctctttcttccccagtttccaaacccccggggggggacccgcagagggcctgcgttgggggcggccctaggcttgggccccagtgacttgggggtgtttgggagccattggggtcagacagatgaggctgcacctgctgcctgccttctcccaccagctttgttcctgtggccgggacttgggccctcagtgggccttgacctcccccttctgctctcccccagccaggctcatgctccagctgggagccatgtgcccgcgggcagcctcacttcacagccaggctttgcttttcagattcgaactaagtggatcccactggtgaatggggggaccacgcaggggcccagggtgcccatcatcctagtgggcaacaagtcagacctgcggtcggggagctccatggaggccgtgctccccatcatgagccagtttcccgagattgagacctgcgtggagtgttcggccaagaacctgaggaacatctcagagctgttctactacgcccagaaggccgtcctgcatcccacagcccccctctatgaccctgaggccaagcagttgaggcccgcgtgcgcccaggcgctgacgcgcatcttcaggctctcagatcaggacctggaccaggcgctcagtgacgaagagctcaacgctttccagaaatcctgctttgggcaccccctggccccgcaggccctggaggacgtgaagacggtggtgtgcaggaacgtggcgggcggcgtgcgggaggaccggctgaccctggatggtgaggccgggtgcccgcctgtgcctggggagtgtggggagggggctgtgcctggtgctccccctgctttgtctcggtgcaggtttcctcttcctgaacacgctcttcatccagcgcggccggcacgagaccacctggaccatcctgcggcgcttcggctacagcgatgccctggagctgactgcggactatctctcccctctgatccacgtgccccccggctgcagcacggagctcaaccaccttggctaccagtttgtgcagagagtgtttgagaagcacgaccaggaccgcgacggcgccctctcgcccgtggagctgcaaagccttttcagtgtgttcccagcagcgccctggggccccgagctcccacgcacagtccgcacagaggccggccggttgcccctgcacggatacctctgccagtggaccctggtgacctacctggacgtccggagctgccttggacacctaggctacctgggctaccccaccctctgtgagcaggaccaggcccatgccatcacagtcactcgtgagaagaggctggaccaggagaagggacagacgcagcggagcgtcctcctgtgcaaggtggtaggggcccgtggagtgggcaagtctgccttcctgcaggcctttctcggccgcggcctgggggtaagcaccctagactcccccaccaccccaggggctccaggggcagggcagggcaatctggggggcactgcagccagcgagtgtcaggacttcacctccctcaccaggacacgagggagcagcctcccggctacgccatcgacacggtgcaggtcaatgggcaggagaagtacttgatcgtgagtgctggggcggcgcggcctgtgcccgagggtggacccggggacacccaggcctgcctggcagatctggcccagcatggccctagggggaccgagccccagggacccttcctaaggccgctgtctgtcccagctctgtgaggtgggcacagatggtctgctggccacatcgctggacgccacctgtgacgttgcctgcttgatgtttgatggcagtgacccaaagtcctttgcacattgtgccagcgtctacaagcaccattacatggacgggcagaccccctgcctctttgtctcctccaaggccgacctgcccgaaggtgtcgcggtgtctggcccatcaccggccgagttttgccgcaagcaccggctacccgctcccgtgccgttctcctgtgctggcccagccgagcccagcaccaccatcttcacccagctcgccaccatggccgccttcccgtgggtacccagtagcgcagccctggggactagcagtgtctgtcatccgagcagtgggcagcggtggtgtcaggcctggaactggggactagcagtgtctgtcatccgagcagtgggcagcagtggcgtcaggcctggaactggggccagagtggcggggtggagctttgtgtggcagatgattcttctctcttgcagacatttggtccacgcagagctgcatccctcttccttctggctccgggggctgctgggggttgtcggggccgccgtggccgcagtcctcagcttctcactctacagggtcctggtgaagagccagtgaggcccctggtacccaagccccctcccctgacctgggtgtgcctcgctgctggggctctgcaggggcagcacagctggggtgcaggccaggctgccactccgggaacgcctttgcgccgggactttttgtttctgaaggcagtcgatctgcagcggggccttatgctgccatgcactgccctggctcctgccggacccccagggtgggccgtggcaggtggctgagcaggagctcccaagtgccggccaccgctgtcagggattgcccacccctgggcatcatgtgtgtggggccggggagcacaggtgtgggagctggtgaccccagacccagaattctcagggctctacccccctttcctggtcctaggtggccagtgggtatgaggagggctggaaggcagagctttgggccaaaagcaggcgttggggggtcccccctcaagtttggagccgtttccgtggttgtagcagaggaccggaggttgggttcctgattaaacttcactgtgtgttttctatctcgga

SEQ ID NO: 343077 - DNA, 2530 bp, Homo sapiens
agcgggggaaccggaagtgcggggcgggcgcgggggcagagcgaaaggcttgaggaccaggtcggggccgggttccgggtcggggagcggctccgggcggcagctatgaggcgggacgtgcgcatcctgttactgggcgaggcccaggtggggaagacgtcgctgatcctgtccctggtgggcgaggagttccccgaggaggtccctccccgcgcggaggagatcacgatccccgcggacgtcaccccggagaaggtgcccacccacatcgtggactactcagaagccgagcagacggacgaggagctgcgggaggagatccacaaggcaaacgtggtgtgtgtggtgtatgacgtctctgaggaggccaccattgagaagattcgaactaagtggatcccactggtgaatggggggaccacgcaggggcccagggtgcccatcatcctagtgggcaacaagtcagacctgcggtcggggagctccatggaggccgtgctccccatcatgagccagtttcccgagattgagacctgcgtggagtgttcggccaagaacctgaggaacatctcagagctgttctactacgcccagaaggccgtcctgcatcccacagcccccctctatgaccctgaggccaagcagttgaggcccgcgtgcgcccaggcgctgacgcgcatcttcaggctctcagatcaggacctggaccaggcgctcagtgacgaagagctcaacgctttccagaaatcctgctttgggcaccccctggccccgcaggccctggaggacgtgaagacggtggtgtgcaggaacgtggcgggcggcgtgcgggaggaccggctgaccctggatggtttcctcttcctgaacacgctcttcatccagcgcggccggcacgagaccacctggaccatcctgcggcgcttcggctacagcgatgccctggagctgactgcggactatctctcccctctgatccacgtgccccccggctgcagcacggagctcaaccaccttggctaccagtttgtgcagagagtgtttgagaagcacgaccaggaccgcgacggcgccctctcgcccgtggagctgcaaagccttttcagtgtgttcccagcagcgccctggggccccgagctcccacgcacagtccgcacagaggccggccggttgcccctgcacggatacctctgccagtggaccctggtgacctacctggacgtccggagctgccttggacacctaggctacctgggctaccccaccctctgtgagcaggaccaggcccatgccatcacagtcactcgtgagaagaggctggaccaggagaagggacagacgcagcggagcgtcctcctgtgcaaggtggtaggggcccgtggagtgggcaagtctgccttcctgcaggcctttctcggccgcggcctggggcaccaggacacgagggagcagcctcccggctacgccatcgacacggtgcaggtcaatgggcaggagaagtacttgatcctctgtgaggtgggcacagatggtctgctggccacatcgctggacgccacctgtgacgttgcctgcttgatgtttgatggcagtgacccaaagtcctttgcacattgtgccagcgtctacaagcaccattacatggacgggcagaccccctgcctctttgtctcctccaaggccgacctgcccgaaggtgtcgcggtgtctggcccatcaccggccgagttttgccgcaagcaccggctacccgctcccgtgccgttctcctgtgctggcccagccgagcccagcaccaccatcttcacccagctcgccaccatggccgccttcccacatttggtccacgcagagctgcatccctcttccttctggctccgggggctgctgggggttgtcggggccgccgtggccgcagtcctcagcttctcactctacagggtcctggtgaagagccagtgaggcccctggtacccaagccccctcccctgacctgggtgtgcctcgctgctggggctctgcaggggcagcacagctggggtgcaggccaggctgccactccgggaacgcctttgcgccgggactttttgtttctgaaggcagtcgatctgcagcggggccttatgctgccatgcactgccctggctcctgccggacccccagggtgggccgtggcaggtggctgagcaggagctcccaagtgccggccaccgctgtcagggattgcccacccctgggcatcatgtgtgtggggccggggagcacaggtgtgggagctggtgaccccagacccagaattctcagggctctacccccctttcctggtcctaggtggccagtgggtatgaggagggctggaaggcagagctttgggccaaaagcaggcgttggggggtcccccctcaagtttggagccgtttccgtggttgtagcagaggaccggaggttgggttcctgattaaacttcactgtgtgttttctatctcggatcccagtctctgaagacaacttgctttgattcaacctagaa

SEQ ID NO: 343078 - DNA, 3504 bp, Homo sapiens
agcgggggaaccggaagtgcggggcgggcgcgggggcagagcgaaaggcttgaggaccaggtcggggccgggttccgggtcggggagcggctccgggcggcagctatgaggcgggacgtgcgcatcctgttactgggcgaggcccaggtggggaagacgtcgctgatcctgtccctggtgggcgaggagttccccgaggaggtaaggggcacgcccgccgcgggggtgggagcgggcccagccgggggtccctggtgagcgcgcgggtcccttgcaggtccctccccgcgcggaggagatcacgatccccgcggacgtcaccccggagaaggtgcccacccacatcgtggactactcaggtagcggccgtagcctcccgggggcccggcccgcagcggtccggcgggcctgctgggtccgcagtggagtctctttgtccccctagaagccgagcagacggacgaggagctgcgggaggagatccacaaggtacccgtggtgcgcgggacgagggaggggctgggcgcgggctcggcctaatccgcttcgcagcctgggggattggaccgaggtgctccgggtgtccttggccctgataattctgtgacctccgcactgagggttgtcggggcccctacagcgcaccccgctgggagccggcaccgctcagtccagtggtgctccagggataacaggacccttccccgcgggctctccctccctcctgccggggtggcagcagcgtttgctcttcctgtgggctctgtgtgcgccacgtccccgtgctgtgtgctccagcccaccgtcccggcctccgggcacccggagctcccagtaccagagcacgtgtgccggggacatctccaggcaagggcacaggccacagccacccagggcagcccctgctgttggcacccctcactgcggtcctgtcactctgtctgtagcgaggggggaggcaggggccaaggcggcggctgtcttgcagggtgttgggttgcaggtgtggccgtgtctgtcctgagccctctgctccaagggtcttgctgaccacagttatgcttctggggcctggtgtccctgcactggcagtgggcggggaagaggcttctctgagggttcagcagcagctcccagtgtgacactggggagtgcctgctctgccaacaccaggctggaggcaggttttagggaaggctgggctttcccggcctcagagctgcacccatgctacctgtgagcttctggggcctcctggagcctcgagatggcgtggaacggccagggtcgtcggtggtgagccagcagccctgtcacccacacctcatcactgttccctcaggcaaacgtggtgtgtgtggtgtatgacgtctctgaggaggccaccattgagaagattcgaactaagtggatcccactggtgaatggggggaccacgcaggggcccagggtgcccatcatcctagtgggcaacaagtcagacctgcggtcggggagctccatggaggccgtgctccccatcatgagccagtttcccgagattgagacctgcgtggagtgttcggccaagaacctgaggaacatctcagagctgttctactacgcccagaaggccgtcctgcatcccacagcccccctctatgaccctgaggccaagcagttgaggcccgcgtgcgcccaggcgctgacgcgcatcttcaggctctcagatcaggacctggaccaggcgctcagtgacgaagagctcaacgctttccagaaatcctgctttgggcaccccctggccccgcaggccctggaggacgtgaagacggtggtgtgcaggaacgtggcgggcggcgtgcgggaggaccggctgaccctggatggtttcctcttcctgaacacgctcttcatccagcgcggccggcacgagaccacctggaccatcctgcggcgcttcggctacagcgatgccctggagctgactgcggactatctctcccctctgatccacgtgccccccggctgcagcacggagctcaaccaccttggctaccagtttgtgcagagagtgtttgagaagcacgaccaggaccgcgacggcgccctctcgcccgtggagctgcaaagccttttcagtgtgttcccagcagcgccctggggccccgagctcccacgcacagtccgcacagaggccggccggttgcccctgcacggatacctctgccagtggaccctggtgacctacctggacgtccggagctgccttggacacctaggctacctgggctaccccaccctctgtgagcaggaccaggcccatgccatcacagtcactcgtgagaagaggctggaccaggagaagggacagacgcagcggagcgtcctcctgtgcaaggtggtaggggcccgtggagtgggcaagtctgccttcctgcaggcctttctcggccgcggcctggggcaccaggacacgagggagcagcctcccggctacgccatcgacacggtgcaggtcaatgggcaggagaagtacttgatcctctgtgaggtgggcacagatggtctgctggccacatcgctggacgccacctgtgacgttgcctgcttgatgtttgatggcagtgacccaaagtcctttgcacattgtgccagcgtctacaagcaccattacatggacgggcagaccccctgcctctttgtctcctccaaggccgacctgcccgaaggtgtcgcggtgtctggcccatcaccggccgagttttgccgcaagcaccggctacccgctcccgtgccgttctcctgtgctggcccagccgagcccagcaccaccatcttcacccagctcgccaccatggccgccttcccacatttggtccacgcagagctgcatccctcttccttctggctccgggggctgctgggggttgtcggggccgccgtggccgcagtcctcagcttctcactctacagggtcctggtgaagagccagtgaggcccctggtacccaagccccctcccctgacctgggtgtgcctcgctgctggggctctgcaggggcagcacagctggggtgcaggccaggctgccactccgggaacgcctttgcgccgggactttttgtttctgaaggcagtcgatctgcagcggggccttatgctgccatgcactgccctggctcctgccggacccccagggtgggccgtggcaggtggctgagcaggagctcccaagtgccggccaccgctgtcagggattgcccacccctgggcatcatgtgtgtggggccggggagcacaggtgtgggagctggtgaccccagacccagaattctcagggctctacccccctttcctggtcctaggtggccagtgggtatgaggagggctggaaggcagagctttgggccaaaagcaggcgttggggggtcccccctcaagtttggagccgtttccgtggttgtagcagaggaccggaggttgggttcctgattaaacttcactgtgtgttttctatctcgga

SEQ ID NO: 343079 - DNA, 4020 bp, Homo sapiens
agcgggggaaccggaagtgcggggcgggcgcgggggcagagcgaaaggcttgaggaccaggtcggggccgggttccgggtcggggagcggctccgggcggcagctatgaggcgggacgtgcgcatcctgttactgggcgaggcccaggtggggaagacgtcgctgatcctgtccctggtgggcgaggagttccccgaggaggtaaggggcacgcccgccgcgggggtgggagcgggcccagccgggggtccctggtgagcgcgcgggtcccttgcaggtccctccccgcgcggaggagatcacgatccccgcggacgtcaccccggagaaggtgcccacccacatcgtggactactcaggtagcggccgtagcctcccgggggcccggcccgcagcggtccggcgggcctgctgggtccgcagtggagtctctttgtccccctagaagccgagcagacggacgaggagctgcgggaggagatccacaaggtacccgtggtgcgcgggacgagggaggggctgggcgcgggctcggcctaatccgcttcgcagcctgggggattggaccgaggtgctccgggtgtccttggccctgataattctgtgacctccgcactgagggttgtcggggcccctacagcgcaccccgctgggagccggcaccgctcagtccagtggtgctccagggataacaggacccttccccgcgggctctccctccctcctgccggggtggcagcagcgtttgctcttcctgtgggctctgtgtgcgccacgtccccgtgctgtgtgctccagcccaccgtcccggcctccgggcacccggagctcccagtaccagagcacgtgtgccggggacatctccaggcaagggcacaggccacagccacccagggcagcccctgctgttggcacccctcactgcggtcctgtcactctgtctgtagcgaggggggaggcaggggccaaggcggcggctgtcttgcagggtgttgggttgcaggtgtggccgtgtctgtcctgagccctctgctccaagggtcttgctgaccacagttatgcttctggggcctggtgtccctgcactggcagtgggcggggaagaggcttctctgagggttcagcagcagctcccagtgtgacactggggagtgcctgctctgccaacaccaggctggaggcaggttttagggaaggctgggctttcccggcctcagagctgcacccatgctacctgtgagcttctggggcctcctggagcctcgagatggcgtggaacggccagggtcgtcggtggtgagccagcagccctgtcacccacacctcatcactgttccctcaggcaaacgtggtgtgtgtggtgtatgacgtctctgaggaggccaccattgagaaggtgagccctcagtgcagaccccaacagcagagacacagtggccggtggtggcccaggtggaccttcacccaacccgtggccagtgccatcgctcacagcattttggggagcctgacgtggagttgcctgacgtggagtcacccggccctctcctgtgatcccacttcccctgagagggtctggggcgtcccgcagtctgagccattgaggccggcagtcctctttcttccccagtttccaaacccccggggggggacccgcagagggcctgcgttgggggcggccctaggcttgggccccagtgacttgggggtgtttgggagccattggggtcagacagatgaggctgcacctgctgcctgccttctcccaccagctttgttcctgtggccgggacttgggccctcagtgggccttgacctcccccttctgctctcccccagccaggctcatgctccagctgggagccatgtgcccgcgggcagcctcacttcacagccaggctttgcttttcagattcgaactaagtggatcccactggtgaatggggggaccacgcaggggcccagggtgcccatcatcctagtgggcaacaagtcagacctgcggtcggggagctccatggaggccgtgctccccatcatgagccagtttcccgagattgagacctgcgtggagtgttcggccaagaacctgaggaacatctcagagctgttctactacgcccagaaggccgtcctgcatcccacagcccccctctatgaccctgaggccaagcagttgaggcccgcgtgcgcccaggcgctgacgcgcatcttcaggctctcagatcaggacctggaccaggcgctcagtgacgaagagctcaacgctttccagaaatcctgctttgggcaccccctggccccgcaggccctggaggacgtgaagacggtggtgtgcaggaacgtggcgggcggcgtgcgggaggaccggctgaccctggatggtttcctcttcctgaacacgctcttcatccagcgcggccggcacgagaccacctggaccatcctgcggcgcttcggctacagcgatgccctggagctgactgcggactatctctcccctctgatccacgtgccccccggctgcagcacggagctcaaccaccttggctaccagtttgtgcagagagtgtttgagaagcacgaccaggaccgcgacggcgccctctcgcccgtggagctgcaaagccttttcagtgtgttcccagcagcgccctggggccccgagctcccacgcacagtccgcacagaggccggccggttgcccctgcacggatacctctgccagtggaccctggtgacctacctggacgtccggagctgccttggacacctaggctacctgggctaccccaccctctgtgagcaggaccaggcccatgccatcacagtcactcgtgagaagaggctggaccaggagaagggacagacgcagcggagcgtcctcctgtgcaaggtggtaggggcccgtggagtgggcaagtctgccttcctgcaggcctttctcggccgcggcctggggcaccaggacacgagggagcagcctcccggctacgccatcgacacggtgcaggtcaatgggcaggagaagtacttgatcctctgtgaggtgggcacagatggtctgctggccacatcgctggacgccacctgtgacgttgcctgcttgatgtttgatggcagtgacccaaagtcctttgcacattgtgccagcgtctacaagcaccattacatggacgggcagaccccctgcctctttgtctcctccaaggccgacctgcccgaaggtgtcgcggtgtctggcccatcaccggccgagttttgccgcaagcaccggctacccgctcccgtgccgttctcctgtgctggcccagccgagcccagcaccaccatcttcacccagctcgccaccatggccgccttcccacatttggtccacgcagagctgcatccctcttccttctggctccgggggctgctgggggttgtcggggccgccgtggccgcagtcctcagcttctcactctacagggtcctggtgaagagccagtgaggcccctggtacccaagccccctcccctgacctgggtgtgcctcgctgctggggctctgcaggggcagcacagctggggtgcaggccaggctgccactccgggaacgcctttgcgccgggactttttgtttctgaaggcagtcgatctgcagcggggccttatgctgccatgcactgccctggctcctgccggacccccagggtgggccgtggcaggtggctgagcaggagctcccaagtgccggccaccgctgtcagggattgcccacccctgggcatcatgtgtgtggggccggggagcacaggtgtgggagctggtgaccccagacccagaattctcagggctctacccccctttcctggtcctaggtggccagtgggtatgaggagggctggaaggcagagctttgggccaaaagcaggcgttggggggtcccccctcaagtttggagccgtttccgtggttgtagcagaggaccggaggttgggttcctgattaaacttcactgtgtgttttctatctcgga

SEQ ID NO: 343080 - DNA, 3605 bp, Homo sapiens
agcgggggaaccggaagtgcggggcgggcgcgggggcagagcgaaaggcttgaggaccaggtcggggccgggttccgggtcggggagcggctccgggcggcagctatgaggcgggacgtgcgcatcctgttactgggcgaggcccaggtggggaagacgtcgctgatcctgtccctggtgggcgaggagttccccgaggaggtaaggggcacgcccgccgcgggggtgggagcgggcccagccgggggtccctggtgagcgcgcgggtcccttgcaggtccctccccgcgcggaggagatcacgatccccgcggacgtcaccccggagaaggtgcccacccacatcgtggactactcaggtagcggccgtagcctcccgggggcccggcccgcagcggtccggcgggcctgctgggtccgcagtggagtctctttgtccccctagaagccgagcagacggacgaggagctgcgggaggagatccacaaggtacccgtggtgcgcgggacgagggaggggctgggcgcgggctcggcctaatccgcttcgcagcctgggggattggaccgaggtgctccgggtgtccttggccctgataattctgtgacctccgcactgagggttgtcggggcccctacagcgcaccccgctgggagccggcaccgctcagtccagtggtgctccagggataacaggacccttccccgcgggctctccctccctcctgccggggtggcagcagcgtttgctcttcctgtgggctctgtgtgcgccacgtccccgtgctgtgtgctccagcccaccgtcccggcctccgggcacccggagctcccagtaccagagcacgtgtgccggggacatctccaggcaagggcacaggccacagccacccagggcagcccctgctgttggcacccctcactgcggtcctgtcactctgtctgtagcgaggggggaggcaggggccaaggcggcggctgtcttgcagggtgttgggttgcaggtgtggccgtgtctgtcctgagccctctgctccaagggtcttgctgaccacagttatgcttctggggcctggtgtccctgcactggcagtgggcggggaagaggcttctctgagggttcagcagcagctcccagtgtgacactggggagtgcctgctctgccaacaccaggctggaggcaggttttagggaaggctgggctttcccggcctcagagctgcacccatgctacctgtgagcttctggggcctcctggagcctcgagatggcgtggaacggccagggtcgtcggtggtgagccagcagccctgtcacccacacctcatcactgttccctcaggcaaacgtggtgtgtgtggtgtatgacgtctctgaggaggccaccattgagaagattcgaactaagtggatcccactggtgaatggggggaccacgcaggggcccagggtgcccatcatcctagtgggcaacaagtcagacctgcggtcggggagctccatggaggccgtgctccccatcatgagccagtttcccgagattgagacctgcgtggagtgttcggccaagaacctgaggaacatctcagagctgttctactacgcccagaaggccgtcctgcatcccacagcccccctctatgaccctgaggccaagcagttgaggcccgcgtgcgcccaggcgctgacgcgcatcttcaggctctcagatcaggacctggaccaggcgctcagtgacgaagagctcaacgctttccagaaatcctgctttgggcaccccctggccccgcaggccctggaggacgtgaagacggtggtgtgcaggaacgtggcgggcggcgtgcgggaggaccggctgaccctggatggtttcctcttcctgaacacgctcttcatccagcgcggccggcacgagaccacctggaccatcctgcggcgcttcggctacagcgatgccctggagctgactgcggactatctctcccctctgatccacgtgccccccggctgcagcacggagctcaaccaccttggctaccagtttgtgcagagagtgtttgagaagcacgaccaggaccgcgacggcgccctctcgcccgtggagctgcaaagccttttcagtgtgttcccagcagcgccctggggccccgagctcccacgcacagtccgcacagaggccggccggttgcccctgcacggatacctctgccagtggaccctggtgacctacctggacgtccggagctgccttggacacctaggctacctgggctaccccaccctctgtgagcaggaccaggcccatgccatcacagtcactcgtgagaagaggctggaccaggagaagggacagacgcagcggagcgtcctcctgtgcaaggtggtaggggcccgtggagtgggcaagtctgccttcctgcaggcctttctcggccgcggcctgggggtaagcaccctagactcccccaccaccccaggggctccaggggcagggcagggcaatctggggggcactgcagccagcgagtgtcaggacttcacctccctcaccaggacacgagggagcagcctcccggctacgccatcgacacggtgcaggtcaatgggcaggagaagtacttgatcctctgtgaggtgggcacagatggtctgctggccacatcgctggacgccacctgtgacgttgcctgcttgatgtttgatggcagtgacccaaagtcctttgcacattgtgccagcgtctacaagcaccattacatggacgggcagaccccctgcctctttgtctcctccaaggccgacctgcccgaaggtgtcgcggtgtctggcccatcaccggccgagttttgccgcaagcaccggctacccgctcccgtgccgttctcctgtgctggcccagccgagcccagcaccaccatcttcacccagctcgccaccatggccgccttcccacatttggtccacgcagagctgcatccctcttccttctggctccgggggctgctgggggttgtcggggccgccgtggccgcagtcctcagcttctcactctacagggtcctggtgaagagccagtgaggcccctggtacccaagccccctcccctgacctgggtgtgcctcgctgctggggctctgcaggggcagcacagctggggtgcaggccaggctgccactccgggaacgcctttgcgccgggactttttgtttctgaaggcagtcgatctgcagcggggccttatgctgccatgcactgccctggctcctgccggacccccagggtgggccgtggcaggtggctgagcaggagctcccaagtgccggccaccgctgtcagggattgcccacccctgggcatcatgtgtgtggggccggggagcacaggtgtgggagctggtgaccccagacccagaattctcagggctctacccccctttcctggtcctaggtggccagtgggtatgaggagggctggaaggcagagctttgggccaaaagcaggcgttggggggtcccccctcaagtttggagccgtttccgtggttgtagcagaggaccggaggttgggttcctgattaaacttcactgtgtgttttctatctcgga

SEQ ID NO: 343081 - DNA, 3967 bp, Homo sapiens
agcgggggaaccggaagtgcggggcgggcgcgggggcagagcgaaaggcttgaggaccaggtcggggccgggttccgggtcggggagcggctccgggcggcagctatgaggcgggacgtgcgcatcctgttactgggcgaggcccaggtggggaagacgtcgctgatcctgtccctggtgggcgaggagttccccgaggaggtaaggggcacgcccgccgcgggggtgggagcgggcccagccgggggtccctggtgagcgcgcgggtcccttgcaggtccctccccgcgcggaggagatcacgatccccgcggacgtcaccccggagaaggtgcccacccacatcgtggactactcaggtagcggccgtagcctcccgggggcccggcccgcagcggtccggcgggcctgctgggtccgcagtggagtctctttgtccccctagaagccgagcagacggacgaggagctgcgggaggagatccacaaggtacccgtggtgcgcgggacgagggaggggctgggcgcgggctcggcctaatccgcttcgcagcctgggggattggaccgaggtgctccgggtgtccttggccctgataattctgtgacctccgcactgagggttgtcggggcccctacagcgcaccccgctgggagccggcaccgctcagtccagtggtgctccagggataacaggacccttccccgcgggctctccctccctcctgccggggtggcagcagcgtttgctcttcctgtgggctctgtgtgcgccacgtccccgtgctgtgtgctccagcccaccgtcccggcctccgggcacccggagctcccagtaccagagcacgtgtgccggggacatctccaggcaagggcacaggccacagccacccagggcagcccctgctgttggcacccctcactgcggtcctgtcactctgtctgtagcgaggggggaggcaggggccaaggcggcggctgtcttgcagggtgttgggttgcaggtgtggccgtgtctgtcctgagccctctgctccaagggtcttgctgaccacagttatgcttctggggcctggtgtccctgcactggcagtgggcggggaagaggcttctctgagggttcagcagcagctcccagtgtgacactggggagtgcctgctctgccaacaccaggctggaggcaggttttagggaaggctgggctttcccggcctcagagctgcacccatgctacctgtgagcttctggggcctcctggagcctcgagatggcgtggaacggccagggtcgtcggtggtgagccagcagccctgtcacccacacctcatcactgttccctcaggcaaacgtggtgtgtgtggtgtatgacgtctctgaggaggccaccattgagaaggtgagccctcagtgcagaccccaacagcagagacacagtggccggtggtggcccaggtggaccttcacccaacccgtggccagtgccatcgctcacagcattttggggagcctgacgtggagttgcctgacgtggagtcacccggccctctcctgtgatcccacttcccctgagagggtctggggcgtcccgcagtctgagccattgaggccggcagtcctctttcttccccagtttccaaacccccggggggggacccgcagagggcctgcgttgggggcggccctaggcttgggccccagtgacttgggggtgtttgggagccattggggtcagacagatgaggctgcacctgctgcctgccttctcccaccagctttgttcctgtggccgggacttgggccctcagtgggccttgacctcccccttctgctctcccccagccaggctcatgctccagctgggagccatgtgcccgcgggcagcctcacttcacagccaggctttgcttttcagattcgaactaagtggatcccactggtgaatggggggaccacgcaggggcccagggtgcccatcatcctagtgggcaacaagtcagacctgcggtcggggagctccatggaggccgtgctccccatcatgagccagtttcccgagattgagacctgcgtggagtgttcggccaagaacctgaggaacatctcagagctgttctactacgcccagaaggccgtcctgcatcccacagcccccctctatgaccctgaggccaagcaggcgctgacgcgcatcttcaggctctcagatcaggacctggaccaggcgctcagtgacgaagagctcaacgctttccagaaatcctgctttgggcaccccctggccccgcaggccctggaggacgtgaagacggtggtgtgcaggaacgtggcgggcggcgtgcgggaggaccggctgaccctggatgcgcggccggcacgagaccacctggaccatcctgcggcgcttcggctacagcgatgccctggagctgactgcggactatctctcccctctgatccacgtgccccccggctgcagcacggagctcaaccaccttggctaccagtttgtgcagagagtgtttgagaagcacgaccaggaccgcgacggcgccctctcgcccgtggagctgcaaagccttttcagtgtgttcccagcagcgccctggggccccgagctcccacgcacagtccgcacagaggccggccggttgcccctgcacggatacctctgccagtggaccctggtgacctacctggacgtccggagctgccttggacacctaggctacctgggctaccccaccctctgtgagcaggaccaggcccatgccatcacagtcactcgtgagaagaggctggaccaggagaagggacagacgcagcggagcgtcctcctgtgcaaggtggtaggggcccgtggagtgggcaagtctgccttcctgcaggcctttctcggccgcggcctggggcaccaggacacgagggagcagcctcccggctacgccatcgacacggtgcaggtcaatgggcaggagaagtacttgatcctctgtgaggtgggcacagatggtctgctggccacatcgctggacgccacctgtgacgttgcctgcttgatgtttgatggcagtgacccaaagtcctttgcacattgtgccagcgtctacaagcaccattacatggacgggcagaccccctgcctctttgtctcctccaaggccgacctgcccgaaggtgtcgcggtgtctggcccatcaccggccgagttttgccgcaagcaccggctacccgctcccgtgccgttctcctgtgctggcccagccgagcccagcaccaccatcttcacccagctcgccaccatggccgccttcccacatttggtccacgcagagctgcatccctcttccttctggctccgggggctgctgggggttgtcggggccgccgtggccgcagtcctcagcttctcactctacagggtcctggtgaagagccagtgaggcccctggtacccaagccccctcccctgacctgggtgtgcctcgctgctggggctctgcaggggcagcacagctggggtgcaggccaggctgccactccgggaacgcctttgcgccgggactttttgtttctgaaggcagtcgatctgcagcggggccttatgctgccatgcactgccctggctcctgccggacccccagggtgggccgtggcaggtggctgagcaggagctcccaagtgccggccaccgctgtcagggattgcccacccctgggcatcatgtgtgtggggccggggagcacaggtgtgggagctggtgaccccagacccagaattctcagggctctacccccctttcctggtcctaggtggccagtgggtatgaggagggctggaaggcagagctttgggccaaaagcaggcgttggggggtcccccctcaagtttggagccgtttccgtggttgtagcagaggaccggaggttgggttcctgattaaacttcactgtgtgttttctatctcgga

SEQ ID NO: 343082 - DNA, 4102 bp, Homo sapiens
agcgggggaaccggaagtgcggggcgggcgcgggggcagagcgaaaggcttgaggaccaggtcggggccgggttccgggtcggggagcggctccgggcggcagctatgaggcgggacgtgcgcatcctgttactgggcgaggcccaggtggggaagacgtcgctgatcctgtccctggtgggcgaggagttccccgaggaggtaaggggcacgcccgccgcgggggtgggagcgggcccagccgggggtccctggtgagcgcgcgggtcccttgcaggtccctccccgcgcggaggagatcacgatccccgcggacgtcaccccggagaaggtgcccacccacatcgtggactactcaggtagcggccgtagcctcccgggggcccggcccgcagcggtccggcgggcctgctgggtccgcagtggagtctctttgtccccctagaagccgagcagacggacgaggagctgcgggaggagatccacaaggtacccgtggtgcgcgggacgagggaggggctgggcgcgggctcggcctaatccgcttcgcagcctgggggattggaccgaggtgctccgggtgtccttggccctgataattctgtgacctccgcactgagggttgtcggggcccctacagcgcaccccgctgggagccggcaccgctcagtccagtggtgctccagggataacaggacccttccccgcgggctctccctccctcctgccggggtggcagcagcgtttgctcttcctgtgggctctgtgtgcgccacgtccccgtgctgtgtgctccagcccaccgtcccggcctccgggcacccggagctcccagtaccagagcacgtgtgccggggacatctccaggcaagggcacaggccacagccacccagggcagcccctgctgttggcacccctcactgcggtcctgtcactctgtctgtagcgaggggggaggcaggggccaaggcggcggctgtcttgcagggtgttgggttgcaggtgtggccgtgtctgtcctgagccctctgctccaagggtcttgctgaccacagttatgcttctggggcctggtgtccctgcactggcagtgggcggggaagaggcttctctgagggttcagcagcagctcccagtgtgacactggggagtgcctgctctgccaacaccaggctggaggcaggttttagggaaggctgggctttcccggcctcagagctgcacccatgctacctgtgagcttctggggcctcctggagcctcgagatggcgtggaacggccagggtcgtcggtggtgagccagcagccctgtcacccacacctcatcactgttccctcaggcaaacgtggtgtgtgtggtgtatgacgtctctgaggaggccaccattgagaaggtgagccctcagtgcagaccccaacagcagagacacagtggccggtggtggcccaggtggaccttcacccaacccgtggccagtgccatcgctcacagcattttggggagcctgacgtggagttgcctgacgtggagtcacccggccctctcctgtgatcccacttcccctgagagggtctggggcgtcccgcagtctgagccattgaggccggcagtcctctttcttccccagtttccaaacccccggggggggacccgcagagggcctgcgttgggggcggccctaggcttgggccccagtgacttgggggtgtttgggagccattggggtcagacagatgaggctgcacctgctgcctgccttctcccaccagctttgttcctgtggccgggacttgggccctcagtgggccttgacctcccccttctgctctcccccagccaggctcatgctccagctgggagccatgtgcccgcgggcagcctcacttcacagccaggctttgcttttcagattcgaactaagtggatcccactggtgaatggggggaccacgcaggggcccagggtgcccatcatcctagtgggcaacaagtcagacctgcggtcggggagctccatggaggccgtgctccccatcatgagccagtttcccgagattgagacctgcgtggagtgttcggccaagaacctgaggaacatctcagagctgttctactacgcccagaaggccgtcctgcatcccacagcccccctctatgaccctgaggccaagcagttgaggcccgcgtgcgcccaggcgctgacgcgcatcttcaggctctcagatcaggacctggaccaggcgctcagtgacgaagagctcaacgctttccagaaatcctgctttgggcaccccctggccccgcaggccctggaggacgtgaagacggtggtgtgcaggaacgtggcgggcggcgtgcgggaggaccggctgaccctggatggtgaggccgggtgcccgcctgtgcctggggagtgtggggagggggctgtgcctggtgctccccctgctttgtctcggtgcaggtttcctcttcctgaacacgctcttcatccagcgcggccggcacgagaccacctggaccatcctgcggcgcttcggctacagcgatgccctggagctgactgcggactatctctcccctctgatccacgtgccccccggctgcagcacggagctcaaccaccttggctaccagtttgtgcagagagtgtttgagaagcacgaccaggaccgcgacggcgccctctcgcccgtggagctgcaaagccttttcagtgtgttcccagcagcgccctggggccccgagctcccacgcacagtccgcacagaggccggccggttgcccctgcacggatacctctgccagtggaccctggtgacctacctggacgtccggagctgccttggacacctaggctacctgggctaccccaccctctgtgagcaggaccaggcccatgccatcacagtcactcgtgagaagaggctggaccaggagaagggacagacgcagcggagcgtcctcctgtgcaaggtggtaggggcccgtggagtgggcaagtctgccttcctgcaggcctttctcggccgcggcctggggcaccaggacacgagggagcagcctcccggctacgccatcgacacggtgcaggtcaatgggcaggagaagtacttgatcctctgtgaggtgggcacagatggtctgctggccacatcgctggacgccacctgtgacgttgcctgcttgatgtttgatggcagtgacccaaagtcctttgcacattgtgccagcgtctacaagcaccattacatggacgggcagaccccctgcctctttgtctcctccaaggccgacctgcccgaaggtgtcgcggtgtctggcccatcaccggccgagttttgccgcaagcaccggctacccgctcccgtgccgttctcctgtgctggcccagccgagcccagcaccaccatcttcacccagctcgccaccatggccgccttcccacatttggtccacgcagagctgcatccctcttccttctggctccgggggctgctgggggttgtcggggccgccgtggccgcagtcctcagcttctcactctacagggtcctggtgaagagccagtgaggcccctggtacccaagccccctcccctgacctgggtgtgcctcgctgctggggctctgcaggggcagcacagctggggtgcaggccaggctgccactccgggaacgcctttgcgccgggactttttgtttctgaaggcagtcgatctgcagcggggccttatgctgccatgcactgccctggctcctgccggacccccagggtgggccgtggcaggtggctgagcaggagctcccaagtgccggccaccgctgtcagggattgcccacccctgggcatcatgtgtgtggggccggggagcacaggtgtgggagctggtgaccccagacccagaattctcagggctctacccccctttcctggtcctaggtggccagtgggtatgaggagggctggaaggcagagctttgggccaaaagcaggcgttggggggtcccccctcaagtttggagccgtttccgtggttgtagcagaggaccggaggttgggttcctgattaaacttcactgtgtgttttctatctcgga

SEQ ID NO: 343083 - DNA, 3545 bp, Homo sapiens
agcgggggaaccggaagtgcggggcgggcgcgggggcagagcgaaaggcttgaggaccaggtcggggccgggttccgggtcggggagcggctccgggcggcagctatgaggcgggacgtgcgcatcctgttactgggcgaggcccaggtggggaagacgtcgctgatcctgtccctggtgggcgaggagttccccgaggaggtaaggggcacgcccgccgcgggggtgggagcgggcccagccgggggtccctggtgagcgcgcgggtcccttgcaggtccctccccgcgcggaggagatcacgatccccgcggacgtcaccccggagaaggtgcccacccacatcgtggactactcaggtagcggccgtagcctcccgggggcccggcccgcagcggtccggcgggcctgctgggtccgcagtggagtctctttgtccccctagaagccgagcagacggacgaggagctgcgggaggagatccacaaggtacccgtggtgcgcgggacgagggaggggctgggcgcgggctcggcctaatccgcttcgcagcctgggggattggaccgaggtgctccgggtgtccttggccctgataattctgtgacctccgcactgagggttgtcggggcccctacagcgcaccccgctgggagccggcaccgctcagtccagtggtgctccagggataacaggacccttccccgcgggctctccctccctcctgccggggtggcagcagcgtttgctcttcctgtgggctctgtgtgcgccacgtccccgtgctgtgtgctccagcccaccgtcccggcctccgggcacccggagctcccagtaccagagcacgtgtgccggggacatctccaggcaagggcacaggccacagccacccagggcagcccctgctgttggcacccctcactgcggtcctgtcactctgtctgtagcgaggggggaggcaggggccaaggcggcggctgtcttgcagggtgttgggttgcaggtgtggccgtgtctgtcctgagccctctgctccaagggtcttgctgaccacagttatgcttctggggcctggtgtccctgcactggcagtgggcggggaagaggcttctctgagggttcagcagcagctcccagtgtgacactggggagtgcctgctctgccaacaccaggctggaggcaggttttagggaaggctgggctttcccggcctcagagctgcacccatgctacctgtgagcttctggggcctcctggagcctcgagatggcgtggaacggccagggtcgtcggtggtgagccagcagccctgtcacccacacctcatcactgttccctcaggcaaacgtggtgtgtgtggtgtatgacgtctctgaggaggccaccattgagaagattcgaactaagtggatcccactggtgaatggggggaccacgcaggggcccagggtgcccatcatcctagtgggcaacaagtcagacctgcggtcggggagctccatggaggccgtgctccccatcatgagccagtttcccgagattgagacctgcgtggagtgttcggccaagaacctgaggaacatctcagagctgttctactacgcccagaaggccgtcctgcatcccacagcccccctctatgaccctgaggccaagcagttgaggcccgcgtgcgcccaggcgctgacgcgcatcttcaggctctcagatcaggacctggaccaggcgctcagtgacgaagagctcaacgctttccagaaatcctgctttgggcaccccctggccccgcaggccctggaggacgtgaagacggtggtgtgcaggaacgtggcgggcggcgtgcgggaggaccggctgaccctggatggtttcctcttcctgaacacgctcttcatccagcgcggccggcacgagaccacctggaccatcctgcggcgcttcggctacagcgatgccctggagctgactgcggactatctctcccctctgatccacgtgccccccggctgcagcacggagctcaaccaccttggctaccagtttgtgcagagagtgtttgagaagcacgaccaggaccgcgacggcgccctctcgcccgtggagctgcaaagccttttcagtgtgttcccagcagcgccctggggccccgagctcccacgcacagtccgcacagaggccggccggttgcccctgcacggatacctctgccagtggaccctggtgacctacctggacgtccggagctgccttggacacctaggctacctgggctaccccaccctctgtgagcaggaccaggcccatgccatcacagtcactcgtgagaagaggctggaccaggagaagggacagacgcagcggagcgtcctcctgtgcaaggtggtaggggcccgtggagtgggcaagtctgccttcctgcaggcctttctcggccgcggcctggggcaccaggacacgagggagcagcctcccggctacgccatcgacacggtgcaggtcaatgggcaggagaagtacttgatcctctgtgaggtgggcacagatggtctgctggccacatcgctggacgccacctgtgacgttgcctgcttgatgtttgatggcagtgacccaaagtcctttgcacattgtgccagcgtctacaagcaccattacatggacgggcagaccccctgcctctttgtctcctccaaggccgacctgcccgaaggtgtcgcggtgtctggcccatcaccggccgagttttgccgcaagcaccggctacccgctcccgtgccgttctcctgtgctggcccagccgagcccagcaccaccatcttcacccagctcgccaccatggccgccttcccacatttggtccacgcagagctgcatccctcttccttctggctccgggggctgctgggggttgtcggggccgccgtggccgcagtcctcagcttctcactctacagggtcctggtgaagagccagtgaggcccctggtacccaagccccctcccctgacctgggtgtgcctcgctgctggggctctgcaggggcagcacagctggggtgcaggccaggctgccactccgggaacgcctttgcgccgggactttttgtttctgaaggcagtcgatctgcagcggggccttatgctgccatgcactgccctggctcctgccggacccccagggtgggccgtggcaggtggctgagcaggagctcccaagtgccggccaccgctgtcagggattgcccacccctgggcatcatgtgtgtggggccggggagcacaggtgtgggagctggtgaccccagacccagaattctcagggctctacccccctttcctggtcctaggtggccagtgggtatgaggagggctggaaggcagagctttgggccaaaagcaggcgttggggggtcccccctcaagtttggagccgtttccgtggttgtagcagaggaccggaggttgggttcctgattaaacttcactgtgtgttttctatctcggatcccagtctctgaagacaacttgctttgattcaacctagaa

SEQ ID NO: 343084 - DNA, 3606 bp, Homo sapiens
agcgggggaaccggaagtgcggggcgggcgcgggggcagagcgaaaggcttgaggaccaggtcggggccgggttccgggtcggggagcggctccgggcggcagctatgaggcgggacgtgcgcatcctgttactgggcgaggcccaggtggggaagacgtcgctgatcctgtccctggtgggcgaggagttccccgaggaggtaaggggcacgcccgccgcgggggtgggagcgggcccagccgggggtccctggtgagcgcgcgggtcccttgcaggtccctccccgcgcggaggagatcacgatccccgcggacgtcaccccggagaaggtgcccacccacatcgtggactactcaggtagcggccgtagcctcccgggggcccggcccgcagcggtccggcgggcctgctgggtccgcagtggagtctctttgtccccctagaagccgagcagacggacgaggagctgcgggaggagatccacaaggtacccgtggtgcgcgggacgagggaggggctgggcgcgggctcggcctaatccgcttcgcagcctgggggattggaccgaggtgctccgggtgtccttggccctgataattctgtgacctccgcactgagggttgtcggggcccctacagcgcaccccgctgggagccggcaccgctcagtccagtggtgctccagggataacaggacccttccccgcgggctctccctccctcctgccggggtggcagcagcgtttgctcttcctgtgggctctgtgtgcgccacgtccccgtgctgtgtgctccagcccaccgtcccggcctccgggcacccggagctcccagtaccagagcacgtgtgccggggacatctccaggcaagggcacaggccacagccacccagggcagcccctgctgttggcacccctcactgcggtcctgtcactctgtctgtagcgaggggggaggcaggggccaaggcggcggctgtcttgcagggtgttgggttgcaggtgtggccgtgtctgtcctgagccctctgctccaagggtcttgctgaccacagttatgcttctggggcctggtgtccctgcactggcagtgggcggggaagaggcttctctgagggttcagcagcagctcccagtgtgacactggggagtgcctgctctgccaacaccaggctggaggcaggttttagggaaggctgggctttcccggcctcagagctgcacccatgctacctgtgagcttctggggcctcctggagcctcgagatggcgtggaacggccagggtcgtcggtggtgagccagcagccctgtcacccacacctcatcactgttccctcaggcaaacgtggtgtgtgtggtgtatgacgtctctgaggaggccaccattgagaagattcgaactaagtggatcccactggtgaatggggggaccacgcaggggcccagggtgcccatcatcctagtgggcaacaagtcagacctgcggtcggggagctccatggaggccgtgctccccatcatgagccagtttcccgagattgagacctgcgtggagtgttcggccaagaacctgaggaacatctcagagctgttctactacgcccagaaggccgtcctgcatcccacagcccccctctatgaccctgaggccaagcagttgaggcccgcgtgcgcccaggcgctgacgcgcatcttcaggctctcagatcaggacctggaccaggcgctcagtgacgaagagctcaacgctttccagaaatcctgctttgggcaccccctggccccgcaggccctggaggacgtgaagacggtggtgtgcaggaacgtggcgggcggcgtgcgggaggaccggctgaccctggatggtttcctcttcctgaacacgctcttcatccagcgcggccggcacgagaccacctggaccatcctgcggcgcttcggctacagcgatgccctggagctgactgcggactatctctcccctctgatccacgtgccccccggctgcagcacggagctcaaccaccttggctaccagtttgtgcagagagtgtttgagaagcacgaccaggaccgcgacggcgccctctcgcccgtggagctgcaaagccttttcagtgtgttcccagcagcgccctggggccccgagctcccacgcacagtccgcacagaggccggccggttgcccctgcacggatacctctgccagtggaccctggtgacctacctggacgtccggagctgccttggacacctaggctacctgggctaccccaccctctgtgagcaggaccaggcccatgccatcacagtcactcgtgagaagaggctggaccaggagaagggacagacgcagcggagcgtcctcctgtgcaaggtggtaggggcccgtggagtgggcaagtctgccttcctgcaggcctttctcggccgcggcctggggcaccaggacacgagggagcagcctcccggctacgccatcgacacggtgcaggtcaatgggcaggagaagtacttgatcctctgtgaggtgggcacagatggtctgctggccacatcgctggacgccacctgtgacgttgcctgcttgatgtttgatggcagtgacccaaagtcctttgcacattgtgccagcgtctacaaggtggggccctgcaggggccacgtggccatggggcagggtctgtccctccagctgtgcctcggccaccccaggactgtacctcataccactctctgcccacagcaccattacatggacgggcagaccccctgcctctttgtctcctccaaggccgacctgcccgaaggtgtcgcggtgtctggcccatcaccggccgagttttgccgcaagcaccggctacccgctcccgtgccgttctcctgtgctggcccagccgagcccagcaccaccatcttcacccagctcgccaccatggccgccttcccacatttggtccacgcagagctgcatccctcttccttctggctccgggggctgctgggggttgtcggggccgccgtggccgcagtcctcagcttctcactctacagggtcctggtgaagagccagtgaggcccctggtacccaagccccctcccctgacctgggtgtgcctcgctgctggggctctgcaggggcagcacagctggggtgcaggccaggctgccactccgggaacgcctttgcgccgggactttttgtttctgaaggcagtcgatctgcagcggggccttatgctgccatgcactgccctggctcctgccggacccccagggtgggccgtggcaggtggctgagcaggagctcccaagtgccggccaccgctgtcagggattgcccacccctgggcatcatgtgtgtggggccggggagcacaggtgtgggagctggtgaccccagacccagaattctcagggctctacccccctttcctggtcctaggtggccagtgggtatgaggagggctggaaggcagagctttgggccaaaagcaggcgttggggggtcccccctcaagtttggagccgtttccgtggttgtagcagaggaccggaggttgggttcctgattaaacttcactgtgtgttttctatctcgga

SEQ ID NO: 343085 - DNA, 3329 bp, Homo sapiens
agcgggggaaccggaagtgcggggcgggcgcgggggcagagcgaaaggcttgaggaccaggtcggggccgggttccgggtcggggagcggctccgggcggcagctatgaggcgggacgtgcgcatcctgttactgggcgaggcccaggtggggaagacgtcgctgatcctgtccctggtgggcgaggagttccccgaggaggtaaggggcacgcccgccgcgggggtgggagcgggcccagccgggggtccctggtgagcgcgcgggtcccttgcaggtccctccccgcgcggaggagatcacgatccccgcggacgtcaccccggagaaggtgcccacccacatcgtggactactcaggtagcggccgtagcctcccgggggcccggcccgcagcggtccggcgggcctgctgggtccgcagtggagtctctttgtccccctagaagccgagcagacggacgaggagctgcgggaggagatccacaaggtacccgtggtgcgcgggacgagggaggggctgggcgcgggctcggcctaatccgcttcgcagcctgggggattggaccgaggtgctccgggtgtccttggccctgataattctgtgacctccgcactgagggttgtcggggcccctacagcgcaccccgctgggagccggcaccgctcagtccagtggtgctccagggataacaggacccttccccgcgggctctccctccctcctgccggggtggcagcagcgtttgctcttcctgtgggctctgtgtgcgccacgtccccgtgctgtgtgctccagcccaccgtcccggcctccgggcacccggagctcccagtaccagagcacgtgtgccggggacatctccaggcaagggcacaggccacagccacccagggcagcccctgctgttggcacccctcactgcggtcctgtcactctgtctgtagcgaggggggaggcaggggccaaggcggcggctgtcttgcagggtgttgggttgcaggtgtggccgtgtctgtcctgagccctctgctccaagggtcttgctgaccacagttatgcttctggggcctggtgtccctgcactggcagtgggcggggaagaggcttctctgagggttcagcagcagctcccagtgtgacactggggagtgcctgctctgccaacaccaggctggaggcaggttttagggaaggctgggctttcccggcctcagagctgcacccatgctacctgtgagcttctggggcctcctggagcctcgagatggcgtggaacggccagggtcgtcggtggtgagccagcagccctgtcacccacacctcatcactgttccctcaggcaaacgtggtgtgtgtggtgtatgacgtctctgaggaggccaccattgagaagattcgaactaagtggatcccactggtgaatggggggaccacgcaggggcccagggtgcccatcatcctagtgggcaacaagtcagacctgcggtcggggagctccatggaggccgtgctccccatcatgagccagtttcccgagattgagacctgcgtggagtgttcggccaagaacctgaggaacatctcagagctgttctactacgcccagaaggccgtcctgcatcccacagcccccctctatgaccctgaggccaagcagttgaggcccgcgtgcgcccaggcgctgacgcgcatcttcaggctctcagatcaggacctggaccaggcgctcagtgacgaagagctcaacgctttccagaaatcctgctttgggcaccccctggccccgcaggccctggaggacgtgaagacggtggtgtgcaggaacgtggcgggcggcgtgcgggaggaccggctgaccctggatggtttcctcttcctgaacacgctcttcatccagcgcggccggcacgagaccacctggaccatcctgcggcgcttcggctacagcgatgccctggagctgactgcggactatctctcccctctgatccacgtgccccccggctgcagcacggagctcaaccaccttggctaccagtttgtgcagagagtgtttgagaagcacgaccaggaccgcgacggcgccctctcgcccgtggagctgcaaagccttttcagtgtgttcccagcagcgccctggggccccgagctcccacgcacagtccgcacagaggccggccggttgcccctgcacggatacctctgccagtggaccctggtgacctacctggacgtccggagctgccttggacacctaggctacctgggctaccccaccctctgtgagcaggaccaggcccatgccatcacagtcactcgtgagaagaggctggaccaggagaagggacagacgcagcggagcgtcctcctgtgcaaggtggtaggggcccgtggagtgggcaagtctgccttcctgcaggcctttctcggccgcggcctggggcaccaggacacgagggagcagcctcccggctacgccatcgacacggtgcaggtcaatgggcaggagaagtacttgatcctctgtgaggtgggcacagatggtctgctggccacatcgctggacgccacctgtgacgttgcctgcttgatgtttgatggcagtgacccaaagtcctttgcacattgtgccagcgtctacaagcaccattacatggacgggcagaccccctgcctctttgtctcctccaaggccgacctgcccgaaggtgtcgcggtgtctggcccatcaccggccgagttttgccgcaagcaccggctacccgctcccgtgccgttctcctgtgctggcccagccgagcccagcaccaccatcttcacccagctcgccaccatggccgccttcccacatttggtccacgcagagctgcatccctcttccttctggctccgggggctgctgggggttgtcggggccgccgtggccgcagtcctcagcttctcactctacagcgcggccggcacgagaccacctggaccatcctgcggcgcttcggctacagcgatgccctggagctgactgcggactatctctcccctctgatccacgtgccccccggctgcagcacggagctcaaccaccttggctaccagtttgaggggctctacccccctttcctggtcctaggtggccagtgggtatgaggagggctggaaggcagagctttgggccaaaagcaggcgttggggggtcccccctcaagtttggagccgtttccgtggttgtagcagaggaccggaggttgggttcctgattaaacttcactgtgtgttttctatctcggatcccagtctctgaagacaacttgctttgattcaacctagaa

SEQ ID NO: 343086 - DNA, 3144 bp, Homo sapiens
agcgggggaaccggaagtgcggggcgggcgcgggggcagagcgaaaggcttgaggaccaggtcggggccgggttccgggtcggggagcggctccgggcggcagctatgaggcgggacgtgcgcatcctgttactgggcgaggcccaggtggggaagacgtcgctgatcctgtccctggtgggcgaggagttccccgaggaggtaaggggcacgcccgccgcgggggtgggagcgggcccagccgggggtccctggtgagcgcgcgggtcccttgcaggtccctccccgcgcggaggagatcacgatccccgcggacgtcaccccggagaaggtgcccacccacatcgtggactactcaggtagcggccgtagcctcccgggggcccggcccgcagcggtccggcgggcctgctgggtccgcagtggagtctctttgtccccctagaagccgagcagacggacgaggagctgcgggaggagatccacaaggtacccgtggtgcgcgggacgagggaggggctgggcgcgggctcggcctaatccgcttcgcagcctgggggattggaccgaggtgctccgggtgtccttggccctgataattctgtgacctccgcactgagggttgtcggggcccctacagcgcaccccgctgggagccggcaccgctcagtccagtggtgctccagggataacaggacccttccccgcgggctctccctccctcctgccggggtggcagcagcgtttgctcttcctgtgggctctgtgtgcgccacgtccccgtgctgtgtgctccagcccaccgtcccggcctccgggcacccggagctcccagtaccagagcacgtgtgccggggacatctccaggcaagggcacaggccacagccacccagggcagcccctgctgttggcacccctcactgcggtcctgtcactctgtctgtagcgaggggggaggcaggggccaaggcggcggctgtcttgcagggtgttgggttgcaggtgtggccgtgtctgtcctgagccctctgctccaagggtcttgctgaccacagttatgcttctggggcctggtgtccctgcactggcagtgggcggggaagaggcttctctgagggttcagcagcagctcccagtgtgacactggggagtgcctgctctgccaacaccaggctggaggcaggttttagggaaggctgggctttcccggcctcagagctgcacccatgctacctgtgagcttctggggcctcctggagcctcgagatggcgtggaacggccagggtcgtcggtggtgagccagcagccctgtcacccacacctcatcactgttccctcaggcaaacgtggtgtgtgtggtgtatgacgtctctgaggaggccaccattgagaaggtgagccctcagtgcagaccccaacagcagagacacagtggccggtggtggcccaggtggaccttcacccaacccgtggccagtgccatcgctcacagcattttggggagcctgacgtggagttgcctgacgtggagtcacccggccctctcctgtgatcccacttcccctgagagggtctggggcgtcccgcagtctgagccattgaggccggcagtcctctttcttccccagtttccaaacccccggggggggacccgcagagggcctgcgttgggggcggccctaggcttgggccccagtgacttgggggtgtttgggagccattggggtcagacagatgaggctgcacctgctgcctgccttctcccaccagctttgttcctgtggccgggacttgggccctcagtgggccttgacctcccccttctgctctcccccagccaggctcatgctccagctgggagccatgtgcccgcgggcagcctcacttcacagccaggctttgcttttcagattcgaactaagtggatcccactggtgaatggggggaccacgcaggggcccagggtgcccatcatcctagtgggcaacaagtcagacctgcggtcggggagctccatggaggccgtgctccccatcatgagccagtttcccgagattgagacctgcgtggagtgttcggccaagaacctgaggaacatctcagagctgttctactacgcccagaaggccgtcctgcatcccacagcccccctctatgaccctgaggccaagcagttgaggcccgcgtgcgcccaggcgctgacgcgcatcttcaggctctcagatcaggacctggaccaggcgctcagtgacgaagagctcaacgctttccagaaatcctgctttgggcaccccctggccccgcaggccctggaggacgtgaagacggtggtgtgcaggaacgtggcgggcggcgtgcgggaggaccggctgaccctggatggtttcctcttcctgaacacgctcttcatccagcgcggccggcacgagaccacctggaccatcctgacatttggtccacgcagagctgcatccctcttccttctggctccgggggctgctgggggttgtcggggccgccgtggccgcagtcctcagcttctcactctacagggtcctggtgaagagccagtgaggcccctggtacccaagccccctcccctgacctgggtgtgcctcgctgctggggctctgcaggggcagcacagctggggtgcaggccaggctgccactccgggaacgcctttgcgccgggactttttgtttctgaaggcagtcgatctgcagcggggccttatgctgccatgcactgccctggctcctgccggacccccagggtgggccgtggcaggtggctgagcaggagctcccaagtgccggccaccgctgtcagggattgcccacccctgggcatcatgtgtgtggggccggggagcacaggtgtgggagctggtgaccccagacccagaattctcagggctctacccccctttcctggtcctaggtggccagtgggtatgaggagggctggaaggcagagctttgggccaaaagcaggcgttggggggtcccccctcaagtttggagccgtttccgtggttgtagcagaggaccggaggttgggttcctgattaaacttcactgtgtgttttctatctcggatcccagtctctgaagacaacttgctttgattcaacctagaa

SEQ ID NO: 343087 - DNA, 2592 bp, Homo sapiens
agcgggggaaccggaagtgcggggcgggcgcgggggcagagcgaaaggcttgaggaccaggtcggggccgggttccgggtcggggagcggctccgggcggcagctatgaggcgggacgtgcgcatcctgttactgggcgaggcccaggtggggaagacgtcgctgatcctgtccctggtgggcgaggagttccccgaggaggtaaggggcacgcccgccgcgggggtgggagcgggcccagccgggggtccctggtgagcgcgcgggtcccttgcaggtccctccccgcgcggaggagatcacgatccccgcggacgtcaccccggagaaggtgcccacccacatcgtggactactcaggtagcggccgtagcctcccgggggcccggcccgcagcggtccggcgggcctgctgggtccgcagtggagtctctttgtccccctagaagccgagcagacggacgaggagctgcgggaggagatccacaaggtacccgtggtgcgcgggacgagggaggggctgggcgcgggctcggcctaatccgcttcgcagcctgggggattggaccgaggtgctccgggtgtccttggccctgataattctgtgacctccgcactgagggttgtcggggcccctacagcgcaccccgctgggagccggcaccgctcagtccagtggtgctccagggataacaggacccttccccgcgggctctccctccctcctgccggggtggcagcagcgtttgctcttcctgtgggctctgtgtgcgccacgtccccgtgctgtgtgctccagcccaccgtcccggcctccgggcacccggagctcccagtaccagagcacgtgtgccggggacatctccaggcaagggcacaggccacagccacccagggcagcccctgctgttggcacccctcactgcggtcctgtcactctgtctgtagcgaggggggaggcaggggccaaggcggcggctgtcttgcagggtgttgggttgcaggtgtggccgtgtctgtcctgagccctctgctccaagggtcttgctgaccacagttatgcttctggggcctggtgtccctgcactggcagtgggcggggaagaggcttctctgagggttcagcagcagctcccagtgtgacactggggagtgcctgctctgccaacaccaggctggaggcaggttttagggaaggctgggctttcccggcctcagagctgcacccatgctacctgtgagcttctggggcctcctggagcctcgagatggcgtggaacggccagggtcgtcggtggtgagccagcagccctgtcacccacacctcatcactgttccctcaggcaaacgtggtgtgtgtggtgtatgacgtctctgaggaggccaccattgagaaggtgagccctcagtgcagaccccaacagcagagacacagtggccggtggtggcccaggtggaccttcacccaacccgtggccagtgccatcgctcacagcattttggggagcctgacgtggagttgcctgacgtggagtcacccggccctctcctgtgatcccacttcccctgagagggtctggggcgtcccgcagtctgagccattgaggccggcagtcctctttcttccccagtttccaaacccccggggggggacccgcagagggcctgcgttgggggcggccctaggcttgggccccagtgacttgggggtgtttgggagccattggggtcagacagatgaggctgcacctgctgcctgccttctcccaccagctttgttcctgtggccgggacttgggccctcagtgggccttgacctcccccttctgctctcccccagccaggctcatgctccagctgggagccatgtgcccgcgggcagcctcacttcacagccaggctttgcttttcagattcgaactaagtggatcccactggtgaatggggggaccacgcaggggcccagggtgcccatcatcctagtgggcaacaagtcagacctgcggtcggggagctccatggaggccgtgctccccatcatgagccagtttcccgagattgagacctgcgtggagtgttcggccaagaacctgaggaacatctcagagctgttctactacgcccagaaggccgtcctgcatcccacagcccccctctatgaccctgaggccaagcagaaatcctgctttgggcaccccctggccccgcaggccctggaggacgtgaagacggtggtgtgcaggaacgtggcgggcggcgtgcgggaggaccggctgaccctggatggtttcctcttcctgaacacgctcttcatccagcgcggccggcacgagaccacctggaccatcctgcggcgcttcggctacagcgatgccctggagctgactgcggactatctctcccctctgggctctacccccctttcctggtcctaggtggccagtgggtatgaggagggctggaaggcagagctttgggccaaaagcaggcgttggggggtcccccctcaagtttggagccgtttccgtggttgtagcagaggaccggaggttgggttcctgattaaacttcactgtgtgttttctatctcgga

SEQ ID NO: 343088 - DNA, 1044 bp, Homo sapiens
  misc_feature (1044)..(1044): n is a, c, g, or t
agcgggggaaccggaagtgcggggcgggcgcgggggcagagcgaaaggcttgaggaccaggtcggggccgggttccgggtcggggagcggctccgggcggcagctatgaggcgggacgtgcgcatcctgttactgggcgaggcccaggtggggaagacgtcgctgatcctgtccctggtgggcgaggagttccccgaggaggtccctccccgcgcggaggagatcacgatccccgcggacgtcatgggagaaagggttgccaacccaacaattcgtgggaactaacttcaggaaaggccgaagccaagaagggaagaagggaagcctgtgcggaaaggaaaaatccacaaggaattcgagaagattaggtgtgagttcccaactggctgtgcacttgtgggggggagcaccaacgcgatgggggcccccgagtgtgtgccccatctcattctatagtggggggcacccaaggtctcgagacccgtgcgcgctgcggggagaacgtctcctgtggaagtgccgtgtggttccccagattcttgaggagcccaaggttttcccccgaggaaattgtggagagaccctggggggtggtgaggattggtgttcggggccaaagaaacgcttgaagggagacattctctagagactggttgctacgtaaataagcgcacgacaagagactggtcccgtgcgtttgccatccagaacgaaggcctcactaacctttagttagtttgaaccgccgagtgacagggagcccacatggtcgatggtggagcgttggccccacattagaagagcagaaaacaacgaacaggagtaagcacacaaggagcgcacgacattctggaaacccgctcccagagaatggccgaggaaaacgatagaacttggagaacccaggggatgacagaaccaatccacagagagagtatgggaatgtgggataagacaaaccacagaaagaacaaagagagtaggcgacgttgcggaggaaagaggacaagaaaactccactcgcatatgagggagaagcccccn

SEQ ID NO: 343089 - DNA, 1032 bp, Homo sapiens
agcgggggaaccggaagtgcggggcgggcgcgggggcagagcgaaaggcttgaggaccaggtcggggccgggttccgggtcggggagcggctccgggcggcagctatgaggcgggacgtgcgcatcctgttactgggcgaggcccaggtggggaagacgtcgctgatcctgtccctggtgggcgaggagttccccgaggaggtccctccccgcgcggaggagatcacgatccccgcggacgtcaccccggagaaggtgcccacccacatcgtggactactcagaagccgagcagacggacgaggagctgcgggaggagatccacaaggcaaacgtggtgtgtgtggtgtatgacgtctctgaggaggccaccattgagaagattcgaactaagtggatcccactggtgaatggggggaccacgcaggggcccagggtgcccatcatcctagtgggcaacaagtcagacctgcggtcggggagctccatggaggccgtgctccccatcatgagccagtttcccgagattgagacctgcgtggagtgttcggccaagaacctgaggaacatctcagagctgttctactacgcccagaaggccgtcctgcatcccacagcccccctctatgaccctgaggccaagcagaaatcctgctttgggcaccccctggccccgcaggccctggaggacgtgaagacggtggtgtgcaggaacgtggcgggcggcgtgcgggaggaccggctgaccctggatggtttcctcttcctgaacacgctcttcatccagcgcggccggcacgagaccacctggaccatcctgcggcgcttcggctacagcgatgcctgggatggatgggatatgtttccctctgatcagtgccccggtgaggagggtcaacactggtctccagtggcaaaggttgtaagccgcacggcggaaggcccttgcggagagaagcttaggccacagctggccaaccgcaatcaagggcggccgactcgctgaccggcggggacagggaccggagacaga

SEQ ID NO: 343090 - DNA, 3918 bp, Homo sapiens
agcgggggaaccggaagtgcggggcgggcgcgggggcagagcgaaaggcttgaggaccaggtcggggccgggttccgggtcggggagcggctccgggcggcagctatgaggcgggacgtgcgcatcctgttactgggcgaggcccaggtggggaagacgtcgctgatcctgtccctggtgggcgaggagttccccgaggaggtaaggggcacgcccgccgcgggggtgggagcgggcccagccgggggtccctggtgagcgcgcgggtcccttgcaggtccctccccgcgcggaggagatcacgatccccgcggacgtcaccccggagaaggtgcccacccacatcgtggactactcaggtagcggccgtagcctcccgggggcccggcccgcagcggtccggcgggcctgctgggtccgcagtggagtctctttgtccccctagaagccgagcagacggacgaggagctgcgggaggagatccacaaggtacccgtggtgcgcgggacgagggaggggctgggcgcgggctcggcctaatccgcttcgcagcctgggggattggaccgaggtgctccgggtgtccttggccctgataattctgtgacctccgcactgagggttgtcggggcccctacagcgcaccccgctgggagccggcaccgctcagtccagtggtgctccagggataacaggacccttccccgcgggctctccctccctcctgccggggtggcagcagcgtttgctcttcctgtgggctctgtgtgcgccacgtccccgtgctgtgtgctccagcccaccgtcccggcctccgggcacccggagctcccagtaccagagcacgtgtgccggggacatctccaggcaagggcacaggccacagccacccagggcagcccctgctgttggcacccctcactgcggtcctgtcactctgtctgtagcgaggggggaggcaggggccaaggcggcggctgtcttgcagggtgttgggttgcaggtgtggccgtgtctgtcctgagccctctgctccaagggtcttgctgaccacagttatgcttctggggcctggtgtccctgcactggcagtgggcggggaagaggcttctctgagggttcagcagcagctcccagtgtgacactggggagtgcctgctctgccaacaccaggctggaggcaggttttagggaaggctgggctttcccggcctcagagctgcacccatgctacctgtgagcttctggggcctcctggagcctcgagatggcgtggaacggccagggtcgtcggtggtgagccagcagccctgtcacccacacctcatcactgttccctcaggcaaacgtggtgtgtgtggtgtatgacgtctctgaggaggccaccattgagaaggtgagccctcagtgcagaccccaacagcagagacacagtggccggtggtggcccaggtggaccttcacccaacccgtggccagtgccatcgctcacagcattttggggagcctgacgtggagttgcctgacgtggagtcacccggccctctcctgtgatcccacttcccctgagagggtctggggcgtcccgcagtctgagccattgaggccggcagtcctctttcttccccagtttccaaacccccggggggggacccgcagagggcctgcgttgggggcggccctaggcttgggccccagtgacttgggggtgtttgggagccattggggtcagacagatgaggctgcacctgctgcctgccttctcccaccagctttgttcctgtggccgggacttgggccctcagtgggccttgacctcccccttctgctctcccccagccaggctcatgctccagctgggagccatgtgcccgcgggcagcctcacttcacagccaggctttgcttttcagattcgaactaagtggatcccactggtgaatggggggaccacgcaggggcccagggtgcccatcatcctagtgggcaacaagtcagacctgcggtcggggagctccatggaggccgtgctccccatcatgagccagtttcccgagattgagacctgcgtggagttgaggcccgcgtgcgcccaggcgctgacgcgcatcttcaggctctcagatcaggacctggaccaggcgctcagtgacgaagagctcaacgctttccagaaatcctgctttgggcaccccctggccccgcaggccctggaggacgtgaagacggtggtgtgcaggaacgtggcgggcggcgtgcgggaggaccggctgaccctggatggtttcctcttcctgaacacgctcttcatccagcgcggccggcacgagaccacctggaccatcctgcggcgcttcggctacagcgatgccctggagctgactgcggactatctctcccctctgatccacgtgccccccggctgcagcacggagctcaaccaccttggctaccagtttgtgcagagagtgtttgagaagcacgaccaggaccgcgacggcgccctctcgcccgtggagctgcaaagccttttcagtgtgttcccagcagcgccctggggccccgagctcccacgcacagtccgcacagaggccggccggttgcccctgcacggatacctctgccagtggaccctggtgacctacctggacgtccggagctgccttggacacctaggctacctgggctaccccaccctctgtgagcaggaccaggcccatgccatcacagtcactcgtgagaagaggctggaccaggagaagggacagacgcagcggagcgtcctcctgtgcaaggtggtaggggcccgtggagtgggcaagtctgccttcctgcaggcctttctcggccgcggcctggggcaccaggacacgagggagcagcctcccggctacgccatcgacacggtgcaggtcaatgggcaggagaagtacttgatcctctgtgaggtgggcacagatggtctgctggccacatcgctggacgccacctgtgacgttgcctgcttgatgtttgatggcagtgacccaaagtcctttgcacattgtgccagcgtctacaagcaccattacatggacgggcagaccccctgcctctttgtctcctccaaggccgacctgcccgaaggtgtcgcggtgtctggcccatcaccggccgagttttgccgcaagcaccggctacccgctcccgtgccgttctcctgtgctggcccagccgagcccagcaccaccatcttcacccagctcgccaccatggccgccttcccacatttggtccacgcagagctgcatccctcttccttctggctccgggggctgctgggggttgtcggggccgccgtggccgcagtcctcagcttctcactctacagggtcctggtgaagagccagtgaggcccctggtacccaagccccctcccctgacctgggtgtgcctcgctgctggggctctgcaggggcagcacagctggggtgcaggccaggctgccactccgggaacgcctttgcgccgggactttttgtttctgaaggcagtcgatctgcagcggggccttatgctgccatgcactgccctggctcctgccggacccccagggtgggccgtggcaggtggctgagcaggagctcccaagtgccggccaccgctgtcagggattgcccacccctgggcatcatgtgtgtggggccggggagcacaggtgtgggagctggtgaccccagacccagaattctcagggctctacccccctttcctggtcctaggtggccagtgggtatgaggagggctggaaggcagagctttgggccaaaagcaggcgttggggggtcccccctcaagtttggagccgtttccgtggttgtagcagaggaccggaggttgggttcctgattaaacttcactgtgtgttttctatctcgga

SEQ ID NO: 343091 - DNA, 4036 bp, Homo sapiens
agcgggggaaccggaagtgcggggcgggcgcgggggcagagcgaaaggcttgaggaccaggtcggggccgggttccgggtcggggagcggctccgggcggcagctatgaggcgggacgtgcgcatcctgttactgggcgaggcccaggtggggaagacgtcgctgatcctgtccctggtgggcgaggagttccccgaggaggtaaggggcacgcccgccgcgggggtgggagcgggcccagccgggggtccctggtgagcgcgcgggtcccttgcaggtccctccccgcgcggaggagatcacgatccccgcggacgtcaccccggagaaggtgcccacccacatcgtggactactcaggtagcggccgtagcctcccgggggcccggcccgcagcggtccggcgggcctgctgggtccgcagtggagtctctttgtccccctagaagccgagcagacggacgaggagctgcgggaggagatccacaaggtacccgtggtgcgcgggacgagggaggggctgggcgcgggctcggcctaatccgcttcgcagcctgggggattggaccgaggtgctccgggtgtccttggccctgataattctgtgacctccgcactgagggttgtcggggcccctacagcgcaccccgctgggagccggcaccgctcagtccagtggtgctccagggataacaggacccttccccgcgggctctccctccctcctgccggggtggcagcagcgtttgctcttcctgtgggctctgtgtgcgccacgtccccgtgctgtgtgctccagcccaccgtcccggcctccgggcacccggagctcccagtaccagagcacgtgtgccggggacatctccaggcaagggcacaggccacagccacccagggcagcccctgctgttggcacccctcactgcggtcctgtcactctgtctgtagcgaggggggaggcaggggccaaggcggcggctgtcttgcagggtgttgggttgcaggtgtggccgtgtctgtcctgagccctctgctccaagggtcttgctgaccacagttatgcttctggggcctggtgtccctgcactggcagtgggcggggaagaggcttctctgagggttcagcagcagctcccagtgtgacactggggagtgcctgctctgccaacaccaggctggaggcaggttttagggaaggctgggctttcccggcctcagagctgcacccatgctacctgtgagcttctggggcctcctggagcctcgagatggcgtggaacggccagggtcgtcggtggtgagccagcagccctgtcacccacacctcatcactgttccctcaggcaaacgtggtgtgtgtggtgtatgacgtctctgaggaggccaccattgagaaggtgagccctcagtgcagaccccaacagcagagacacagtggccggtggtggcccaggtggaccttcacccaacccgtggccagtgccatcgctcacagcattttggggagcctgacgtggagttgcctgacgtggagtcacccggccctctcctgtgatcccacttcccctgagagggtctggggcgtcccgcagtctgagccattgaggccggcagtcctctttcttccccagtttccaaacccccggggggggacccgcagagggcctgcgttgggggcggccctaggcttgggccccagtgacttgggggtgtttgggagccattggggtcagacagatgaggctgcacctgctgcctgccttctcccaccagctttgttcctgtggccgggacttgggccctcagtgggccttgacctcccccttctgctctcccccagccaggctcatgctccagctgggagccatgtgcccgcgggcagcctcacttcacagccaggctttgcttttcagattcgaactaagtggatcccactggtgaatggggggaccacgcaggggcccagggtgcccatcatcctagtgggcaacaagtcagacctgcggtcggggagctccatggaggccgtgctccccatcatgagccagtttcccgagattgagacctgcgtggagttgaggcccgcgtgcgcccaggcgctgacgcgcatcttcaggctctcagatcaggacctggaccaggcgctcagtgacgaagagctcaacgctttccaggtgtgcccctgccccaccctcggtgcccagcccccttgaacctccgctgccgttagtgactggaacgggtcgtctccgggtggctggctgactcccaacaacgttctctcggaagcagaaatcctgctttgggcaccccctggccccgcaggccctggaggacgtgaagacggtggtgtgcaggaacgtggcgggcggcgtgcgggaggaccggctgaccctggatggtttcctcttcctgaacacgctcttcatccagcgcggccggcacgagaccacctggaccatcctgcggcgcttcggctacagcgatgccctggagctgactgcggactatctctcccctctgatccacgtgccccccggctgcagcacggagctcaaccaccttggctaccagtttgtgcagagagtgtttgagaagcacgaccaggaccgcgacggcgccctctcgcccgtggagctgcaaagccttttcagtgtgttcccagcagcgccctggggccccgagctcccacgcacagtccgcacagaggccggccggttgcccctgcacggatacctctgccagtggaccctggtgacctacctggacgtccggagctgccttggacacctaggctacctgggctaccccaccctctgtgagcaggaccaggcccatgccatcacagtcactcgtgagaagaggctggaccaggagaagggacagacgcagcggagcgtcctcctgtgcaaggtggtaggggcccgtggagtgggcaagtctgccttcctgcaggcctttctcggccgcggcctggggcaccaggacacgagggagcagcctcccggctacgccatcgacacggtgcaggtcaatgggcaggagaagtacttgatcctctgtgaggtgggcacagatggtctgctggccacatcgctggacgccacctgtgacgttgcctgcttgatgtttgatggcagtgacccaaagtcctttgcacattgtgccagcgtctacaagcaccattacatggacgggcagaccccctgcctctttgtctcctccaaggccgacctgcccgaaggtgtcgcggtgtctggcccatcaccggccgagttttgccgcaagcaccggctacccgctcccgtgccgttctcctgtgctggcccagccgagcccagcaccaccatcttcacccagctcgccaccatggccgccttcccacatttggtccacgcagagctgcatccctcttccttctggctccgggggctgctgggggttgtcggggccgccgtggccgcagtcctcagcttctcactctacagggtcctggtgaagagccagtgaggcccctggtacccaagccccctcccctgacctgggtgtgcctcgctgctggggctctgcaggggcagcacagctggggtgcaggccaggctgccactccgggaacgcctttgcgccgggactttttgtttctgaaggcagtcgatctgcagcggggccttatgctgccatgcactgccctggctcctgccggacccccagggtgggccgtggcaggtggctgagcaggagctcccaagtgccggccaccgctgtcagggattgcccacccctgggcatcatgtgtgtggggccggggagcacaggtgtgggagctggtgaccccagacccagaattctcagggctctacccccctttcctggtcctaggtggccagtgggtatgaggagggctggaaggcagagctttgggccaaaagcaggcgttggggggtcccccctcaagtttggagccgtttccgtggttgtagcagaggaccggaggttgggttcctgattaaacttcactgtgtgttttctatctcgga

SEQ ID NO: 343092 - DNA, 1483 bp, Homo sapiens
gcctgggccggcttctggaacttctgcagagagtgtttgagaagcacgaccaggaccgcgacggcgccctctcgcccgtggagctgcaaagccttttcagtgtgttcccagcagcgccctggggccccgagctcccacgcacagtccgcacagaggccggccggttgcccctgcacggatacctctgccagtggaccctggtgacctacctggacgtccggagctgccttggacacctaggctacctgggctaccccaccctctgtgagcaggaccaggcccatgccatcacagtcactcgtgagaagaggctggaccaggagaagggacagacgcagcggagcgtcctcctgtgcaaggtggtaggggcccgtggagtgggcaagtctgccttcctgcaggcctttctcggccgcggcctggggcaccaggacacgagggagcagcctcccggctacgccatcgacacggtgcaggtcaatgggcaggagaagtacttgatcctctgtgaggtgggcacagatggtctgctggccacatcgctggacgccacctgtgacgttgcctgcttgatgtttgatggcagtgacccaaagtcctttgcacattgtgccagcgtctacaagcaccattacatggacgggcagaccccctgcctctttgtctcctccaaggccgacctgcccgaaggtgtcgcggtgtctggcccatcaccggccgagttttgccgcaagcaccggctacccgctcccgtgccgttctcctgtgctggcccagccgagcccagcaccaccatcttcacccagctcgccaccatggccgccttcccacatttggtccacgcagagctgcatccctcttccttctggctccgggggctgctgggggttgtcggggccgccgtggccgcagtcctcagcttctcactctacagggtcctggtgaagagccagtgaggcccctggtacccaagccccctcccctgacctgggtgtgcctcgctgctggggctctgcaggggcagcacagctggggtgcaggccaggctgccactccgggaacgcctttgcgccgggactttttgtttctgaaggcagtcgatctgcagcggggccttatgctgccatgcactgccctggctcctgccggacccccagggtgggccgtggcaggtggctgagcaggagctcccaagtgccggccaccgctgtcagggattgcccacccctgggcatcatgtgtgtggggccggggagcacaggtgtgggagctggtgaccccagacccagaattctcagggctctacccccctttcctggtcctaggtggccagtgggtatgaggagggctggaaggcagagctttgggccaaaagcaggcgttggggggtcccccctcaagtttggagccgtttccgtggttgtagcagaggaccggaggttgggttcctgattaaacttcactgtgtgttttctatctcgga

SEQ ID NO: 343093 - DNA, 3741 bp, Homo sapiens
agcgggggaaccggaagtgcggggcgggcgcgggggcagagcgaaaggcttgaggaccaggtcggggccgggttccgggtcggggagcggctccgggcggcagctatgaggcgggacgtgcgcatcctgttactgggcgaggcccaggtggggaagacgtcgctgatcctgtccctggtgggcgaggagttccccgaggaggtaaggggcacgcccgccgcgggggtgggagcgggcccagccgggggtccctggtgagcgcgcgggtcccttgcaggtccctccccgcgcggaggagatcacgatccccgcggacgtcaccccggagaaggtgcccacccacatcgtggactactcaggtagcggccgtagcctcccgggggcccggcccgcagcggtccggcgggcctgctgggtccgcagtggagtctctttgtccccctagaagccgagcagacggacgaggagctgcgggaggagatccacaaggtacccgtggtgcgcgggacgagggaggggctgggcgcgggctcggcctaatccgcttcgcagcctgggggattggaccgaggtgctccgggtgtccttggccctgataattctgtgacctccgcactgagggttgtcggggcccctacagcgcaccccgctgggagccggcaccgctcagtccagtggtgctccagggataacaggacccttccccgcgggctctccctccctcctgccggggtggcagcagcgtttgctcttcctgtgggctctgtgtgcgccacgtccccgtgctgtgtgctccagcccaccgtcccggcctccgggcacccggagctcccagtaccagagcacgtgtgccggggacatctccaggcaagggcacaggccacagccacccagggcagcccctgctgttggcacccctcactgcggtcctgtcactctgtctgtagcgaggggggaggcaggggccaaggcggcggctgtcttgcagggtgttgggttgcaggtgtggccgtgtctgtcctgagccctctgctccaagggtcttgctgaccacagttatgcttctggggcctggtgtccctgcactggcagtgggcggggaagaggcttctctgagggttcagcagcagctcccagtgtgacactggggagtgcctgctctgccaacaccaggctggaggcaggttttagggaaggctgggctttcccggcctcagagctgcacccatgctacctgtgagcttctggggcctcctggagcctcgagatggcgtggaacggccagggtcgtcggtggtgagccagcagccctgtcacccacacctcatcactgttccctcaggcaaacgtggtgtgtgtggtgtatgacgtctctgaggaggccaccattgagaagattcgaactaagtggatcccactggtgaatggggggaccacgcaggggcccagggtgcccatcatcctagtgggcaacaagtcagacctgcggtcggggagctccatggaggccgtgctccccatcatgagccagtttcccgagattgagacctgcgtggagtgttcggccaagaacctgaggaacatctcagagctgttctactacgcccagaaggccgtcctgcatcccacagcccccctctatgaccctgaggccaagcagttgaggcccgcgtgcgcccaggcgctgacgcgcatcttcaggctctcagatcaggacctggaccaggcgctcagtgacgaagagctcaacgctttccagaaatcctgctttgggcaccccctggccccgcaggccctggaggacgtgaagacggtggtgtgcaggaacgtggcgggcggcgtgcgggaggaccggctgaccctggatggtttcctcttcctgaacacgctcttcatccagcgcggccggcacgagaccacctggaccatcctgcggcgcttcggctacagcgatgccctggagctgactgcggactatctctcccctctgatccacgtgccccccggctgcagcacggagctcaaccaccttggctaccagtttgtgcagagagtgtttgagaagcacgaccaggaccgcgacggcgccctctcgcccgtggagctgcaaagccttttcagtgtgttcccagcagcgccctggggccccgagctcccacgcacagtccgcacagaggccggccggttgcccctgcacggatacctctgccagtggaccctggtgacctacctggacgtccggagctgccttggacacctaggctacctgggctaccccaccctctgtgagcaggaccaggcccatgccatcacagtcactcgtgagaagaggctggaccaggagaagggacagacgcagcggagcgtcctcctgtgcaaggtggtaggggcccgtggagtgggcaagtctgccttcctgcaggcctttctcggccgcggcctgggggtaagcaccctagactcccccaccaccccaggggctccaggggcagggcagggcaatctggggggcactgcagccagcgagtgtcaggacttcacctccctcaccaggacacgagggagcagcctcccggctacgccatcgacacggtgcaggtcaatgggcaggagaagtacttgatcgtgagtgctggggcggcgcggcctgtgcccgagggtggacccggggacacccaggcctgcctggcagatctggcccagcatggccctagggggaccgagccccagggacccttcctaaggccgctgtctgtcccagctctgtgaggtgggcacagatggtctgctggccacatcgctggacgccacctgtgacgttgcctgcttgatgtttgatggcagtgacccaaagtcctttgcacattgtgccagcgtctacaagcaccattacatggacgggcagaccccctgcctctttgtctcctccaaggccgacctgcccgaaggtgtcgcggtgtctggcccatcaccggccgagttttgccgcaagcaccggctacccgctcccgtgccgttctcctgtgctggcccagccgagcccagcaccaccatcttcacccagctcgccaccatggccgccttcccacatttggtccacgcagagctgcatccctcttccttctggctccgggggctgctgggggttgtcggggccgccgtggccgcagtcctcagcttctcactctacagggtcctggtgaagagccagtgaggcccctggtacccaagccccctcccctgacctgggtgtgcctcgctgctggggctctgcaggggcagcacagctggggtgcaggccaggctgccactccgggaacgcctttgcgccgggactttttgtttctgaaggcagtcgatctgcagcggggccttatgctgccatgcactgccctggctcctgccggacccccagggtgggccgtggcaggtggctgagcaggagctcccaagtgccggccaccgctgtcagggattgcccacccctgggcatcatgtgtgtggggccggggagcacaggtgtgggagctggtgaccccagacccagaattctcagggctctacccccctttcctggtcctaggtggccagtgggtatgaggagggctggaaggcagagctttgggccaaaagcaggcgttggggggtcccccctcaagtttggagccgtttccgtggttgtagcagaggaccggaggttgggttcctgattaaacttcactgtgtgttttctatctcgga

SEQ ID NO: 343094 - DNA, 3665 bp, Homo sapiens
agcgggggaaccggaagtgcggggcgggcgcgggggcagagcgaaaggcttgaggaccaggtcggggccgggttccgggtcggggagcggctccgggcggcagctatgaggcgggacgtgcgcatcctgttactgggcgaggcccaggtggggaagacgtcgctgatcctgtccctggtgggcgaggagttccccgaggaggtaaggggcacgcccgccgcgggggtgggagcgggcccagccgggggtccctggtgagcgcgcgggtcccttgcaggtccctccccgcgcggaggagatcacgatccccgcggacgtcaccccggagaaggtgcccacccacatcgtggactactcaggtagcggccgtagcctcccgggggcccggcccgcagcggtccggcgggcctgctgggtccgcagtggagtctctttgtccccctagaagccgagcagacggacgaggagctgcgggaggagatccacaaggtacccgtggtgcgcgggacgagggaggggctgggcgcgggctcggcctaatccgcttcgcagcctgggggattggaccgaggtgctccgggtgtccttggccctgataattctgtgacctccgcactgagggttgtcggggcccctacagcgcaccccgctgggagccggcaccgctcagtccagtggtgctccagggataacaggacccttccccgcgggctctccctccctcctgccggggtggcagcagcgtttgctcttcctgtgggctctgtgtgcgccacgtccccgtgctgtgtgctccagcccaccgtcccggcctccgggcacccggagctcccagtaccagagcacgtgtgccggggacatctccaggcaagggcacaggccacagccacccagggcagcccctgctgttggcacccctcactgcggtcctgtcactctgtctgtagcgaggggggaggcaggggccaaggcggcggctgtcttgcagggtgttgggttgcaggtgtggccgtgtctgtcctgagccctctgctccaagggtcttgctgaccacagttatgcttctggggcctggtgtccctgcactggcagtgggcggggaagaggcttctctgagggttcagcagcagctcccagtgtgacactggggagtgcctgctctgccaacaccaggctggaggcaggttttagggaaggctgggctttcccggcctcagagctgcacccatgctacctgtgagcttctggggcctcctggagcctcgagatggcgtggaacggccagggtcgtcggtggtgagccagcagccctgtcacccacacctcatcactgttccctcaggcaaacgtggtgtgtgtggtgtatgacgtctctgaggaggccaccattgagaagattcgaactaagtggatcccactggtgaatggggggaccacgcaggggcccagggtgcccatcatcctagtgggcaacaagtcagacctgcggtcggggagctccatggaggccgtgctccccatcatgagccagtttcccgagattgagacctgcgtggagtgttcggccaagaacctgaggaacatctcagagctgttctactacgcccagaaggccgtcctgcatcccacagcccccctctatgaccctgaggccaagcagttgaggcccgcgtgcgcccaggcgctgacgcgcatcttcaggctctcagatcaggacctggaccaggcgctcagtgacgaagagctcaacgctttccagaaatcctgctttgggcaccccctggccccgcaggccctggaggacgtgaagacggtggtgtgcaggaacgtggcgggcggcgtgcgggaggaccggctgaccctggatggtttcctcttcctgaacacgctcttcatccagcgcggccggcacgagaccacctggaccatcctgcggcgcttcggctacagcgatgccctggagctgactgcggactatctctcccctctgatccacgtgccccccggctgcagcacggagctcaaccaccttggctaccagtttgtgcagagagtgtttgagaagcacgaccaggaccgcgacggcgccctctcgcccgtggagctgcaaagccttttcagtgtgttcccagcagcgccctggggccccgagctcccacgcacagtccgcacagaggccggccggttgcccctgcacggatacctctgccagtggaccctggtgacctacctggacgtccggagctgccttggacacctaggctacctgggctaccccaccctctgtgagcaggaccaggcccatgccatcacagtcactcgtgagaagaggctggaccaggagaagggacagacgcagcggagcgtcctcctgtgcaaggtggtaggggcccgtggagtgggcaagtctgccttcctgcaggcctttctcggccgcggcctggggcaccaggacacgagggagcagcctcccggctacgccatcgacacggtgcaggtcaatgggcaggagaagtacttgatcctctgtgaggtgggcacagatggtctgctggccacatcgctggacgccacctgtgacgttgcctgcttgatgtttgatggcagtgacccaaagtcctttgcacattgtgccagcgtctacaagcaccattacatggacgggcagaccccctgcctctttgtctcctccaaggccgacctgcccgaaggtgtcgcggtgtctggcccatcaccggccgagttttgccgcaagcaccggctacccgctcccgtgccgttctcctgtgctggcccagccgagcccagcaccaccatcttcacccagctcgccaccatggccgccttcccgtgggtacccagtagcgcagccctggggactagcagtgtctgtcatccgagcagtgggcagcggtggtgtcaggcctggaactggggactagcagtgtctgtcatccgagcagtgggcagcagtggcgtcaggcctggaactggggccagagtggcggggtggagctttgtgtggcagagggaggcagtgcccaggcatgtccctccagggcctggcctccaccggctgtgcctctggtctgggatccccgcctgtggggccctgtgagtccaggacatgggagggtgcccagcagcaagctgggggcatgtgcctgaggtatctgcagatgattcttctctcttgcagacatttggtccacgcagagctgcatccctcttccttctggggaacgcctttgcgccgggactttttgtttctgaaggcagtcgatctgcagcggggccttatgctgccatgcactgccctggctcctgccggacccccagggtgggccgtggcaggtggctgagcaggagctcccaagtgccggccaccgctgtcagggattgcccacccctgggcatcatgtgtgtggggccggggagcacaggtgtgggagctggtgaccccagacccagaattctcagggctctacccccctttcctggtcctaggtggccagtgggtatgaggagggctggaaggcagagctttgggccaaaagcaggcgttggggggtcccccctcaagtttggagccgtttccgtggttgtagcagaggaccggaggttgggttcctgattaaacttcactgtgtgttttctatctcgga

SEQ ID NO: 343095 - DNA, 2643 bp, Homo sapiens
agcgggggaaccggaagtgcggggcgggcgcgggggcagagcgaaaggcttgaggaccaggtcggggccgggttccgggtcggggagcggctccgggcggcagctatgaggcgggacgtgcgcatcctgttactgggcgaggcccaggtggggaagacgtcgctgatcctgtccctggtgggcgaggagttccccgaggaggtaaggggcacgcccgccgcgggggtgggagcgggcccagccgggggtccctggtgagcgcgcgggtcccttgcaggtccctccccgcgcggaggagatcacgatccccgcggacgtcaccccggagaaggtgcccacccacatcgtggactactcaggtagcggccgtagcctcccgggggcccggcccgcagcggtccggcgggcctgctgggtccgcagtggagtctctttgtccccctagaagccgagcagacggacgaggagctgcgggaggagatccacaaggtacccgtggtgcgcgggacgagggaggggctgggcgcgggctcggcctaatccgcttcgcagcctgggggattggaccgaggtgctccgggtgtccttggccctgataattctgtgacctccgcactgagggttgtcggggcccctacagcgcaccccgctgggagccggcaccgctcagtccagtggtgctccagggataacaggacccttccccgcgggctctccctccctcctgccggggtggcagcagcgtttgctcttcctgtgggctctgtgtgcgccacgtccccgtgctgtgtgctccagcccaccgtcccggcctccgggcacccggagctcccagtaccagagcacgtgtgccggggacatctccaggcaagggcacaggccacagccacccagggcagcccctgctgttggcacccctcactgcggtcctgtcactctgtctgtagcgaggggggaggcaggggccaaggcggcggctgtcttgcagggtgttgggttgcaggtgtggccgtgtctgtcctgagccctctgctccaagggtcttgctgaccacagttatgcttctggggcctggtgtccctgcactggcagtgggcggggaagaggcttctctgagggttcagcagcagctcccagtgtgacactggggagtgcctgctctgccaacaccaggctggaggcaggttttagggaaggctgggctttcccggcctcagagctgcacccatgctacctgtgagcttctggggcctcctggagcctcgagatggcgtggaacggccagggtcgtcggtggtgagccagcagccctgtcacccacacctcatcactgttccctcaggcaaacgtggtgtgtgtggtgtatgacgtctctgaggaggccaccattgagaagattcgaactaagtggatcccactggtgaatggggggaccacgcaggggcccagggtgcccatcatcctagtgggcaacaagtcagacctgcggtcggggagctccatggaggccgtgctccccatcatgagccagtttcccgagattgagacctgcgtggagtgttcggccaagaacctgaggaacatctcagagctgttctactacgcccagaaggccgtcctgcatcccacagcccccctctatgaccctgaggccaagcagttgaggcccgcgtgcgcccaggcgctgacgcgcatcttcaggctctcagatcaggacctggaccaggcgctcagtgacgaagagctcaacgctttccagaaatcctgctttgggcaccccctggccccgcaggccctggaggacgtgaagacggtggtgtgcaggaacgtggcgggcggcgtgcgggaggaccggctgaccctggatggtttcctcttcctgaacacgctcttcatccagcgcggccggcacgagaccacctggaccatcctgcggcgcttcggctacagcgatgccctggagctgactgcggactatctctcccctctgatccacgtgccccccggctgcagcacggagctcaaccaccttggctaccagtttgtgcagagagtgtttgagaagcacgaccaggaccgcgacggcgccctctcgcccgtggagctgcaaagccttttcagtgtgttcccagcagcgccctggggccccgagctcccacgcacagtccgcacagaggccggccggttgcccctgcacggatacctctgccagtggacggaacgcctttgcgccgggactttttgtttctgaaggcagtcgatctgcagcggggccttatgctgccatgcactgccctggctcctgccggacccccagggtgggccgtggcaggtggctgagcaggagctcccaagtgccggccaccgctgtcagggattgcccacccctgggcatcatgtgtgtggggccggggagcacaggtgtgggagctggtgaccccagacccagaattctcagggctctacccccctttcctggtcctaggtggccagtgggtatgaggagggctggaaggcagagctttgggccaaaagcaggcgttggggggtcccccctcaagtttggagccgtttccgtggttgtagcagaggaccggaggttgggttcctgattaaacttcactgtgtgttttctatctcgga

SEQ ID NO: 343096 - DNA, 337 bp, Homo sapiens
ctcggtgcaggtttcctcttcctgaacacgctcttcatccagcgcggccggcacgagaccacctggaccatcctgcggcgcttcggctacagcgatgccctggagctgactgcggactatctctcccctcttgtgagtgatgccggggcttgaggcctgccctccccgagggtcaggagctgactgccgactatctctcccctccatgagtgacgctggggtttgaggcctgccctccctgagggtcagtgaaggtctcgctcagcaggccatctggggtcgtgcccttgcctggctgtgccctgaacccctcagcatccacagagctctgagtcgg

SEQ ID NO: 343097 - DNA, 449 bp, Homo sapiens
agccttgttttctctagatctgagagatggcttctggattcatctttccctgcaatccagcttctcctcctggggccctcatactggagactgggatcatcatccaggcttttgcactgggccaggaatttgggagtcatcctggatccgtctgcccctgtcaacctttcgctgtcaacggatatttattgggcgtcctcaacagccaggccctgttcatggtactgaagaacagcttgtataaaacaaccctgccctcacagggcgatcaccagtgacctgtggtgtggagtctccttttacctatgtctcctccttcccactgtcaccatccttggtcctcctctgtcacctggaatactccacttggtaaccagcatgatcttataacgctagttttacccttgtcagcactttgccaaaaacctcaaataaagactttttttaaa

SEQ ID NO: 343098 - DNA, 485 bp, Homo sapiens
agccttgttttctctagatctgagagatggcttctggattcatctttccctgcaatccagcttctcctcctggggccctcatactggagactgggatcatcatccaggcttttgcactgggccaggaatttgggagtcatcctggatccgtctgcccctgtcaacctttcgctgtcaacggatatttattgggcgtcctcaacagccaggccctgttcatggtactgaagaacagcttgtataaaacaaccctgccctcacagggcgatcaccagtgacctgtggtgtggagtctccttttacctatgtctcctccttcccactgtcaccatccttggtcctcctctgtcacctggaatactccacttggtaaccagcatgatcttataacgctagttttacccttgtcagcactttgccaaaaacctcaaataaagactttttttaaagggggaaaaaaaaagaaaatgggctcggtggcctca

SEQ ID NO: 343099 - DNA, 711 bp, Homo sapiens
agccatagacagtatataaatggtatgactgtattccagtaattatttatggacatggaattggaacttcatataatttgcacatgttacaatattattcttttgacttttttccccaaccaagtaaaaaaatataaaaaccattcttaggtctcagactgtacaaagataggcaacaggctggatttagtttataggctagagtttgctgacccctggtatgtatgaaagcacttggttatcagtaaaaattatccacatgtcatctgacatagcatcttgtgattaactgtgtttttatggttaagtgatcctatcttgagtgcaagttaggcagaagattttggaagcaaagctccgtgcctgtggggaaacagtttttggcatggctcactctctgttcttattgtttcttcctctggacaccagctcagcatggaagggatgactgttagcacgttcttgaggtccaaaaactttcagtgaggctgtggtttgacttcatcaggtgaatgcttatgtgtgcccgtgtgcgtgtcggcacatgcacacacacacatctgttcaaataagaggcttagtgttaaacgccagtgtggtcaggctctctcagtgatctgaacatgagatattatgattgcctttcctgagcacatatctttttacatagctttgcaaccttggtttaaaccaaatagctcataaattggc

SEQ ID NO: 343100 - DNA, 642 bp, Homo sapiens
ctttttatttttatttttggggcagagtctcactctgttgcccaggctggagtgcagtggcacaatgtcgactcactgcaacctctgcctcttgggttcaagcaattcttgtgcttcagcctccagagtagctgggattacaggcgtgcgccatcacacccagctaatttttgtatttttagtagagaccgggtttcactatgttggctaggctggtctcaaactcctgtcctcatgtgatcggcacacctcggcctcccaaagtgctgggattacaggcatgagccaccgcgcccggccagatttccatctttttaggctgaatagtatctcatatatctatatcacataatgacatttcagtcaatgatgggcctcaaatacaataatggtcccatcagactataatagaactgaaaaattcctataacagtggcgtcgtaaccatcagaatggtgacagcacaacacatgaagtgtttggcatgatgcttgtgtaaacaaacctactgcactgccagtcctataaaaggtacagtactacccattgtattacagttgcctacaggattcagttgtataatatgccatacaggtttgtagcctaggggtcgacgcggccgcgaatttagtagtagtaggc

SEQ ID NO: 343101 - DNA, 746 bp, Homo sapiens
cgaagacttgcattcccctttgagcatccacctcactcagttagaagaaatgtgtctccaagcactgccagcctgtgaataagcacttcccaagtgccaggtacaaagttagacacttcccatctttcacctcgttgatcgcctcaaaatcccgtgaggtttttaatcactgactcagtagcattgattgagagatctactccgtgttaggcttagactacatagtgatgaccaaaacagtctttggattcatggcaattactgccaggtagagaaagcgaatgctgttattttgctctaagaggaaactaaggttcaaagaaccaatactttctcaatgccatataactggtaaagggtgtggccacgattacaccaccatgattctactccaaagactgtcttccctccaccatgccctactaccttcctataggaagcttaatctgcggttctacttaaaatatgaggaaacatctggaatattagttttcaaccacatttcagacacagaaagtggagcctaaggaatagcccagttggctcctctctgagagcgggtaagagtagaaaagaattgctgatctcaagcattttgttaccagaataaccccacaggagaggcctggctgaacggggatttgtgtgggccagacaatgtaggggatttatttccaaggctggaggacagagcttggactcgggtccagctcggcgtcctccctcgggtcctgctcgctgaagag

SEQ ID NO: 343102 - DNA, 736 bp, Homo sapiens
gcttccgccctgcgcgtcgtattagacggaaaccgagcgggcccatttttcatgggtttgcggacccaccagcgaaggcgggaggtgtcgcagggacatcttctggctgtttccgtcgcctgcgtggcccttgcaccccggtcttccattagcggcgcagacgtttgggcctaagcgctgggcgaggcgaggccctgcccctccccgccaacggccattctctggacctgtctttcttccgggaggcggtgacagctgctgagacgtgttgcagccagagtctctccgctttaatgcgctcccattagtgccgtcccccactggaaaaccgtggcttctgtattatttgccatctttgttgtgtaggagcagggagggcttcctcccggggtcctaggcggcggtgcagtccgtcgtagaagaattagagtagaagttgtcggggtccgctcttaggacgcagccgcctcatgggggtccaggggctctggaagctgctggagtgctccgggcggcaggtcagccccgaagcgctggaagggaagatcctggctgttggtatccttaacgccgcgttgggacttggggtgcagggattcggggctggattcctcgcggggctctgccttgggcacagtggcatctgcaggatgatggtcttgggtcggggtcggggtcgctatagaatctctgtcactaggttttctaagtacagtcgtccctcggtatccccggg

SEQ ID NO: 343103 - DNA, 401 bp, Homo sapiens
tgtgactcctaaattgggtgaggtgactccctattgcatctctagtgacctgcccttcccttgtggtggaagttattagatcccactctaattgcttacttacacgtgtcccccaccagaccatgagaccagtagtggcacagatcttgctgttttattcaccactgtagcccgtataacgagcagagccttgcatacaagtatttttgtaaggggtccttaaaaatcatagatatcgtaaaagtatgtttgactttcagttcagaagaggaagatgaaaaagaatggcaagaaagaatgaatcaaaaacaagcattacaggaagagaaggtagagaaaaaggaagagaaaccataggatgtgccagagaagaaggtagaaggtccagttaatccgggggg

SEQ ID NO: 343104 - DNA, 4080 bp, Homo sapiens
gcttccgccctgcgcgtcgtattagacggaaaccgagcgggcccatttttcatgggtttgcggacccaccagcgaaggcgggaggtgtcgcagggacatcttctggctgtttccgtcgcctgcgtggcccttgcaccccggtcttccattagcggcgcagacgtttgggcctaagcgctgggcgaggcgaggccctgcccctccccgccaacggccattctctggacctgtctttcttccgggaggcggtgacagctgctgagacgtgttgcagccagagtctctccgctttaatgcgctcccattagtgccgtcccccactggaaaaccgtggcttctgtattatttgccatctttgttgtgtaggagcagggagggcttcctcccggggtcctaggcggcggtgcagtccgtcgtagaagaattagagtagaagttgtcggggtccgctcttaggacgcagccgcctcatgggggtccaggggctctggaagctgctggagtgctccgggcggcaggtcagccccgaagcgctggaagggaagatcctggctgttgatattagcatttggttaaaccaagcacttaaaggagtccgggatcgccacgggaactcaatagaaaatcctcatcttctcactttgtttcatcggctctgcaaactcttattttttcgaattcgtcctatttttgtgtttgatggggatgctccactattgaagaaacagactttggtgaagagaaggcagagaaaggacttagcgtccagtgactccaggaaaacgacagagaagcttctgaaaacatttttgaaaagacaagccatcaaaactgccttcagaagcaaaagagatgaagcactacccagtcttacccaagttcgaagagaaaacgacctctatgttttgcctcctttacaagaggaagaaaaacacagttcagaagaggaagatgaaaaagaatggcaagaaagaatgaatcaaaaacaagcattacaggaagagttctttcataatcctcaagcgatagatattgagtctgaggacttcagcagcctgccccctgaagtaaagcatgaaatcttgactgatatgaaagagttcaccaagcgcagaagaacattatttgaagcaatgccagaggagtctgatgacttttcacagtaccaactcaaaggcttgcttaaaaagaactatctgaaccagcatatagaacatgtccaaaaggaaatgaatcagcaacattcaggacacatccgaaggcagtatgaagatgaagggggctttctgaaggaggtagagtcaaggagagtggtctctgaagacacttcacattacatcttgataaaagcaaaatgcacggcatgtcttttgacgtgaagtcatctccatgtgaaaaactgaagacagagaaagagcctgatgctacccctccttctccaagaactttactagctatgcaagctgccctgctgggaagtagctcagaagaggagctggagagtgaaaatcgaaggcaggcccgtgggaggaacgcacctgctgctgtagacgaaggctccatatcaccccggactctttcagccattaagagagctcttgacgatgacgaagatgtaaaagtgtgtgctggggatgatgtgcagacgggagggccaggagcagaagaaatgcgtataaacagctccaccgagaacagtgatgaaggacttaaagtgagagatggaaaaggaataccgtttactgcaacacttgcgtcatctagtgtgaactctgcagaggagcacgtagccagcactaatgaggggagagagcccacagactcagttccaaaagaacaaatgtcacttgttcacgtggggactgaagcctttccgataagtgatgagtctatgattaaggacagaaaagatcggctgcctctggagagtgcagtggttagacatagtgacgcacctgggctcccgaatggaagggaactgacaccggcatctccaacttgtacaaattctgtgtcaaagaatgaaacacatgctgaagtgcttgagcagcagaacgaactttgcccatatgagagtaaattcgattcttctcttctttcaagtgatgatgaaacaaaatgtaaaccgaattctgcttctgaagtcattggccctgtcagtttgcaagaaacaagtagcatagtaagtgtcccttcagaggcagtagataatgtggaaaatgtggtgtcatttaatgctaaagagcatgagaattttctggaaaccatccaagaacagcagaccactgaatctgcaggccaggatttaatttccattccaaaggccgtggaaccaatggaaattgactcggaagaaagtgaatctgatggaagtttcattgaagtgcaaagtgtgattagtgatgaggaacttcaagcagaattccctgaaacttccaaacctccctcagaacaaggcgaagaggaactggtaggaactagggagggagaagcccctgctgagtccgagagcctcctgagggacaactctgagagggacgacgtggatggtgagccacaggaagctgagaaagatgcggaagattcgctccatgaatggcaagatattaatttggaggagttggaaactctggagagcaacctcttagcacagcagaattcactgaaagctcaaaaacagcagcaagaacggatcgctgctactgtcaccggacagatgttcctggaaagccaggaactcctgcgcctgttcggcattccctacatccaggctcccatggaagcagaggcgcagtgcgccatcctggacctgactgatcagacttccggaaccatcactgatgacagtgatatctggctgtttggagcgcggcatgtctatagaaacttttttaataaaaacaagtttgtagaatattatcaatatgtggactttcacaatcaattgggattggaccggaataagttaataaatttggcttatttgcttggaagtgattataccgaaggaataccaactgtgggttgtgtaaccgccatggaaattctcaatgaattccctgggcatggcctggaacctctcctaaaattctcagaatggtggcatgaagctcaaaaaaatccaaagataagacctaatcctcatgacaccaaagtgaaaaaaaaattacggacattgcaactcacccctggctttcctaacccagctgttgccgaggcctacctcaaacccgtggtggatgactcgaagggatcctttctgtgggggaaacctgatctcgacaaaattagagaattttgtcagcggtatttcggctggaacagaacgaagacagatgaatctctgtttcctgtattaaagcaactcgatgcccagcagacacagctccgaattgattccttctttagattagcacaacaggagaaagaagatgctaaacgtattaagagccagagactaaacagagctgtgacatgtatgctaaggaaagagaaagaagcagcagccagcgaaatagaagcagtttctgttgccatggagaaagaatttgagctacttgataaggcaaaacgaaaaacccagaagagaggcataacaaataccttagaagagtcatcaagcctgaaaagaaagaggctttcagattctaaacgaaagaatacatgcggtggatttttgggggagacctgcctctcagaatcatctgatggatcttcaagtgaagatgctgaaagttcatctttaatgaatgtacaaaggagaacagctgcgaaagagccaaaaaccagtgcttcagattcgcagaactcagtgaaggaagctcccgtgaagaatggaggtgcgaccaccagcagctctagtgatagtgatgacgatggagggaaagagaagatggtcctcgtgaccgccagatctgtgtttgggaagaaaagaaggaaactaagacgtgcgaggggaagaaaaaggaaaacctaattaaaaaatatgtatcctctataattagttatgacagccatttgtaatgaatttgtcgcaaagacgtaataaaattaactggtagcacggtctttgtatttagt

SEQ ID NO: 343105 - DNA, 3204 bp, Homo sapiens
ggtcgactactactactaaattcgcggccgggtcgacgaaagaatgaatcaaaaacaagcattacaggaagagttctttcataatcctcaagcgatagatattgagtctgaggacttcagcagcctgccccctgaagtaaagcatgaaatcttgactgatatgaaagagttcaccaagcgcagaagaacattatttgaagcaatgccagaggagtctgatgacttttcacagtaccaactcaaaggcttgcttaaaaagaactatctgaaccagcatatagaacatgtccaaaaggaaatgaatcagcaacattcaggacacatccgaaggcagtatgaagatgaagggggctttctgaaggaggtagagtcaaggagagtggtctctgaagacacttcacattacatcttgataaaaggtattcaagctaagacagttgcagaagtggattcagagtctcttccttcttccagcaaaatgcacggcatgtcttttgacgtgaagtcatctccatgtgaaaaactgaagacagagaaagagcctgatgctacccctccttctccaagaactttactagctatgcaagctgccctgctgggaagtagctcagaagaggagctggagagtgaaaatcgaaggcaggcccgtgggaggaacgcacctgctgctgtagacgaaggctccatatcaccccggactctttcagccattaagagagctcttgacgatgacgaagatgtaaaagtgtgtgctggggatgatgtgcagacgggagggccaggagcagaagaaatgcgtataaacagctccaccgagaacagtgatgaaggacttaaagtgagagatggaaaaggaataccgtttactgcaacacttgcgtcatctagtgtgaactctgcagaggagcacgtagccagcactaatgaggggagagagcccacagactcagttccaaaagaacaaatgtcacttgttcacgtggggactgaagcctttccgataagtgatgagtctatgattaaggacagaaaagatcggctgcctctggagagtgcagtggttagacatagtgacgcacctgggctcccgaatggaagggaactgacaccggcatctccaacttgtacaaattctgtgtcaaagaatgaaacacatgctgaagtgcttgagcagcagaacgaactttgcccatatgagagtaaattcgattcttctcttctttcaagtgatgatgaaacaaaatgtaaaccgaattctgcttctgaagtcattggccctgtcagtttgcaagaaacaagtagcatagtaagtgtcccttcagaggcagtagataatgtggaaaatgtggtgtcatttaatgctaaagagcatgagaattttctggaaaccatccaagaacagcagaccactgaatctgcaggccaggatttaatttccattccaaaggccgtggaaccaatggaaattgactcggaagaaagtgaatctgatggaagtttcattgaagtgcaaagtgtgattagtgatgaggaacttcaagcagaattccctgaaacttccaaacctccctcagaacaaggcgaagaggaactggtaggaactagggagggagaagcccctgctgagtccgagagcctcctgagggacaactctgagagggacgacgtggatggtgagccacaggaagctgagaaagatgcggaagattcgctccatgaatggcaagatattaatttggaggagttggaaactctggagagcaacctcttagcacagcagaattcactgaaagctcaaaaacagcagcaagaacggatcgctgctactgtcaccggacagatgttcctggaaagccaggaactcctgcgcctgttcggcattccctacatccaggctcccatggaagcagaggcgcagtgcgccatcctggacctgactgatcagacttccggaaccatcactgatgacagtgatatctggctgtttggagcgcggcatgtctatagaaacttttttaataaaaacaagtttgtagaatattatcaatatgtggactttcacaatcaattgggattggaccggaataagttaataaatttggcttatttgcttggaagtgattataccgaaggaataccaactgtgggttgtgtaaccgccatggaaattctcaatgaattccctgggcatggcctggaacctctcctaaaattctcagaatggtggcatgaagctcaaaaaaatccaaagataagacctaatcctcatgacaccaaagtgaaaaaaaaattacggacattgcaactcacccctggctttcctaacccagctgttgccgaggcctacctcaaacccgtggtggatgactcgaagggatcctttctgtgggggaaacctgatctcgacaaaattagagaattttgtcagcggtatttcggctggaacagaacgaagacagatgaatctctgtttcctgtattaaagcaactcgatgcccagcagacacagctccgaattgattccttctttagattagcacaacaggagaaagaagatgctaaacgtattaagagccagagactaaacagagctgtgacatgtatgctaaggaaagagaaagaagcagcagccagcgaaatagaagcagtttctgttgccatggagaaagaatttgagctacttgataaggcaaaacgaaaaacccagaagagaggcataacaaataccttagaagagtcatcaagcctgaaaagaaagaggctttcagattctaaacgaaagaatacatgcggtggatttttgggggagacctgcctctcagaatcatctgatggatcttcaagtgaagatgctgaaagttcatctttaatgaatgtacaaaggagaacagctgcgaaagagccaaaaaccagtgcttcagattcgcagaactcagtgaaggaagctcccgtgaagaatggaggtgcgaccaccagcagctctagtgatagtgatgacgatggagggaaagagaagatggtcctcgtgaccgccagatctgtgtttgggaagaaaagaaggaaactaagacgtgcgaggggaagaaaaaggaaaacctaattaaaaaatatgtatcctctataattagttatgacagccatttgtaatgaatttgtcgcaaagacgtaataaaattaactggtagcacggtctttgtatttagt

SEQ ID NO: 343106 - DNA, 3990 bp, Homo sapiens
gcttccgccctgcgcgtcgtattagacggaaaccgagcgggcccatttttcatgggtttgcggacccaccagcgaaggcgggaggtgtcgcagggacatcttctggctgtttccgtcgcctgcgtggcccttgcaccccggtcttccattagcggcgcagacgtttgggcctaagcgctgggcgaggcgaggccctgcccctccccgccaacggccattctctggacctgtctttcttccgggaggcggtgacagctgctgagacgtgttgcagccagagtctctccgctttaatgcgctcccattagtgccgtcccccactggaaaaccgtggcttctgtattatttgccatctttgttgtgtaggagcagggagggcttcctcccggggtcctaggcggcggtgcagtccgtcgtagaagaattagagtagaagttgtcggggtccgctcttaggacgcagccgcctcatgggggtccaggggctctggaagctgctggagtgctccgggcggcaggtcagccccgaagcgctggaagggaagatcctggctgttgatattagcatttggttaaaccaagcacttaaaggagtccgggatcgccacgggaactcaatagaaaatcctcatcttctcactttgtttcatcggctctgcaaactcttattttttcgaattcgtcctatttttgtgtttgatggggatgctccactattgaagaaacagactttggtgaagagaaggcagagaaaggacttagcgtccagtgactccaggaaaacgacagagaagcttctgaaaacatttttgaaaagacaagccatcaaaactgccttcagaagcaaaagagatgaagcactacccagtcttacccaagttcgaagagaaaacgacctctatgttttgcctcctttacaagaggaagaaaaacacagttcagaagaggaagatgaaaaagaatggcaagaaagaatgaatcaaaaacaagcattacaggaagagttctttcataatcctcaagcgatagatattgagtctgaggacttcagcagcctgccccctgaagtaaagcatgaaatcttgactgatatgaaagagttcaccaagcgcagaagaacattatttgaagcaatgccagaggagtctgatgacttttcacagtaccaactcaaaggcttgcttaaaaagaactatctgaaccagcatatagaacatgtccaaaaggaaatgaatcagcaacattcaggacacatccgaaggcagtatgaagatgaagggggctttctgaaggaggtagagtcaaggagagtggtctctgaagacacttcacattacatcttgataaaaggtattcaagctaagacagttgcagaagtggattcagagtctcttccttcttccagcaaaatgcacggcatgtcttttgacgtgaagtcatctccatgtgaaaaactgaagacagagaaagagcctgatgctacccctccttctccaagaactttactagctatgcaagctgccctgctgggaagtagctcagaagaggagctggagagtgaaaatcgaaggcaggcccgtgggaggaacgcacctgctgctgtagacgaaggctccatatcaccccggactctttcagccattaagagagctcttgacgatgacgaagatgtaaaagtgtgtgctggggatgatgtgcagacgggagggccaggagcagaagaaatgcgtataaacagctccaccgagaacagtgatgaaggacttaaagtgagagatggaaaaggaataccgtttactgcaacacttgcgtcatctagtgtgaactctgcagaggagcacgtagccagcactaatgaggggagagagcccacagactcagttccaaaagaacaaatgtcacttgttcacgtggggactgaagcctttccgataagtgatgagtctatgattaaggacagaaaagatcggctgcctctggagagtgcagtggttagacatagtgacgcacctgggctcccgaatggaagggaactgacaccggcatctccaacttgtacaaattctgtgtcaaagaatgaaacacatgctgaagtgcttgagcagcagaacgaactttgcccatatgagagtaaattcgattcttctcttctttcaagtgatgatgaaacaaaatgtaaaccgaattctgcttctgaagtcattggccctgtcagtttgcaagaaacaagtagcatagtaagtgtcccttcagaggcagtagataatgtggaaaatgtggtgtcatttaatgctaaagagcatgagaattttctggaaaccatccaagaacagcagaccactgaatctgcaggccaggatttaatttccattccaaaggccgtggaaccaatggaaattgactcggaagaaagtgaatctgatggaagtttcattgaagtgcaaagtgtgattagtgatgaggaacttcaagcagaattccctgaaacttccaaacctccctcagaacaaggcgaagaggaactggtaggaactagggagggagaagcccctgctgagtccgagagcctcctgagggacaactctgagagggacgacgtggatggtgagccacaggaagctgagaaagatgcggaagattcgctccatgaatggcaagatattaatttggaggagttggaaactctggagagcaacctcttagcacagcagaattcactgaaagctcaaaaacagcagcaagaacggatcgctgctactgtcaccggacagatgttcctggaaagccaggaactcctgcgcctgttcggcattccctacatccaggctcccatggaagcagaggcgcagtgcgccatcctggacctgactgatcagacttccggaaccatcactgatgacagtgatatctggctgtttggagcgcggcatgtctatagaaacttttttaataaaaacaagtttgtagaatattatcaatatgtggactttcacaatcaattggagaatggtggcatgaagctcaaaaaaatccaaagataagacctaatcctcatgacaccaaagtgaaaaaaaaattacggacattgcaactcacccctggctttcctaacccagctgttgccgaggcctacctcaaacccgtggtggatgactcgaagggatcctttctgtgggggaaacctgatctcgacaaaattagagaattttgtcagcggtatttcggctggaacagaacgaagacagatgaatctctgtttcctgtattaaagcaactcgatgcccagcagacacagctccgaattgattccttctttagattagcacaacaggagaaagaagatgctaaacgtattaagagccagagactaaacagagctgtgacatgtatgctaaggaaagagaaagaagcagcagccagcgaaatagaagcagtttctgttgccatggagaaagaatttgagctacttgataaggcaaaacgaaaaacccagaagagaggcataacaaataccttagaagagtcatcaagcctgaaaagaaagaggctttcagattctaaacgaaagaatacatgcggtggatttttgggggagacctgcctctcagaatcatctgatggatcttcaagtgaagatgctgaaagttcatctttaatgaatgtacaaaggagaacagctgcgaaagagccaaaaaccagtgcttcagattcgcagaactcagtgaaggaagctcccgtgaagaatggaggtgcgaccaccagcagctctagtgatagtgatgacgatggagggaaagagaagatggtcctcgtgaccgccagatctgtgtttgggaagaaaagaaggaaactaagacgtgcgaggggaagaaaaaggaaaacctaattaaaaaatatgtatcctctataattagttatgacagccatttgtaatgaatttgtcgcaaagacgtaataaaattaactggtagcacggtctttgtatttagt

SEQ ID NO: 343107 - DNA, 1184 bp, Homo sapiens
acagaggaagacttccataaatgtttgccatcattatacattgtggctaatagtactaaaattaataaaatattctatatagcatacaatttgagttagaacttgagtttacatgttctaagtttagttcttcatccatagtgtatgaactataatgtctcattgctgtgtaagtaattgtttcctttattttacagagaatggtggcatgaagctcaaaaaaatccaaagataagacctaatcctcatgacaccaaagtgaaaaaaaaattacggacattgcaactcacccctggctttcctaacccagctgttgccgaggcctacctcaaacccgtggtggatgactcgaagggatcctttctgtgggggaaacctgatctcgacaaaattagagaattttgtcagcggtatttcggctggaacagaacgaagacagatgaatctctgtttcctgtattaaagcaactcgatgcccagcagacacagctccgaattgattccttctttagattagcacaacaggagaaagaagatgctaaacgtattaagagccagagactaaacagagctgtgacatgtatgctaaggaaagagaaagaagcagcagccagcgaaatagaagcagtttctgttgccatggagaaagaatttgagctacttgataaggcaaaacgaaaaacccagaagagaggcataacaaataccttagaagagtcatcaagcctgaaaagaaagaggctttcagattctaaacgaaagaatacatgcggtggatttttgggggagacctgcctctcagaatcatctgatggatcttcaagtgaagatgctgaaagttcatctttaatgaatgtacaaaggagaacagctgcgaaagagccaaaaaccagtgcttcagattcgcagaactcagtgaaggaagctcccgtgaagaatggaggtgcgaccaccagcagctctagtgatagtgatgacgatggagggaaagagaagatggtcctcgtgaccgccagatctgtgtttgggaagaaaagaaggaaactaagacgtgcgaggggaagaaaaaggaaaacctaattaaaaaatatgtatcctctataattagttatgacagccatttgtaatgaatttgtcgcaaagacgtaataaaattaactggtagcacggtctttgtatttagt

SEQ ID NO: 343108 - DNA, 3860 bp, Homo sapiens
gcttccgccctgcgcgtcgtattagacggaaaccgagcgggcccatttttcatgggtttgcggacccaccagcgaaggcgggaggtgtcgcagggacatcttctggctgtttccgtcgcctgcgtggcccttgcaccccggtcttccattagcggcgcagacgtttgggcctaagcgctgggcgaggcgaggccctgcccctccccgccaacggccattctctggacctgtctttcttccgggaggcggtgacagctgctgagacgtgttgcagccagagtctctccgctttaatgcgctcccattagtgccgtcccccactggaaaaccgtggcttctgtattatttgccatctttgttgtgtaggagcagggagggcttcctcccggggtcctaggcggcggtgcagtccgtcgtagaagaattagagtagaagttgtcggggtccgctcttaggacgcagccgcctcatgggggtccaggggctctggaagctgctggagtgctccgggcggcaggtcagccccgaagcgctggaagggaagatcctggctgttgatattagcatttggttaaaccaagcacttaaaggagtccgggatcgccacgggaactcaatagaaaatcctcatcttctcactttgtttcatcggctctgcaaactcttattttttcgaattcgtcctatttttgtgtttgatggggatgctccactattgaagaaacagactttggtgaagagaaggcagagaaaggacttagcgtccagtgactccaggaaaacgacagagaagcttctgaaaacatttttgaaaagacaagccatcaaaactgccttcagaagcaaaagagatgaagcactacccagtcttacccaagttcgaagagaaaacgacctctatgttttgcctcctttacaagaggaagaaaaacacagttcagaagaggaagatgaaaaagaatggcaagaaagaatgaatcaaaaacaagcattacaggaagagttctttcataatcctcaagcgatagatattgagtctgaggacttcagcagcctgccccctgaagtaaagcatgaaatcttgactgatatgaaagagttcaccaagcgcagaagaacattatttgaagcaatgccagaggagtctgatgacttttcacagtaccaactcaaaggcttgcttaaaaagaactatctgaaccagcatatagaacatgtccaaaaggaaatgaatcagcaacattcaggacacatccgaaggcagtatgaagatgaagggggctttctgaaggaggtagagtcaaggagagtggtctctgaagacacttcacattacatcttgataaaaggtattcaagctaagacagttgcagaagtggattcagagtctcttccttcttccagcaaaatgcacggcatgtcttttgacgtgaagtcatctccatgtgaaaaactgaagacagagaaagagcctgatgctacccctccttctccaagaactttactagctatgcaagctgccctgctgggaagtagctcagaagaggagctggagagtgaaaatcgaaggcaggcccgtgggaggaacgcacctgctgctgtagacgaaggctccatatcaccccggactctttcagccattaagagagctcttgacgatgacgaagatgtaaaagtgtgtgctggggatgatgtgcagacgggagggccaggagcagaagaaatgcgtataaacagctccaccgagaacagtgatgaaggacttaaagtgagagatggaaaaggaataccgtttactgcaacacttgcgtcatctagtgtgaactctgcagaggagcacgtagccagcactaatgaggggagagagcccacagactcagttccaaaagaacaaatgtcacttgttcacgtggggactgaagcctttccgataagtgatgagtctatgattaaggacagaaaagatcggctgcctctggagagtgcagtggttagacatagtgacgcacctgggctcccgaatggaagggaactgacaccggcatctccaacttgtacaaattctgtgtcaaagaatgaaacacatgctgaagtgcttgagcagcagaacgaactttgcccatatgagagtaaattcgattcttctcttctttcaagtgatgatgaaacaaaatgtaaaccgaattctgcttctgaagtcattggccctgtcagtttgcaagaaacaagtagcatagtaagtgtcccttcagaggcagtagataatgtggaaaatgtggtgtcatttaatgctaaagagcatgagaattttctggaaaccatccaagaacagcagaccactgaatctgcaggccaggatttaatttccattccaaaggccgtggaaccaatggaaattgactcggaagaaagtgaatctgatggaagtttcattgaagtgcaaagtgtgattagtgatgaggaacttcaagcagaattccctgaaacttccaaacctccctcagaacaaggcgaagaggaactggtaggaactagggagggagaagcccctgctgagtccgagagcctcctgagggacaactctgagagggacgacgtggatggtgagccacaggaagctgagaaagatgcggaagattcgctccatgaatggcaagatattaatttggaggagttggaaactctggagagcaacctcttagcacagcagaattcactgaaagctcaaaaacagcagcaagaacggatcgctgctactgtcaccggacagatgttcctggaaagccaggaactcctgcgcctgttcggcattccctacatccaggctcccatggaagcagaggcgcagtgcgccatcctggacctgactgatcagacttccggaaccatcactgatgacagtgatatctggctgtttggagcgcggcatgtctatagaaacttttttaataaaaacaagtttgtagaatattatcaatatgtggactttcacaatcaattgggattggaccggaataagttaataaatttggcttatttgcttggaagtgattataccgaaggaataccaactgtgggttgtgtaaccgccatggaaattctcaatgaattccctgggcatggcctggaacctctcctaaaattctcagaatggtggcatgaagctcaaaaaaatccaaagataagacctaatcctcatgacaccaaagtgaaaaaaaaattacggacattgcaactcacccctggctttcctaacccagctgttgccgaggcctacctcaaacccgtggtggatgactcgaagggatcctttctgtgggggaaacctgatctcgacaaaattagagaattttgtcagcggtatttcggctggaacagaacgaagacagatgaatctctgtttcctgtattaaagcaactcgatgcccagcagacacagctccgaattgattccttctttagattagcacaacaggagaaagaagatgctaaacgtattaagagccagagactaaacagagctgtgacatgtatgctaaggaaagagaaagaagcagcagccagcgaaatagaagcagtttctgttgccatggagaaagaatttgagctacttgataaggcaaaacgaaaaacccagaagagaggcataacaaataccttagaagagtcatcaagcctgaaaagaaagaggctttcagattctaaacgaaagaatacatgcggtggatttttgggggagacctgcctctcagaatcatctgatggatcttcaagtgaagatgctgaaagttcatctttaatgaatgtacaaaggagaacagctgcgaaagagccaggaggtgcgaccaccagcagctct

SEQ ID NO: 343109 - DNA, 2936 bp, Homo sapiens
gcttccgccctgcgcgtcgtattagacggaaaccgagcgggcccatttttcatgggtttgcggacccaccagcgaaggcgggaggtgtcgcagggacatcttctggctgtttccgtcgcctgcgtggcccttgcaccccggtcttccattagcggcgcagacgtttgggcctaagcgctgggcgaggcgaggccctgcccctccccgccaacggccattctctggacctgtctttcttccgggaggcggtgacagctgctgagacgtgttgcagccagagtctctccgctttaatgcgctcccattagtgccgtcccccactggaaaaccgtggcttctgtattatttgccatctttgttgtgtaggagcagggagggcttcctcccggggtcctaggcggcggtgcagtccgtcgtagaagaattagagtagaagttgtcggggtccgctcttaggacgcagccgcctcatgggggtccaggggctctggaagctgctggagtgctccgggcggcaggtcagccccgaagcgctggaagggaagatcctggctgttgatattagcatttggttaaaccaagcacttaaaggagtccgggatcgccacgggaactcaatagaaaatcctcatcttctcactttgtttcatcggctctgcaaactcttattttttcgaattcgtcctatttttgtgtttgatggggatgctccactattgaagaaacagactttggtgaagagaaggcagagaaaggacttagcgtccagtgactccaggaaaacgacagagaagcttctgaaaacatttttgaaaagacaagccatcaaaactgccttcagaagcaaaagagatgaagcactacccagtcttacccaagttcgaagagaaaacgacctctatgttttgcctcctttacaagaggaagaaaaacacagttcagaagaggaagatgaaaaagaatggcaagaaagaatgaatcaaaaacaagcattacaggaagagttctttcataatcctcaagcgatagatattgagtctgaggacttcagcagcctgccccctgaagtaaagcatgaaatcttgactgatatgaaagagttcaccaagcgcagaagaacattatttgaagcaatgccagaggagtctgatgacttttcacagtaccaactcaaaggcttgcttaaaaagaactatctgaaccagcatatagaacatgtccaaaaggaaatgaatcagcaacattcaggacacatccgaaggcagtatgaagatgaagggggctttctgaaggaggtagagtcaaggagagtggtctctgaagacacttcacattacatcttgataaaaggtattcaagctaagacagttgcagaagtggattcagagtctcttccttcttccagcaaaatgcacggcatgtcttttgacgtgaagtcatctccatgtgaaaaactgaagacagagaaagagcctgatgctacccctccttctccaagaactttactagctatgcaagctgccctgctgggaagtagctcagaagaggagctggagagtgaaaatcgaaggcaggcccgtgggaggaacgcacctgctgctgtagacgaaggctccatatcaccccggactctttcagccattaagagagctcttgacgatgacgaagatgtaaaagtgtgtgctggggatgatgtgcagacgggagggccaggagcagaagaaatgcgtataaacagctccaccgagaacagtgatgaaggacttaaagtgagagatggaaaaggaataccgtttactgcaacacttgcgtcatctagtgtgaactctgcagaggagcacgtagccagcactaatgaggggagagagcccacagactcagttccaaaagaacaaatgtcacttgttcacgtggggactgaagcctttccgataagtgatgagtctatgattaaggacagaaaagatcggctgcctctggagagtgcagtggttagacatagtgacgcacctgggctcccgaatggaagggaactgacaccggcatctccaacttgtacaaattctgtgtcaaagaatgaaacacatgctgaagtgcttgagcagcagaacgaactttgcccatatgagagtaaattcgattcttctcttctttcaagtgatgatgaaacaaaatgtaaaccgaattctgcttctgaagtcattggccctgtcagtttgcaagaaacaagtagcatagtaagtgtcccttcagaggcagtagataatgtggaaaatgtggtgtcatttaatgctaaagagcatgagaattttctggaaaccatccaagaacagcagaccactgaatctgcaggccaggatttaatttccattccaaaggccgtggaaccaatggaaattgactcggaagaaagtgaatctgatggaagtttcattgaagtgcaaagtgtgattagtgatgaggaacttcaagcagaattccctgaaacttccaaacctccctcagaacaaggcgaagaggaactggtaggaactagggagggagaagcccctgctgagtccgagagcctcctgagggacaactctgagagggacgacgtggatggtgagccacaggaagctgagaaagatgcggaagattcgctccatgaatggcaagatattaatttggaggagttggaaactctgcaaccagttctgttcctactgtagtaacaactggcattcatcaccagcctcctcctgctccaccctctctttttactgcagttttgtattaccagatacatatgacacagatggctacaattctgaagcccaggcataacaaacacttccagactatgtatagcacagagtcatgccaaaggccaacctgataggctacatcaggggtatgattgccaccaggaaagcctccaataaagcagttgaggt

SEQ ID NO: 343110 - DNA, 1665 bp, Homo sapiens
gcttccgccctgcgcgtcgtattagacggaaaccgagcgggcccatttttcatgggtttgcggacccaccagcgaaggcgggaggtgtcgcagggacatcttctggctgtttccgtcgcctgcgtggcccttgcaccccggtcttccattagcggcgcagacgtttgggcctaagcgctgggcgaggcgaggccctgcccctccccgccaacggccattctctggacctgtctttcttccgggaggcggtgacagctgctgagacgtgttgcagccagagtctctccgctttaatgcgctcccattagtgccgtcccccactggaaaaccgtggcttctgtattatttgccatctttgttgtgtaggagcagggagggcttcctcccggggtcctaggcggcggtgcagtccgtcgtagaagaattagagtagaagttgtcggggtccgctcttaggacgcagccgcctcatgggggtccaggggctctggaagctgctggagtgctccgggcggcaggtcagccccgaagcgctggaagggaagatcctggctgttgatattagcatttggttaaaccaagcacttaaaggagtccgggatcgccacgggaactcaatagaaaatcctcatcttctcactttgtttcatcggctctgcaaactcttattttttcgaattcgtcctatttttgtgtttgatggggatgctccactattgaagaaacagactttggtgaagagaaggcagagaaaggacttagcgtccagtgactccaggaaaacgacagagaagcttctgaaaacatttttgaaaagacaagccatcaaaactgccttcagaagcaaaagagatgaagcactacccagtcttacccaagttcgaagagaaaacgacctctatgttttgcctcctttacaagaggaagaaaaacacagttcagaagaggaagatgaaaaagaatggcaagaaagaatgaatcaaaaacaagcattacaggaagagttctttcataatcctcaagcgatagatattgagtctgaggacttcagcagcctgccccctgaagtaaagcatgaaatcttgactgatatgaaagagttcaccaagcgcagaagaacattatttgaagcaatgccagaggagtctgatgacttttcacagtaccaactcaaaggcttgcttaaaaagaactatctgaaccagcatatagaacatgtccaaaaggaaatgaatcagcaacattcaggacacatccgaaggcagtatgaagatgaagggggctttctgaaggaggtagagtcaaggagagtggtctctgaagacacttcacattacatcttgataaaaggtattcaagctaagacagttgcagaagtggattcagagtctcttccttcttccagcaaaatgcacggcatgtcttttgacgtgaagtcatctccatgtgaaaaactgaagacagagaaagagcctgatgctacccctccttctccaagaactttactagctatgcaagctgccctgctgggaagtagctcagaagaggagctggagagtgaaaatcgaaggcaggcccgtgggaggaacgcgccccatgggcctgaagaaggccactgcaagtgggagctgggcctgccgaagcggccgagagcaggagctttgg

SEQ ID NO: 343111 - DNA, 465 bp, Homo sapiens
caaagtgaaaaaaaaattacggacattgcaactcacccctggctttcctaacccagctgttgccgaggcctacctcaaacccgtggtggatgactcgaagggatcctttctgtgggggaaacctgatctcgacaaaattagagaatatcctttgcttcttaaaagagaaggaaacaccttgtcaaatatgtgtttggtttaaaacttatggaagagaaacttggatcatttttttcttatatcccgttaatcccattttcttaatatcccgctctccttttcactctttcttccctctcctcagttgttgttttttgtttgtttgtttgttttaaaggaacagtgtatcactctgtcacccagcctggagtgcagtggtgcaatcatagctcactgcagccaccacttcctgggctcaaggaatcctcctgcctcagcctcctaagtagcacaagccactgcatc

SEQ ID NO: 343112 - DNA, 457 bp, Homo sapiens
atataaagcgaatatacaaatcttaagagagtttcctactttcaaagacagtgccagtttacctaattgaaaaggcttgttttgaagttacaggcatttgtgattacatttatttattaataacgctactattacatgtattctgttatagtcatatctttcctttttaggatgtagcatttttcaggttcctccagaaagctcttgatgattgcaggatcattttaatgttttgattgtagatgaagtgaccttttaattttggtacaggaagtttcattgaagtgcaaagtgtgattagtgatgaggaacttcaagcagaattccctgaaacttccaaacctccctcagaacaaggcgaagaggaactggtaggaactagggagggagaagcccctgctgagtccgagagcctcctgagggacaactctgagagggacgacgtggatggtgagcc

SEQ ID NO: 343113 - DNA, 4135 bp, Homo sapiens
gcttccgccctgcgcgtcgtattagacggaaaccgagcgggcccatttttcatgggtttgcggacccaccagcgaaggcgggaggtgtcgcagggacatcttctggctgtttccgtcgcctgcgtggcccttgcaccccggtcttccattagcggcgcagacgtttgggcctaagcgctgggcgaggcgaggccctgcccctccccgccaacggccattctctggacctgtctttcttccgggaggcggtgacagctgctgagacgtgttgcagccagagtctctccgctttaatgcgctcccattagtgccgtcccccactggaaaaccgtggcttctgtattatttgccatctttgttgtgtaggagcagggagggcttcctcccggggtcctaggcggcggtgcagtccgtcgtagaagaattagagtagaagttgtcggggtccgctcttaggacgcagccgcctcatgggggtccaggggctctggaagctgctggagtgctccgggcggcaggtcagccccgaagcgctggaagggaagatcctggctgttgatattagcatttggttaaaccaagcacttaaaggagtccgggatcgccacgggaactcaatagaaaatcctcatcttctcactttgtttcatcggctctgcaaactcttattttttcgaattcgtcctatttttgtgtttgatggggatgctccactattgaagaaacagactttggtgaagagaaggcagagaaaggacttagcgtccagtgactccaggaaaacgacagagaagcttctgaaaacatttttgaaaagacaagccatcaaaactgccttcagaagcaaaagagatgaagcactacccagtcttacccaagttcgaagagaaaacgacctctatgttttgcctcctttacaagaggaagaaaaacacagttcagaagaggaagatgaaaaagaatggcaagaaagaatgaatcaaaaacaagcattacaggaagagttctttcataatcctcaagcgatagatattgagtctgaggacttcagcagcctgccccctgaagtaaagcatgaaatcttgactgatatgaaagagttcaccaagcgcagaagaacattatttgaagcaatgccagaggagtctgatgacttttcacagtaccaactcaaaggcttgcttaaaaagaactatctgaaccagcatatagaacatgtccaaaaggaaatgaatcagcaacattcaggacacatccgaaggcagtatgaagatgaagggggctttctgaaggaggtagagtcaaggagagtggtctctgaagacacttcacattacatcttgataaaaggtattcaagctaagacagttgcagaagtggattcagagtctcttccttcttccagcaaaatgcacggcatgtcttttgacgtgaagtcatctccatgtgaaaaactgaagacagagaaagagcctgatgctacccctccttctccaagaactttactagctatgcaagctgccctgctgggaagtagctcagaagaggagctggagagtgaaaatcgaaggcaggcccgtgggaggaacgcacctgctgctgtagacgaaggctccatatcaccccggactctttcagccattaagagagctcttgacgatgacgaagatgtaaaagtgtgtgctggggatgatgtgcagacgggagggccaggagcagaagaaatgcgtataaacagctccaccgagaacagtgatgaaggacttaaagtgagagatggaaaaggaataccgtttactgcaacacttgcgtcatctagtgtgaactctgcagaggagcacgtagccagcactaatgaggggagagagcccacagactcagttccaaaagaacaaatgtcacttgttcacgtggggactgaagcctttccgataagtgatgagtctatgattaaggacagaaaagatcggctgcctctggagagtgcagtggttagacatagtgacgcacctgggctcccgaatggaagggaactgacaccggcatctccaacttgtacaaattctgtgtcaaagaatgaaacacatgctgaagtgcttgagcagcagaacgaactttgcccatatgagagtaaattcgattcttctcttctttcaagtgatgatgaaacaaaatgtaaaccgaattctgcttctgaagtcattggccctgtcagtttgcaagaaacaagtagcatagtaagtgtcccttcagaggcagtagataatgtggaaaatgtggtgtcatttaatgctaaagagcatgagaattttctggaaaccatccaagaacagcagaccactgaatctgcaggccaggatttaatttccattccaaaggccgtggaaccaatggaaattgactcggaagaaagtgaatctgatggaagtttcattgaagtgcaaagtgtgattagtgatgaggaacttcaagcagaattccctgaaacttccaaacctccctcagaacaaggcgaagaggaactggtaggaactagggagggagaagcccctgctgagtccgagagcctcctgagggacaactctgagagggacgacgtggatggtgagccacaggaagctgagaaagatgcggaagattcgctccatgaatggcaagatattaatttggaggagttggaaactctggagagcaacctcttagcacagcagaattcactgaaagctcaaaaacagcagcaagaacggatcgctgctactgtcaccggacagatgttcctggaaagccaggaactcctgcgcctgttcggcattccctacatccaggctcccatggaagcagaggcgcagtgcgccatcctggacctgactgatcagacttccggaaccatcactgatgacagtgatatctggctgtttggagcgcggcatgtctatagaaacttttttaataaaaacaagtttgtagaatattatcaatatgtggactttcacaatcaattgggattggaccggaataagttaataaatttggcttatttgcttggaagtgattataccgaaggaataccaactgtgggttgtgtaaccgccatggaaattctcaatgaattccctgggcatggcctggaacctctcctaaaattctcagaatggtggcatgaagctcaaaaaaatccaaagataagacctaatcctcatgacaccaaagtgaaaaaaaaattacggacattgcaactcacccctggctttcctaacccagctgttgccgaggcctacctcaaacccgtggtggatgactcgaagggatcctttctgtgggggaaacctgatctcgacaaaattagagaattttgtcagcggtatttcggctggaacagaacgaagacagatgaatctctgtttcctgtattaaagcaactcgatgcccagcagacacagctccgaattgattccttctttagattagcacaacaggagaaagaagatgctaaacgtattaagagccagagactaaacagagctgtgacatgtatgctaaggaaagagaaagaagcagcagccagcgaaatagaagcagtttctgttgccatggagaaagaatttgagctacttgataaggcaaaacgaaaaacccagaagagaggcataacaaataccttagaagagtcatcaagcctgaaaagaaagaggctttcagattctaaacgaaagaatacatgcggtggatttttgggggagacctgcctctcagaatcatctgatggatcttcaagtgaagatgctgaaagttcatctttaatgaatgtacaaaggagaacagctgcgaaagagccaaaaaccagtgcttcagattcgcagaactcagtgaaggaagctcccgtgaagaatggaggtgcgaccaccagcagctctagtgatagtgatgacgatggagggaaagagaagatggtcctcgtgaccgccagatctgtgtttgggaagaaaagaaggaaactaagacgtgcgaggggaagaaaaaggaaaacctaattaaaaaatatgtatcctctataattagttatgacagccatttgtaatgaatttgtcgcaaagacgtaataaaattaactggtagcacggtctttgtatttagt

SEQ ID NO: 343114 - DNA, 4172 bp, Homo sapiens
gcttccgccctgcgcgtcgtattagacggaaaccgagcgggcccatttttcatgggtttgcggacccaccagcgaaggcgggaggtgtcgcagggacatcttctggctgtttccgtcgcctgcgtggcccttgcaccccggtcttccattagcggcgcagacgtttgggcctaagcgctgggcgaggcgaggccctgcccctccccgccaacggccattctctggacctgtctttcttccgggaggcggtgacagctgctgagacgtgttgcagccagagtctctccgctttaatgcgctcccattagtgccgtcccccactggaaaaccgtggcttctgtattatttgccatctttgttgtgtaggagcagggagggcttcctcccggggtcctaggcggcggtgcagtccgtcgtagaagaattagagtagaagttgtcggggtccgctcttaggacgcagccgcctcatgggggtccaggggctctggaagctgctggagtgctccgggcggcagactatacttgtagcaagcagaaacatcgatctaatacaagacagatgcacatcaacaccaagttctacctctgagatatattagcatttggttaaaccaagcacttaaaggagtccgggatcgccacgggaactcaatagaaaatcctcatcttctcactttgtttcatcggctctgcaaactcttattttttcgaattcgtcctatttttgtgtttgatggggatgctccactattgaagaaacagactttggtgaagagaaggcagagaaaggacttagcgtccagtgactccaggaaaacgacagagaagcttctgaaaacatttttgaaaagacaagccatcaaaactgccttcagaagcaaaagagatgaagcactacccagtcttacccaagttcgaagagaaaacgacctctatgttttgcctcctttacaagaggaagaaaaacacagttcagaagaggaagatgaaaaagaatggcaagaaagaatgaatcaaaaacaagcattacaggaagagttctttcataatcctcaagcgatagatattgagtctgaggacttcagcagcctgccccctgaagtaaagcatgaaatcttgactgatatgaaagagttcaccaagcgcagaagaacattatttgaagcaatgccagaggagtctgatgacttttcacagtaccaactcaaaggcttgcttaaaaagaactatctgaaccagcatatagaacatgtccaaaaggaaatgaatcagcaacattcaggacacatccgaaggcagtatgaagatgaagggggctttctgaaggaggtagagtcaaggagagtggtctctgaagacacttcacattacatcttgataaaaggtattcaagctaagacagttgcagaagtggattcagagtctcttccttcttccagcaaaatgcacggcatgtcttttgacgtgaagtcatctccatgtgaaaaactgaagacagagaaagagcctgatgctacccctccttctccaagaactttactagctatgcaagctgccctgctgggaagtagctcagaagaggagctggagagtgaaaatcgaaggcaggcccgtgggaggaacgcacctgctgctgtagacgaaggctccatatcaccccggactctttcagccattaagagagctcttgacgatgacgaagatgtaaaagtgtgtgctggggatgatgtgcagacgggagggccaggagcagaagaaatgcgtataaacagctccaccgagaacagtgatgaaggacttaaagtgagagatggaaaaggaataccgtttactgcaacacttgcgtcatctagtgtgaactctgcagaggagcacgtagccagcactaatgaggggagagagcccacagactcagttccaaaagaacaaatgtcacttgttcacgtggggactgaagcctttccgataagtgatgagtctatgattaaggacagaaaagatcggctgcctctggagagtgcagtggttagacatagtgacgcacctgggctcccgaatggaagggaactgacaccggcatctccaacttgtacaaattctgtgtcaaagaatgaaacacatgctgaagtgcttgagcagcagaacgaactttgcccatatgagagtaaattcgattcttctcttctttcaagtgatgatgaaacaaaatgtaaaccgaattctgcttctgaagtcattggccctgtcagtttgcaagaaacaagtagcatagtaagtgtcccttcagaggcagtagataatgtggaaaatgtggtgtcatttaatgctaaagagcatgagaattttctggaaaccatccaagaacagcagaccactgaatctgcaggccaggatttaatttccattccaaaggccgtggaaccaatggaaattgactcggaagaaagtgaatctgatggaagtttcattgaagtgcaaagtgtgattagtgatgaggaacttcaagcagaattccctgaaacttccaaacctccctcagaacaaggcgaagaggaactggtaggaactagggagggagaagcccctgctgagtccgagagcctcctgagggacaactctgagagggacgacgtggatggtgagccacaggaagctgagaaagatgcggaagattcgctccatgaatggcaagatattaatttggaggagttggaaactctggagagcaacctcttagcacagcagaattcactgaaagctcaaaaacagcagcaagaacggatcgctgctactgtcaccggacagatgttcctggaaagccaggaactcctgcgcctgttcggcattccctacatccaggctcccatggaagcagaggcgcagtgcgccatcctggacctgactgatcagacttccggaaccatcactgatgacagtgatatctggctgtttggagcgcggcatgtctatagaaacttttttaataaaaacaagtttgtagaatattatcaatatgtggactttcacaatcaattgggattggaccggaataagttaataaatttggcttatttgcttggaagtgattataccgaaggaataccaactgtgggttgtgtaaccgccatggaaattctcaatgaattccctgggcatggcctggaacctctcctaaaattctcagaatggtggcatgaagctcaaaaaaatccaaagataagacctaatcctcatgacaccaaagtgaaaaaaaaattacggacattgcaactcacccctggctttcctaacccagctgttgccgaggcctacctcaaacccgtggtggatgactcgaagggatcctttctgtgggggaaacctgatctcgacaaaattagagaattttgtcagcggtatttcggctggaacagaacgaagacagatgaatctctgtttcctgtattaaagcaactcgatgcccagcagacacagctccgaattgattccttctttagattagcacaacaggagaaagaagatgctaaacgtattaagagccagagactaaacagagctgtgacatgtatgctaaggaaagagaaagaagcagcagccagcgaaatagaagcagtttctgttgccatggagaaagaatttgagctacttgataaggcaaaacgaaaaacccagaagagaggcataacaaataccttagaagagtcatcaagcctgaaaagaaagaggctttcagattctaaacgaaagaatacatgcggtggatttttgggggagacctgcctctcagaatcatctgatggatcttcaagtgaagatgctgaaagttcatctttaatgaatgtacaaaggagaacagctgcgaaagagccaaaaaccagtgcttcagattcgcagaactcagtgaaggaagctcccgtgaagaatggaggtgcgaccaccagcagctctagtgatagtgatgacgatggagggaaagagaagatggtcctcgtgaccgccagatctgtgtttgggaagaaaagaaggaaactaagacgtgcgaggggaagaaaaaggaaaacctaattaaaaaatatgtatcctctataattagttatgacagccatttgtaatgaatttgtcgcaaagacgtaataaaattaactggtagcacggtctttgtatttagt

SEQ ID NO: 343115 - DNA, 1785 bp, Homo sapiens
gctgaggaagccaggttaagtaggttttgagttttaaggagttggtggatgagtatttagtagctatttgcagtacatcttgtggttgctgatggcttcatttttgtgtaggttactggctgggatagactccgttttccatgtggtttagtgatgaatctctaaagatattacagagtcttggttagacatccagtggagtacttcctaaggagaaagagcttattggtaatttcagtcagactaaatgcaggctttttgtaaacaaaactcatttggattattaatataaatctataaatgaaaaaacattttataggaggagttggaaactctggagagcaacctcttagcacagcagaattcactgaaagctcaaaaacagcagcaagaacggatcgctgctactgtcaccggacagatgttcctggaaagccaggaactcctgcgcctgttcggcattccctacatccaggctcccatggaagcagaggcgcagtgcgccatcctggacctgactgatcagacttccggaaccatcactgatgacagtgatatctggctgtttggagcgcggcatgtctatagaaacttttttaataaaaacaagtttgtagaatattatcaatatgtggactttcacaatcaattgggattggaccggaataagttaataaatttggcttatttgcttggaagtgattataccgaaggaataccaactgtgggttgtgtaaccgccatggaaattctcaatgaattccctgggcatggcctggaacctctcctaaaattctcagaatggtggcatgaagctcaaaaaaatccaaagataagacctaatcctcatgacaccaaagtgaaaaaaaaattacggacattgcaactcacccctggctttcctaacccagctgttgccgaggcctacctcaaacccgtggtggatgactcgaagggatcctttctgtgggggaaacctgatctcgacaaaattagagaattttgtcagcggtatttcggctggaacagaacgaagacagatgaatctctgtttcctgtattaaagcaactcgatgcccagcagacacagctccgaattgattccttctttagattagcacaacaggagaaagaagatgctaaacgtattaagagccagagactaaacagagctgtgacatgtatgctaaggaaagagaaagaagcagcagccagcgaaatagaagcagtttctgttgccatggagaaagaatttgagctacttgataaggcaaaacgaaaaacccagaagagaggcataacaaataccttagaagagtcatcaagcctgaaaagaaagaggctttcagattctaaacgaaagaatacatgcggtggatttttgggggagacctgcctctcagaatcatctgatggatcttcaagtgaagatgctgaaagttcatctttaatgaatgtacaaaggagaacagctgcgaaagagccaaaaaccagtgcttcagattcgcagaactcagtgaaggaagctcccgtgaagaatggaggtgcgaccaccagcagctctagtgatagtgatgacgatggagggaaagagaagatggtcctcgtgaccgccagatctgtgtttgggaagaaaagaaggaaactaagacgtgcgaggggaagaaaaaggaaaacctaattaaaaaatatgtatcctctataattagttatgacagccatttgtaatgaatttgtcgcaaagacgtaataaaattaactggtagcacggtctttgtatttagt

SEQ ID NO: 343116 - DNA, 4088 bp, Homo sapiens
gcttccgccctgcgcgtcgtattagacggaaaccgagcgggcccatttttcatgggtttgcggacccaccagcgaaggcgggaggtgtcgcagggacatcttctggctgtttccgtcgcctgcgtggcccttgcaccccggtcttccattagcggcgcagacgtttgggcctaagcgctgggcgaggcgaggccctgcccctccccgccaacggccattctctggacctgtctttcttccgggaggcggtgacagctgctgagacgtgttgcagccagagtctctccgctttaatgcgctcccattagtgccgtcccccactggaaaaccgtggcttctgtattatttgccatctttgttgtgtaggagcagggagggcttcctcccggggtcctaggcggcggtgcagtccgtcgtagaagaattagagtagaagttgtcggggtccgctcttaggacgcagccgcctcatgggggtccaggggctctggaagctgctggagtgctccgggcggcaggtcagccccgaagcgctggaagggaagatcctggctgttgatattagcatttggttaaaccaagcacttaaaggagtccgggatcgccacgggaactcaatagaaaatcctcatcttctcactttgtttcatcggctctgcaaactcttattttttcgaattcgtcctatttttgtgtttgatggggatgctccactattgaagaaacagactttggtgaagagaaggcagagaaaggacttagcgtccagtgactccaggaaaacgacagagaagcttctgaaaacatttttgaaaagacaagccatcaaaactgccttcagaagcaaaagagatgaagcactacccagtcttacccaagttcgaagagaaaacgacctctatgttttgcctcctttacaagaggaagaaaaacacagttcagaagaggaagatgaaaaagaatggcaagaaagaatgaatcaaaaacaagcattacaggaagagttctttcataatcctcaagcgatagatattgagtctgaggacttcagcagcctgccccctgaagtaaagcatgaaatcttgactgatatgaaagagttcaccaagcgcagaagaacattatttgaagcaatgccagaggagtctgatgacttttcacagtaccaactcaaaggcttgcttaaaaagaactatctgaaccagcatatagaacatgtccaaaaggaaatgaatcagcaacattcaggacacatccgaaggcagtatgaagatgaagggggctttctgaaggaggtagagtcaaggagagtggtctctgaagacacttcacattacatcttgataaaaggtattcaagctaagacagttgcagaagtggattcagagtctcttccttcttccagcaaaatgcacggcatgtcttttgacgtgaagtcatctccatgtgaaaaactgaagacagagaaagagcctgatgctacccctccttctccaagaactttactagctatgcaagctgccctgctgggaagtagctcagaagaggagctggagagtgaaaatcgaaggcaggcccgtgggaggaacgcacctgctgctgtagacgaaggctccatatcaccccggactctttcagccattaagagagctcttgacgatgacgaagatgtaaaagtgtgtgctggggatgatgtgcagacgggagggccaggagcagaagaaatgcgtataaacagctccaccgagaacagtgatgaaggacttaaagtgagagatggaaaaggaataccgtttactgcaacacttgcgtcatctagtgtgaactctgcagaggagcacgtagccagcactaatgaggggagagagcccacagactcagttccaaaagaacaaatgtcacttgttcacgtggggactgaagcctttccgataagtgatgagtctatgattaaggacagaaaagatcggctgcctctggagagtgcagtggttagacatagtgacgcacctgggctcccgaatggaagggaactgacaccggcatctccaacttgtacaaattctgtgtcaaagaatgaaacacatgctgaagtgcttgagcagcagaacgaactttgcccatatgagagtaaattcgattcttctcttctttcaagtgatgatgaaacaaaatgtaaaccgaattctgcttctgaagtcattggccctgtcagtttgcaagaaacaagtagcatagtaagtgtcccttcagaggcagtagataatgtggaaaatgtggtgtcatttaatgctaaagagcatgagaattttctggaaaccatccaagaacagcagaccactgaatctgcaggccaggatttaatttccattccaaaggccgtggaaccaatggaaattgactcggaagaaagtgaatctgatggaagtttcattgaagtgcaaagtgtgattagtgatgaggaacttcaagcagaattccctgaaacttccaaacctccctcagaacaaggcgaagaggaactggtaggaactagggagggagaagcccctgctgagtccgagagcctcctgagggacaactctgagagggacgacgtggatggtgagccacaggaagctgagaaagatgcggaagattcgctccatgaatggcaagatattaatttggaggagttggaaactctggagagcaacctcttagcacagcagaattcactgaaagctcaaaaacagcagcaagaacggatcgctgctactgtcaccggacagatgttcctggaaagccaggaactcctgcgcctgttcggcattccctacatccaggctcccatggaagcagaggcgcagtgcgccatcctggacctgactgatcagacttccggaaccatcactgatgacagtgatatctggctgtttggagcgcggcatgtctatagaaacttttttaataaaaacaagtttgtagaatattatcaatatgtggactttcacaatcaattgggattggaccggaataagttaataaatttggcttatttgcttggaagtgattataccgaaggaataccaactgtgggttgtgtaaccgccatggaaattctcaatgaattccctgggcatggcctggaacctctcctaaaattctcagaatggtggcatgaagctcaaaaaaatccaaagataagacctaatcctcatgacaccaaagtgaaaaaaaaattacggacattgcaactcacccctggctttcctaacccagctgttgccgaggcctacctcaaacccgtggtggatgactcgaagggatcctttctgtgggggaaacctgatctcgacaaaattagagaattttgtcagcggtatttcggctggaacagaacgaagacagatgaatctctgtttcctgtattaaagcaactcgatgcccagcagacacagctccgaattgattccttctttagattagcacaacaggagaaagaagatgctaaacgtattaagagccagagactaaacagagctgtgacatgtatgctaaggaaagagaaagaagcagcagccagcgaaatagaagcagtttctgttgccatggagaaagaatttgagctacttgataaggcaaaacgaaaaacccagaagagaggcataacaaataccttagaagagtcatcaagcctgaaaagaaagaggctttcagattctaaacgaaagaatacatgcggtggatttttgggggagacctgcctctcagaatcatctgatggatcttcaagtgaagatgctgaaagttcatctttaatgaatgtacaaaggagaacagctgcgaaagagccaaaaaccagtgcttcagattcgcagaactcagtgaaggaagctcccgtgaagaatggaggtgcgaccaccagcagctctagtgatagtgatgacgatggagggaaagagaagatggtcctcgtgaccgccagatctgtgtttgggaagaaaagaaggaaactaagacgtgcgaggggaagaaaaaggaaaacctaattagttaagcaactggcaaccaaagccgacaatgactaatggttcgcaggccctcgt

SEQ ID NO: 343117 - DNA, 3117 bp, Homo sapiens
gcttccgccctgcgcgtcgtattagacggaaaccgagcgggcccatttttcatgggtttgcggacccaccagcgaaggcgggaggtgtcgcagggacatcttctggctgtttccgtcgcctgcgtggcccttgcaccccggtcttccattagcggcgcagacgtttgggcctaagcgctgggcgaggcgaggccctgcccctccccgccaacggccattctctggacctgtctttcttccgggaggcggtgacagctgctgagacgtgttgcagccagagtctctccgctttaatgcgctcccattagtgccgtcccccactggaaaaccgtggcttctgtattatttgccatctttgttgtgtaggagcagggagggcttcctcccggggtcctaggcggcggtgcagtccgtcgtagaagaattagagtagaagttgtcggggtccgctcttaggacgcagccgcctcatgggggtccaggggctctggaagctgctggagtgctccgggcggcaggtcagccccgaagcgctggaagggaagatcctggctgttgatattagcatttggttaaaccaagcacttaaaggagtccgggatcgccacgggaactcaatagaaaatcctcatcttctcactttgtttcatcggctctgcaaactcttattttttcgaattcgtcctatttttgtgtttgatggggatgctccactattgaagaaacagactttggtgaagagaaggcagagaaaggacttagcgtccagtgactccaggaaaacgacagagaagcttctgaaaacatttttgaaaagacaagccatcaaaactgccttcagaagcaaaagagatgaagcactacccagtcttacccaagttcgaagagaaaacgacctctatgttttgcctcctttacaagaggaagaaaaacacagttcagaagaggaagatgaaaaagaatggcaagaaagaatgaatcaaaaacaagcattacaggaagagttctttcataatcctcaagcgatagatattgagtctgaggacttcagcagcctgccccctgaagtaaagcatgaaatcttgactgatatgaaagagttcaccaagcgcagaagaacattatttgaagcaatgccagaggagtctgatgacttttcacagtaccaactcaaaggcttgcttaaaaagaactatctgaaccagcatatagaacatgtccaaaaggaaatgaatcagcaacattcaggacacatccgaaggcagtatgaagatgaagggggctttctgaaggaggtagagtcaaggagagtggtctctgaagacacttcacattacatcttgataaaaggtattcaagctaagacagttgcagaagtggattcagagtctcttccttcttccagcaaaatgcacggcatgtcttttgacgtgaagtcatctccatgtgaaaaactgaagacagagaaagagcctgatgctacccctccttctccaagaactttactagctatgcaagctgccctgctgggaagtagctcagaagaggagctggagagtgaaaatcgaaggcaggcccgtgggaggaacgcacctgctgctgtagacgaaggctccatatcaccccggactctttcagccattaagagagctcttgacgatgacgaagatgtaaaagtgtgtgctggggatgatgtgcagacgggagggccaggagcagaagaaatgcgtataaacagctccaccgagaacagtgatgaaggacttaaagtgagagatggaaaaggaataccgtttactgcaacacttgcgtcatctagtgtgaactctgcagaggagcacgtagccagcactaatgaggggagagagcccacagactcagttccaaaagaacaaatgtcacttgttcacgtggggactgaagcctttccgataagtgatgagtctatgattaaggacagaaaagatcggctgcctctggagagtgcagtggttagacatagtgacgcacctgggctcccgaatggaagggaactgacaccggcatctccaacttgtacaaattctgtgtcaaagaatgaaacacatgctgaagtgcttgagcagcagaacgaactttgcccatatgagagtaaattcgattcttctcttctttcaagtgatgatgaaacaaaatgtaaaccgaattctgcttctgaagtcattggccctgtcagtttgcaagaaacaagtagcatagtaagtgtcccttcagaggcagtagataatgtggaaaatgtggtgtcatttaatgctaaagagcatgagaattttctggaaaccatccaagaacagcagaccactgaatctgcaggccaggatttaatttccattccaaaggccgtggaaccaatggaaattgactcggaagaaagtgaatctgatggaagtttcattgaagtgcaaagtgtgattagtgatgaggaacttcaagcagaattccctgaaacttccaaacctccctcagaacaaggcgaagaggaactggtaggaactagggagggagaagcccctgctgagtccgagagcctcctgagggacaactctgagagggacgacgtggatggtgagccacaggaagctgagaaagatgcggaagattcgctccatgaatggcaagatattaatttggaggagttggaaactctggagagcaacctcttagcacagcagaattcactgaaagctcaaaaacagcagcaagaacggatcgctgctactgtcaccggacagatgttcctggaaagccaggaactcctgcgcctgttcggcattccctacatccaggctcccatggaagcagaggcgcagtgcgccatcctggacctgactgatcagacttccggaaccatcactgatgacagtgatatctggctgtttggagcgcggcatgtctatagaaactcctctaatacccgggccttaccatcatatacatatgtggctcttcacaatcccatgcgcactcgactgacttccgctactcaccggcttcactcttctaggcgctgcctaccgctctacgtctcctctcaccttctcaccctctcttccggcctcgcttcattccttctcccct

SEQ ID NO: 343118 - DNA, 918 bp, Homo sapiens
gcttccgccctgcgcgtcgtattagacggaaaccgagcgggcccatttttcatgggtttgcggacccaccagcgaaggcgggaggtgtcgcagggacatcttctggctgtttccgtcgcctgcgtggcccttgcaccccggtcttccattagcggcgcagacgtttgggcctaagcgctgggcgaggcgaggccctgcccctccccgccaacggccattctctggacctgtctttcttccgggaggcggtgacagctgctgagacgtgttgcagccagagtctctccgctttaatgcgctcccattagtgccgtcccccactggaaaaccgtggcttctgtattatttgccatctttgttgtgtaggagcagggagggcttcctcccggggtcctaggcggcggtgcagtccgtcgtagaagaattagagtagaagttgtcggggtccgctcttaggacgcagccgcctcatgggggtccaggggctctggaagctgctggagtgctccgggcggcaggtcagccccgaagcgctggaagggaagatcctggctgttgatattagcatttggttaaaccaagcacttaaaggagtccgggatcgccacgggaactcaatagaaaatcctcatcttctcactttgtttcatcggctctgcaaactcttattttttcgaattcgtcctatttttgtgtttgatggggatgctccactattgaagaaacagactttggtgaagagaaggcagagaaaggacttagcgtccagtgactccaggaaaacgacagagaagcttctgaaaacatttttgaaaagacaagccatcaaaactgccttcagaagcaaaaggcaagaggaaaattatagtcgtgttagagatgaagttttaaaaaagtgatttttgtcttgatttcctg

SEQ ID NO: 343119 - DNA, 1313 bp, Homo sapiens
aaccgcacagtcaacgacgcttagcaatccggagagaaatagggtgttttcttcccgagagaggactgctaagagggggttaaagggggacgatgtgaaggagagaacctgtggtccttcagaaggcgaagaagaaagaaaggggaagcagtgaagaaagggacggagatactgggacagggagaaaaaagttgtggagagtagcttttaaggagtcatttggtggccatggatccaacgtgctcttctgagtgcatttataacctcatacccagtgacttgaaggagcctccccagcctcctaggtacatatccatttttaaggcaactgtaaaagatgacatgcaaaaagctaaaactgcaatgaaaactatgggaccagcaaaagttgaagtaccttctccaaaggatttcctaaagaaacattcaaaggaaaaaactctaccacccaaaaaaaactttgatcggaacgtgcccaaaaagcctgctgtgccattgaagactgatcatcctgtcatgggaatacagagtggaaaaaattttataaatacaaatgcagctgatatcatcatgggagtggctaaaaagcctaaaccaatttatgttgataaaagaactggagacaagcatgatcttgagccttcaggactagttccaaagtacatcaataaaaaggattatggtgtcacacctgaatacatatgtaagcgaaacgaggaaataaagaaagcccaagaagactatgatcgttatatccaggaaaaccttaagaaagcagctatgaaaaggctctccgatgaagaaagggaggcagttttgcaggggctgaaaaagaactgggaagaggtgcataaagaattccagtccctctcggtctttatagattctataccaaagaagatccgcaagcagaggctggaagaagaaatgaaacaactagaacacgacattggcataattgaaaagcacaagattatttatattgccaataagtaagaatggatctttaaagtataacaatttcaatgtaggggaaaaaaacatggaaaatataaaaaactccaagtttttcaaaaaggaaaatactatgaagagaataaaaatagtcttaatcagaatgcttaggcaatatgcaaagaataattgagttattcacttacacaagaagaaattttgtttttactagtgtcacgttttccacatataaactattaaatttgagaatatgtgttccagttccacaatgtaattcattattattatgtacttgtttcacataaacattaatttctaggtcctgaaaaataaagtca

SEQ ID NO: 343120 - DNA, 321 bp, Homo sapiens
aggagagaacctgtggtccttcagaaggcgaagaagaaagaaaggggaagcagtgaagaaagggacggagatactgggacagggagaaaaaagttgtggagagtagcttttaaggagtcatttggtggccatggatccaacgtgctcttctgagtgcatttataacctcatacccagtgacttgaaggagcctccccagcctcctaggtatgtggataagcaaagactatcacttgaaacaagaatggggaatactcagtattaattaagcatacatatactggaatttttaataataaataaaatgtatttttgcctcga

SEQ ID NO: 343121 - DNA, 372 bp, Homo sapiens
tgctgggattacaggtgtgagccactatgcctgggcaataacaactccattttaaaaggcaggaatctactagctctcaatggagggaaaaaagtcactgaattttgtcaatttacagggttttgaacaaaggatttagtctgtaccatttctttttcttccatcatcagttgatacgtacccatatgtaagattgcatacaaaatattgattacttttttctgcaaaatctttttaggattatggtgtcacacctgaatacatatgtaagcgaaacgaggaaataaagaaagcccaagaagactatgatcgttatatccaggaaaaccttaagaaagcagctatgaaaaggctctccgatgaagaaaggga

SEQ ID NO: 343122 - DNA, 1167 bp, Homo sapiens
aaccgcacagtcaacgacgcttagcaatccggagagaaatagggtgttttcttcccgagagaggactgctaagagggggttaaagggggacgatgtgaaggagagaacctgtggtccttcagaaggcgaagaagaaagaaaggggaagcagtgaagaaagggacggagatactgggacagggagaaaaaagttgtggagagtagcttttaaggagtcatttggtggccatggatccaacgtgctcttctgagtgcatttataacctcatacccagtgacttgaaggagcctccccagcctcctagaaaaaaactttgatcggaacgtgcccaaaaagcctgctgtgccattgaagactgatcatcctgtcatgggaatacagagtggaaaaaattttataaatacaaatgcagctgatatcatcatgggagtggctaaaaagcctaaaccaatttatgttgataaaagaactggagacaagcatgatcttgagccttcaggactagttccaaagtacatcaataaaaaggattatggtgtcacacctgaatacatatgtaagcgaaacgaggaaataaagaaagcccaagaagactatgatcgttatatccaggaaaaccttaagaaagcagctatgaaaaggctctccgatgaagaaagggaggcagttttgcaggggctgaaaaagaactgggaagaggtgcataaagaattccagtccctctcggtctttatagattctataccaaagaagatccgcaagcagaggctggaagaagaaatgaaacaactagaacacgacattggcataattgaaaagcacaagattatttatattgccaataagtaagaatggatctttaaagtataacaatttcaatgtaggggaaaaaaacatggaaaatataaaaaactccaagtttttcaaaaaggaaaatactatgaagagaataaaaatagtcttaatcagaatgcttaggcaatatgcaaagaataattgagttattcacttacacaagaagaaattttgtttttactagtgtcacgttttccacatataaactattaaatttgagaatatgtgttccagttccacaatgtaattcattattattatgtacttgtttcacataaacattaatttctaggtcctgaaaaataaagtca

SEQ ID NO: 343123 - DNA, 172 bp, Homo sapiens
aatggaaataaaacttaaattagtttctggtacttcttagtgctccatctcagttagctagtctgagtgttgccatgaaataaactctctgcgggaaagcagtggactctaacataataaacatcacctgtcttgtctttttttttttttttttaaacagtctcactcctgt

SEQ ID NO: 343124 - DNA, 871 bp, Homo sapiens
actaggaaaattgaaatgggcacagaaattccttgttcgagagccttctggttatactttaaaaagaagggagcctagcatcttgtcaaatctttgagcccactcactcagagggcctgtcactcatccagaattgaatctgctggtttaacaggtcaggcagtgtgatttgacagcgtgaatcttagagtccagcctttgaacctggcgctgaatcctgactttactgcttattcagggggccactagctaagttaatttgtgagcctgggcaacatggcgtgacccatctctacaaaagatacaaaagttaactggatgtggtggtgcatgcctgtggttcatagctactctggaggctgaggcgggaggatgacctgagtgcgggaggttggggttgcagtgagctgaagttgcgccactgcactccagcctgggtgacagagtgagaccttatcttaatctaaaaaataaaatttctgagccttattttcctcatctgtaaaatgaagagaatacctagctcatggagttaggaacaagtatgttaaatatttatcagagtgtgcctgacagtgagttgaaaatatctactctctttggatgaaaaatatttaacacttcactctcagatataattattagctgactttttagattcttttttcttttacatgatgtagttctcagatatatacgggatttctagttcttaaatgccagtattttttttctgttaaaatatttatgaactatttcaaacattcagaaaaactcaggatcatacccataaacccactgtttagattttaaaaagttcaatgtttttctgtattttatctcttcattttaaaataaagttttgcacatg

SEQ ID NO: 343125 - DNA, 574 bp, Homo sapiens
caggaaaacagcccccatgatccaatcacctcccaccaggttcttcccttgacctgtgagaattatggggattacaattcaagatgtacttcccataatccccacatgacctggatgtgagacatggagtcaacatttgcagcctgacgatgtggtagaaaagaaaaacccatattctggggagaaattcaagctggctacagaaatttgcataagaaacaaggagccaaatgttaatcaccaagacagcggggaaaatgtctctagggcatctcagagactttcacagcagcccctcccatcacaggcccagaggcctaggaggtaaaaaatggttttatgggcagggtccagggcccccctgcagtgtgcagcctcgggacttggggcatcccacctgctccagctgtgggtaaaagaggccaaggtacagctcaggctgttatttcaggggatgcaagccccagttacaattccagatgagatttgggtaaggacacggagccaaactatatcatcccttccctagcacccggagatgctcttgtcaccacgcaccactgctgggggtcag

SEQ ID NO: 343126 - DNA, 233 bp, Homo sapiens
cagtgcactctggcctgagagacagagtgagactcggtctcaaaaaaaacaaaacaaaacaagaaatgtgttgggattgggatactcagatctctggtccagtgtcatcagctgggtcactgcacctgatcatcagtacagacccaaaatatcaatatagttttctcccacatggcctcaatgtggtatagacacccagagccactgcacctatattcatacttcttggtgga

SEQ ID NO: 343127 - DNA, 544 bp, Homo sapiens
attaacgtgggaccaggtgtggtggcttatgcctgtaatcccagcactttgggaggctcaggcaagagcatcacttcagcgcaggagtttgacaccagcctgggcaacatatggagaacccatctctacaaagtttaaaaattagtggtggtgtgcacccgtagtcccagctactcaggaggctgaggtaggaggatcccttgagcccaggaggtcgaggctgcaatgggccatgttcacaccaagacactccagcctaggtgacagagcaagaccctgtctcaaaacaaaagaaaacaaaaacaaacaaaaaaatgtggtaaaagattaaatgatgaagatgtggcttaaaacttaaaagaagcttgatggtagacagaaagacatagcaaatatcttaaaaagatagtcaagagaaaatatgagtcttttttttttttcattggaaaaagacttaaacgtatttgtagatttacagaagaacccattgtagaaggacaggggaaaaactggaaaggcaccagaaagaggataattcattaat

SEQ ID NO: 343128 - DNA, 188 bp, Homo sapiens
atttttattattctggaaaccaaaatgtaatgcatacccacgtattcttctcaaggtgcattcctcaaagcttaggcaaataactgcgtatctctatgtcttcttctgaaatgtgatttaaaaataattgttctaagcaatggcataaacaaaacaaaatacagtgttgtggggatggaaggttgggc

SEQ ID NO: 343129 - DNA, 460 bp, Homo sapiens
ccccgccggtttccaaggatgcaactatgaagagacacagtgggggctacgattgggtcgtgactgtggcccacgccaggcgagcgtccccgccccagcccctctgccatctgcgtgcctgttctcccgctacctgcccccgcgccaggatccaggcttgcaaacgtccccatgccatgcgcaggcacatctcgggcggccagccaggcacacgctgcggggtgtcattagctgcagtgccgcctaaacgcggcggcccgtgcagaaccacggccaggccacctgcacgggccagggaggtgatggggacagcgagagacatgccaaaccccactggggggttgggaggggaggcgctttcatcctaaggtgacttccgtttttttttctaataaaaaaatattttaaacatggggataaatagagaaaaagacaaaatagaccccatcatagcaatgcc

SEQ ID NO: 343130 - DNA, 323 bp, Homo sapiens
tttccacttcatctaagtaatctaatttggttggcatgcagttgttcatagtagtcccttttgatcctttttatttctgtaatgtgggtagtaatgcctatgttttcatccatcattttagtaatttcagtttttctccttttttcttgattattctctctaaacatttttatcactttggttcaatgaactgttgatttttttccgttctttttctatttcaataatttctggtcttttattatttcttttccttctacatgctttggtttagtttgtttgctcttctttttcttttttccttttttttttttttttttttt

SEQ ID NO: 343131 - DNA, 352 bp, Homo sapiens
acacacacacacacacacacacacacatattcgataggtaaatgcttgggcacaagctctctagaagacgtaataaagtatccaggtgtttgtcttgtaagaatgtgatcccgacaaccccagagccaggccaagcctggagcacaggaccagtgactcagacactaccggcttggcgtcatggtgccgtggttttccatactggtgaaaaacgctcagtaaatttctaggcacaacaacacacgttgactgactctgggttcctgcatattccgctcatactaaaccaggcgataatgctctatgattacgtgtcagagagttagggcctagggtaggtaattagcaactg

SEQ ID NO: 343132 - DNA, 250 bp, Homo sapiens
ttatttcatccaatttcgtgggcctgctacttacatttcaaggctgatatccacacagaatttttaagtattatataaaacttacattttaggtctgtagtgcaaaacacttagatcaatcattaccttttaattttcaaaaagaaatttttcactatagacttatgccacctatatccctgggctcatagaacaaaggaagaggtggcagggagagattgtactggatggatacaggtcagagaccttt

SEQ ID NO: 343133 - DNA, 208 bp, Homo sapiens
agaaccaccggtgtggcgtgctgggaaaaatcaaggtagagtctgcctttcacacccccacaggtgacgtcagaaggcatggaggcccagacacaaagctccgtcactctacagtgcagtttggagaatacacaagacccggtttagcatcttggtcgggaggcacaagctcagaacaaaaatctgacaaggaaacatgtgttcacca

SEQ ID NO: 343134 - DNA, 377 bp, Homo sapiens
aaggccaagccccagtctaaatgagaccagccagcttccttaaaatccctttaatttgtattacatataatcgtgtatgtttaaaaaatattttatttttttgagacagtttgtgtcacccaggctggagtccagtggcatgctcacagctctctgcagcctcgacctgggcttgagcgatcttgccaccttagcctcccgagtagctgggacccatgggtgcatgccaccacacctggctaattaaaaaaaaaatttttttttgtagaggtggcgggtctcactatgttgcccagtctggtctcgaattcctgggttcaagcagtcccagagtgttgggattacagatgtgagccattgcacctggcctaaaaatg

SEQ ID NO: 343135 - DNA, 5788 bp, Homo sapiens
aagcttgcggccgccgggccccggggttgaggcgaggagcccgcgggcggccggtcgggcggggcggcggcgctgacagcatcctgaggttagcattacacttctcccagtggagcccatgacttctgatcaggacgctaaggttgtggctgaaccgcagacgcagagagtccaggagggcaaggacagcgctcatctgatgaatggtcctatatctcaaaccacttctcagacaagttccatcccacctttgagtcagaaaacactcctcagctaccggtgtcagaggacggtgttgtttggggatggcatgatagagacggacagttcgtaccagcaactaaggtttcagagctgaaccctaatgcagaagtgtggggggctcctgtgttacatctggaagcaagcagtgctgctgacggtgtgagtgctgcatgggaggaggtggctggccaccacgcagaccgtggcccgcagggatcggatgccaatggtgatggtgaccagggccatgagaatgccgcattgccagacccgcaggagtcggacccagcagacatgaacgctctcgctctgggtccctcagaatatgactctctgcctgaaaatagcgagacaggaggaaatgagtctcaaccagacagccaggaagacccccgagaagtacttaaaaaaacattggaattctgcttatctagggagaaccttgctagtgacatgtatcttatatcacagatggatagtgaccagtatgtgccaatcacaacggtggctaacctcgaccacatcaagaagctcagcactgatgtggacttgattgtggaagtgctaagatctttacctttagtccaagtggatgaaaagggagaaaaagtaaggccaaatcaaaatcgctgcatagtaatattgcgtgaaatatctgaatctacccccgtggaagaagtagaagcactatttaaaggagataatttaccaaaatttataaactgtgaatttgcatataatgataattggtttattacatttgaaacagaagctgatgcacaacaggcttacaaataccttcgagaagaagtcaaaacttttcaaggaaaaccaattaaggcacggataaaagcaaaggcaatagctataaacacatttttgccaaagaatggatttagacccctggacgtgagcctgtatgcccagcagcgctacgcgacgtcgttctacttccctcccatgtacagcccccagcagcagttccccctgtacagcctgatcactccccagacgtggtcagcaacgcacagctatcttgacccacccttggtaactccatttccaaatactggatttataaatgggtttacgtctccagcgttcaagcctgcggcgtctcctctgacttctctcagacagtatcctcctcgaagcaggaatcctagtaaatctcatctgcggcatgcgattcctagtgcagagaggggacctgggttattagaaagtccttcaatatttaacttcactgcagatcgattaattaatggtgtccggagtccacaaacaaggcaagcaggtcaaactagaacacggattcaaaacccttcagcatatgccaagagagaggctgggcctgggcgtgtggagccaggcagtctcgaatcctctcctggtttagggaggggaaggaagaattcctttggctaccggaagaaaagggaggagaagtttacaagcagccagacacagtctccaacgccaccaaagcctccgtcgccaagcttcgagctggggctgtccagcttccctccattacctggagctgccggcaatttgaagacagaggacttgtttgaaaacaggctatctagcttgataataggaccatccaaagaaaggaccctcagtgcagacgcaagcgtgaacacccttcctgtagtggtctccagagagccctcggtgccggcttcttgtgctgtatcagcaacgtacgagcgatccccctccccagctcatttacccgatgatcccaaggtggcggagaaacagagggaaacccacagtgtggacagacttccttccgccctcactgcgaccgcgtgtaaatcggtgcaggtgaacggagccgccacggaattgcgaaagcccagctacgcagagatttgtcagagaacgagtaaagagcctccttcttccccattgcaaccccaaaaagaacaaaagccaaacactgttggttgtgggaaggaggaaaagaagctggcagagcccgcagagagataccgggagcccccagccctcaagtccacacctggagcccccagagaccagaggcggccggcggggggccggccctcgccctcggccatggggaagcgtctcagccgagagcagagcactccccccaagtctcctcagtgaaaaccgtacgtctgggaggggtcgcagagcgctgtgttaaccacaaacgagacactctcccactcagtgcgagggcgagccgctggttaggagcttgcagtgtctgaggcctgtgggatcctcaagttggttttcttctgtgagttggattctccccctcttgaaaaaaaatcgatttttcaggatttaattaatacaaaccttattttaggttggtgcttaactggaggtgatgcataagtctgatttttttttccaagatagaaaaagcatttatcctaacaaattggtattttttattaagcctccatgtggctctgaatgcaagctatatatagtgagtttttctaaattaagggaactctgcttttttttttttttttttaagtaactggtctgtaagtgcatatctctagaacgtccccgcagatgaatgagggccagtggccttggcagaggcaggtgtggcctcgtagaggcagtgctggccgcgccagggcatcagtgctgatgtgggagctgtgcttccacctaagccgttggtaggggactgtggcatttaagaatgtagagagcgcatcctttttgatctcctgggcggagtgaacctgcaggggccaccccagaaaccttggttctgatgcactgcaagcaagtaaccagcttctcactccagtttcaagtggctattatgtaatataaattcaaagcacattgtgaatagaacctacatgaaaacatacactttgttgcccactgacatgttaccagaagttgtaccatgatgttgttttgacccctgtgagctgatggccccggccctgctctgtgcacatttctgtccgtgttccccagcactctggttggagagagtccacatcttcagctccgtgtggacatctccctgtacctctgcatcagcacatggatttaagagttatgtaatcgtgagagaatggtgtttgtggtttttccccctctttggctggtggaggataaagttcctgctcttttacctccaagacgagggcctcattgattcacttccagaagtgctgcacttctgaagaacaaggatgcactaaagttagcaagtttataataaagttaaatataaattattttgttttaaaatgcctcaaatttttctttattctaagcagcaaacattaaaataagaatatttcctgctaaatgtaaccatacactttattccacaaaatgttatttaacaagactgagggttttttttaagaaaaaattatttccatccaatatttaaagacttgaattttatttaaacttgaaaatgactttgccttaacttttgtataagacagcttagagtccatggagcccggccctgggttggcgtgagtgggtcagagttactcagttactgcgtggatctcctgtcgctagttttactgagtaagcatactgtagtacaagagctagtagtagtttttgtaatataccttaaagatcttcaacagttgatcttttttcagaatgttggaaaatcctgtaaatgcaaatagtcaatactgtattaaatacgtgcacttggagtgtgcttcgcttgtacagttgtaaataatcagaacatatgaaaaaggtaccctacagagaaaattctgatacagattattgatatattataaatgttgctgttgagcgggatgtagataaactaaatgttgtggtttgaatattattttgatttgttgagattttcttttttctcttacatcggtgtgttgaactgattctgcctctttgctgcaaaagggaattggaaagtcttattaaaagcctccagatgttttcatactcttttaaaatgtatgtaaatgcatactaatcatatctaatgtgaaagagttttaaagtatatagagagcaaaaactggcaggatcgtaagtgaaggtgactagtaatctaattaaaatcacctgcagctaagcatgattgaccctgccagaggaaaacatgcctatttgaccatttcctttaaagcagttgccattattcaaatacagagaaatagccacagggctagtgtttttcaaatgcattttaaagaacatggggatttttttttgtagttgtcagttcactgaccaaaaaaaaaaaaaaaatcagaaataattgatctgtgaaacccaaactctcaatactcagaaagctgggaggcaacctcgaggcctgggcctacgagctgcatcttcgctacggaagggccagggcgccatcagccattcccaaaacacaaggcctgcccgtccgccagtgagtccttggtttttaataatgagaagtcctttcccccaaggtgtgagcattgcagcgcagtgtgtgtgtgtggttagagccagcttagtccttcactttgtcgaccgaagtgggagctcaacagctgcatgaggagggcagcgcgtgcattagccagtcgccactggagggctctgctgccctccggtcaatacactgtagttactgcctagccagcagcagtcttctgcatcaagaactgaaaccttgctcggaggtgatttttatagcatcctttttaattaaaggtgaaatacagattgctatataatgtctgaaaaaacctgatactacttcaagagtttctgctcagaagaaaatgagagttatcataataggaagctgtggcggtccatgccaactgtgctgtgtcacatacagcgatgagagtggctttcatactttttttttttttaagttaacaccctcctttacccccagcagtatctcaggttatagaatcagagatgcagcagtgacaaatggcattttaacttgtaaaatcgtgtgatgatgcttatcattttgaaatagaagaataaaaacctggtcccgtttcaccagacatgaatttcaagtggagtcgtcgttctctgagagtgagtgtcttgacattttcacccaggccctcctgtcatcacatcaccggctgtcactggcgggtggccgtaaacgtcctgcgttgctatattaggatctctgcagttcaggcttcaaaaccagttcagtgtatccgggcgacgggtagtggtggtgcatgcctgtctgtgtgccccgctggcgagctgtagttgcggcttgcgtgcctcgcggcccactacagggctgcagacaatcgaggcgagggcgctggccgccagcagctcacagcgcgggggtcatgtggtcgctcctcgagggtttcgtttttgttctgcttcattaagactggaatcaagcttacatgtaaactattggtaatttaagtttccttttgtgtcattcagtgtaaaactgtctaatttgaaaaaaaatgtaggttatgaaaataaagatttaggcactgtt

SEQ ID NO: 343136 - DNA, 5862 bp, Homo sapiens
tgtaaatgagaggaagcaaagatttttatggagactatcaataatctcaagaaaatacatattcaaaatggaattaaagccgtgcagtaagattgcatgtgaaacatcaacaggaagttgccttttcctcctctggactctgggtatactttgtttgccatctgcgagatcagtccatggctgagagatggcataagtgagcctgagtgcagcagtgagcagagcatcctgaggttagcattacacttctcccagtggagcccatgacttctgatcaggacgctaaggttgtggctgaaccgcagacgcagagagtccaggagggcaaggacagcgctcatctgatgaatggtcctatatctcaaaccacttctcagacaagttccatcccacctttgagtcaggtaccagcaactaaggtttcagagctgaaccctaatgcagaagtgtggggggctcctgtgttacatctggaagcaagcagtgctgctgacggtgtgagtgctgcatgggaggaggtggctggccaccacgcagaccgtggcccgcagggatcggatgccaatggtgatggtgaccagggccatgagaatgccgcattgccagacccgcaggagtcggacccagcagacatgaacgctctcgctctgggtccctcagaatatgactctctgcctgaaaatagcgagacaggaggaaatgagtctcaaccagacagccaggaagacccccgagaagtacttaaaaaaacattggaattctgcttatctagggagaaccttgctagtgacatgtatcttatatcacagatggatagtgaccagtatgtgccaatcacaacggtggctaacctcgaccacatcaagaagctcagcactgatgtggacttgattgtggaagtgctaagatctttacctttagtccaagtggatgaaaagggagaaaaagtaaggccaaatcaaaatcgctgcatagtaatattgcgtgaaatatctgaatctacccccgtggaagaagtagaagcactatttaaaggagataatttaccaaaatttataaactgtgaatttgcatataatgataattggtttattacatttgaaacagaagctgatgcacaacaggcttacaaataccttcgagaagaagtcaaaacttttcaaggaaaaccaattaaggcacggataaaagcaaaggcaatagctataaacacatttttgccaaagaatggatttagacccctggacgtgagcctgtatgcccagcagcgctacgcgacgtcgttctacttccctcccatgtacagcccccagcagcagttccccctgtacagcctgatcactccccagacgtggtcagcaacgcacagctatcttgacccacccttggtaactccatttccaaatactggatttataaatgggtttacgtctccagcgttcaagcctgcggcgtctcctctgacttctctcagacagtatcctcctcgaagcaggaatcctagtaaatctcatctgcggcatgcgattcctagtgcagagaggggacctgggttattagaaagtccttcaatatttaacttcactgcagatcgattaattaatggtgtccggagtccacaaacaaggcaagcaggtcaaactagaacacggattcaaaacccttcagcatatgccaagagagaggctgggcctgggcgtgtggagccaggcagtctcgaatcctctcctggtttagggaggggaaggaagaattcctttggctaccggaagaaaagggaggagaagtttacaagcagccagacacagtctccaacgccaccaaagcctccgtcgccaagcttcgagctggggctgtccagcttccctccattacctggagctgccggcaatttgaagacagaggacttgtttgaaaacaggctatctagcttgataataggaccatccaaagaaaggaccctcagtgcagacgcaagcgtgaacacccttcctgtagtggtctccagagagccctcggtgccggcttcttgtgctgtatcagcaacgtacgagcgatccccctccccagctcatttacccgatgatcccaaggtggcggagaaacagagggaaacccacagtgtggacagacttccttccgccctcactgcgaccgcgtgtaaatcggtgcaggtgaacggagccgccacggaattgcgaaagcccagctacgcagagatttgtcagagaacgagtaaagagcctccttcttccccattgcaaccccaaaaagaacaaaagccaaacactgttggttgtgggaaggaggaaaagaagctggcagagcccgcagagagataccgggagcccccagccctcaagtccacacctggagcccccagagaccagaggcggccggcggggggccggccctcgccctcggccatggggaagcgtctcagccgagagcagagcactccccccaagtctcctcagtgaaaaccgtacgtctgggaggggtcgcagagcgctgtgttaaccacaaacgagacactctcccactcagtgcgagggcgagccgctggttaggagcttgcagtgtctgaggcctgtgggatcctcaagttggttttcttctgtgagttggattctccccctcttgaaaaaaaatcgatttttcaggatttaattaatacaaaccttattttaggttggtgcttaactggaggtgatgcataagtctgatttttttttccaagatagaaaaagcatttatcctaacaaattggtattttttattaagcctccatgtggctctgaatgcaagctatatatagtgagtttttctaaattaagggaactctgcttttttttttttttttttaagtaactggtctgtaagtgcatatctctagaacgtccccgcagatgaatgagggccagtggccttggcagaggcaggtgtggcctcgtagaggcagtgctggccgcgccagggcatcagtgctgatgtgggagctgtgcttccacctaagccgttggtaggggactgtggcatttaagaatgtagagagcgcatcctttttgatctcctgggcggagtgaacctgcaggggccaccccagaaaccttggttctgatgcactgcaagcaagtaaccagcttctcactccagtttcaagtggctattatgtaatataaattcaaagcacattgtgaatagaacctacatgaaaacatacactttgttgcccactgacatgttaccagaagttgtaccatgatgttgttttgacccctgtgagctgatggccccggccctgctctgtgcacatttctgtccgtgttccccagcactctggttggagagagtccacatcttcagctccgtgtggacatctccctgtacctctgcatcagcacatggatttaagagttatgtaatcgtgagagaatggtgtttgtggtttttccccctctttggctggtggaggataaagttcctgctcttttacctccaagacgagggcctcattgattcacttccagaagtgctgcacttctgaagaacaaggatgcactaaagttagcaagtttataataaagttaaatataaattattttgttttaaaatgcctcaaatttttctttattctaagcagcaaacattaaaataagaatatttcctgctaaatgtaaccatacactttattccacaaaatgttatttaacaagactgagggttttttttaagaaaaaattatttccatccaatatttaaagacttgaattttatttaaacttgaaaatgactttgccttaacttttgtataagacagcttagagtccatggagcccggccctgggttggcgtgagtgggtcagagttactcagttactgcgtggatctcctgtcgctagttttactgagtaagcatactgtagtacaagagctagtagtagtttttgtaatataccttaaagatcttcaacagttgatcttttttcagaatgttggaaaatcctgtaaatgcaaatagtcaatactgtattaaatacgtgcacttggagtgtgcttcgcttgtacagttgtaaataatcagaacatatgaaaaaggtaccctacagagaaaattctgatacagattattgatatattataaatgttgctgttgagcgggatgtagataaactaaatgttgtggtttgaatattattttgatttgttgagattttcttttttctcttacatcggtgtgttgaactgattctgcctctttgctgcaaaagggaattggaaagtcttattaaaagcctccagatgttttcatactcttttaaaatgtatgtaaatgcatactaatcatatctaatgtgaaagagttttaaagtatatagagagcaaaaactggcaggatcgtaagtgaaggtgactagtaatctaattaaaatcacctgcagctaagcatgattgaccctgccagaggaaaacatgcctatttgaccatttcctttaaagcagttgccattattcaaatacagagaaatagccacagggctagtgtttttcaaatgcattttaaagaacatggggatttttttttgtagttgtcagttcactgaccaaaaaaaaaaaaaaaatcagaaataattgatctgtgaaacccaaactctcaatactcagaaagctgggaggcaacctcgaggcctgggcctacgagctgcatcttcgctacggaagggccagggcgccatcagccattcccaaaacacaaggcctgcccgtccgccagtgagtccttggtttttaataatgagaagtcctttcccccaaggtgtgagcattgcagcgcagtgtgtgtgtgtggttagagccagcttagtccttcactttgtcgaccgaagtgggagctcaacagctgcatgaggagggcagcgcgtgcattagccagtcgccactggagggctctgctgccctccggtcaatacactgtagttactgcctagccagcagcagtcttctgcatcaagaactgaaaccttgctcggaggtgatttttatagcatcctttttaattaaaggtgaaatacagattgctatataatgtctgaaaaaacctgatactacttcaagagtttctgctcagaagaaaatgagagttatcataataggaagctgtggcggtccatgccaactgtgctgtgtcacatacagcgatgagagtggctttcatactttttttttttttaagttaacaccctcctttacccccagcagtatctcaggttatagaatcagagatgcagcagtgacaaatggcattttaacttgtaaaatcgtgtgatgatgcttatcattttgaaatagaagaataaaaacctggtcccgtttcaccagacatgaatttcaagtggagtcgtcgttctctgagagtgagtgtcttgacattttcacccaggccctcctgtcatcacatcaccggctgtcactggcgggtggccgtaaacgtcctgcgttgctatattaggatctctgcagttcaggcttcaaaaccagttcagtgtatccgggcgacgggtagtggtggtgcatgcctgtctgtgtgccccgctggcgagctgtagttgcggcttgcgtgcctcgcggcccactacagggctgcagacaatcgaggcgagggcgctggccgccagcagctcacagcgcgggggtcatgtggtcgctcctcgagggtttcgtttttgttctgcttcattaagactggaatcaagcttacatgtaaactattggtaatttaagtttccttttgtgtcattcagtgtaaaactgtctaatttgaaaaaaaatgtaggttatgaaaataaagatttaggcactgtt

SEQ ID NO: 343137 - DNA, 5822 bp, Homo sapiens
aagcttgcggccgccgggccccggggttgaggcgaggagcccgcgggcggccggtcgggcggggcggcggcgctgacagcatcctgaggttagcattacacttctcccagtggagcccatgacttctgatcaggacgctaaggttgtggctgaaccgcagacgcagagagtccaggagggcaaggacagcgctcatctgatgaatggtcctatatctcaaaccacttctcagacaagttccatcccacctttgagtcaggtaccagcaactaaggtttcagagctgaaccctaatgcagaagtgtggggggctcctgtgttacatctggaagcaagcagtgctgctgacggtgtgagtgctgcatgggaggaggtggctggccaccacgcagaccgtggcccgcagggatcggatgccaatggtgatggtgaccagggccatgagaatgccgcattgccagacccgcaggagtcggacccagcagacatgaacgctctcgctctgggtccctcagaatatgactctctgcctgaaaatagcgagacaggaggaaatgagtctcaaccagacagccaggaagacccccgagaagtacttaaaaaaacattggaattctgcttatctagggagaaccttgctagtgacatgtatcttatatcacagatggatagtgaccagtatgtgccaatcacaacggtggctaacctcgaccacatcaagaagctcagcactgatgtggacttgattgtggaagtgctaagatctttacctttagtccaagtggatgaaaagggagaaaaagtaaggccaaatcaaaatcgctgcatagtaatattgcgtgaaatatctgaatctacccccgtggaagaagtagaagcactatttaaaggagataatttaccaaaatttataaactgtgaatttgcatataatgataattggtttattacatttgaaacagaagctgatgcacaacaggcttacaaataccttcgagaagaagtcaaaacttttcaaggaaaaccaattaaggcacggataaaagcaaaggcaatagctataaacacatttttgccaaagaatggatttagacccctggacgtgagcctgtatgcccagcagcgctacgcgacgtcgttctacttccctcccatgtacagcccccagcagcagttccccctgtacagcctgatcactccccagacgtggtcagcaacgcacagctatcttgacccacccttggtaactccatttccaaatactggatttataaatgggtttacgtctccagcgttcaagcctgcggcgtctcctctgacttctctcagacagtatcctcctcgaagcaggaatcctagtaaatctcatctgcggcatgcgattcctagtgcagagaggggacctgggttattagaaagtccttcaatatttaacttcactgcagatcgattaattaatggtgtccggagtccacaaacaaggcaagcaggtcaaactagaacacggattcaaaacccttcagcatatgccaagagagaggctgggcctgggcgtgtggagccaggcagtctcgaatcctctcctggtttagggaggggaaggaagaattcctttggctaccggaagaaaagggaggagaagtttacaagcagccagacacagtctccaacgccaccaaagcctccgtcgccaagcttcgagctggggctgtccagcttccctccattacctggagctgccggcaatttgaagacagaggacttgtttgaaaacaggctatctagcttgataataggaccatccaaagaaaggaccctcagtgcagacgcaagcgtgaacacccttcctgtagtggtctccagagagccctcggtgccggcttcttgtgctgtatcagcaacgtacgagcgatccccctccccagctcatttacccgatgatcccaaggtggcggagaaacagagggaaacccacagtgtggacagacttccttccgccctcactgcgaccgcgtgtaaatcggtgcaggtgaacggagccgccacggtacgtacctcgtgcctgccttcctgcacgacagccgcgaggctctggtgtgaacagacgctgcgcactcctgcacctgctcgttttttaatcacatctaatttggaattgcgaaagcccagctacgcagagatttgtcagagaacgagtaaagagcctccttcttccccattgcaaccccaaaaagaacaaaagccaaacactgttggttgtgggaaggaggaaaagaagctggcagagcccgcagagagataccgggagcccccagccctcaagtccacacctggagcccccagagaccagaggcggccggcggggggccggccctcgccctcggccatggggaagcgtctcagccgagagcagagcactccccccaagtctcctcagtgaaaaccgtacgtctgggaggggtcgcagagcgctgtgttaaccacaaacgagacactctcccactcagtgcgagggcgagccgctggttaggagcttgcagtgtctgaggcctgtgggatcctcaagttggttttcttctgtgagttggattctccccctcttgaaaaaaaatcgatttttcaggatttaattaatacaaaccttattttaggttggtgcttaactggaggtgatgcataagtctgatttttttttccaagatagaaaaagcatttatcctaacaaattggtattttttattaagcctccatgtggctctgaatgcaagctatatatagtgagtttttctaaattaagggaactctgcttttttttttttttttttaagtaactggtctgtaagtgcatatctctagaacgtccccgcagatgaatgagggccagtggccttggcagaggcaggtgtggcctcgtagaggcagtgctggccgcgccagggcatcagtgctgatgtgggagctgtgcttccacctaagccgttggtaggggactgtggcatttaagaatgtagagagcgcatcctttttgatctcctgggcggagtgaacctgcaggggccaccccagaaaccttggttctgatgcactgcaagcaagtaaccagcttctcactccagtttcaagtggctattatgtaatataaattcaaagcacattgtgaatagaacctacatgaaaacatacactttgttgcccactgacatgttaccagaagttgtaccatgatgttgttttgacccctgtgagctgatggccccggccctgctctgtgcacatttctgtccgtgttccccagcactctggttggagagagtccacatcttcagctccgtgtggacatctccctgtacctctgcatcagcacatggatttaagagttatgtaatcgtgagagaatggtgtttgtggtttttccccctctttggctggtggaggataaagttcctgctcttttacctccaagacgagggcctcattgattcacttccagaagtgctgcacttctgaagaacaaggatgcactaaagttagcaagtttataataaagttaaatataaattattttgttttaaaatgcctcaaatttttctttattctaagcagcaaacattaaaataagaatatttcctgctaaatgtaaccatacactttattccacaaaatgttatttaacaagactgagggttttttttaagaaaaaattatttccatccaatatttaaagacttgaattttatttaaacttgaaaatgactttgccttaacttttgtataagacagcttagagtccatggagcccggccctgggttggcgtgagtgggtcagagttactcagttactgcgtggatctcctgtcgctagttttactgagtaagcatactgtagtacaagagctagtagtagtttttgtaatataccttaaagatcttcaacagttgatcttttttcagaatgttggaaaatcctgtaaatgcaaatagtcaatactgtattaaatacgtgcacttggagtgtgcttcgcttgtacagttgtaaataatcagaacatatgaaaaaggtaccctacagagaaaattctgatacagattattgatatattataaatgttgctgttgagcgggatgtagataaactaaatgttgtggtttgaatattattttgatttgttgagattttcttttttctcttacatcggtgtgttgaactgattctgcctctttgctgcaaaagggaattggaaagtcttattaaaagcctccagatgttttcatactcttttaaaatgtatgtaaatgcatactaatcatatctaatgtgaaagagttttaaagtatatagagagcaaaaactggcaggatcgtaagtgaaggtgactagtaatctaattaaaatcacctgcagctaagcatgattgaccctgccagaggaaaacatgcctatttgaccatttcctttaaagcagttgccattattcaaatacagagaaatagccacagggctagtgtttttcaaatgcattttaaagaacatggggatttttttttgtagttgtcagttcactgaccaaaaaaaaaaaaaaaatcagaaataattgatctgtgaaacccaaactctcaatactcagaaagctgggaggcaacctcgaggcctgggcctacgagctgcatcttcgctacggaagggccagggcgccatcagccattcccaaaacacaaggcctgcccgtccgccagtgagtccttggtttttaataatgagaagtcctttcccccaaggtgtgagcattgcagcgcagtgtgtgtgtgtggttagagccagcttagtccttcactttgtcgaccgaagtgggagctcaacagctgcatgaggagggcagcgcgtgcattagccagtcgccactggagggctctgctgccctccggtcaatacactgtagttactgcctagccagcagcagtcttctgcatcaagaactgaaaccttgctcggaggtgatttttatagcatcctttttaattaaaggtgaaatacagattgctatataatgtctgaaaaaacctgatactacttcaagagtttctgctcagaagaaaatgagagttatcataataggaagctgtggcggtccatgccaactgtgctgtgtcacatacagcgatgagagtggctttcatactttttttttttttaagttaacaccctcctttacccccagcagtatctcaggttatagaatcagagatgcagcagtgacaaatggcattttaacttgtaaaatcgtgtgatgatgcttatcattttgaaatagaagaataaaaacctggtcccgtttcaccagacatgaatttcaagtggagtcgtcgttctctgagagtgagtgtcttgacattttcacccaggccctcctgtcatcacatcaccggctgtcactggcgggtggccgtaaacgtcctgcgttgctatattaggatctctgcagttcaggcttcaaaaccagttcagtgtatccgggcgacgggtagtggtggtgcatgcctgtctgtgtgccccgctggcgagctgtagttgcggcttgcgtgcctcgcggcccactacagggctgcagacaatcgaggcgagggcgctggccgccagcagctcacagcgcgggggtcatgtggtcgctcctcgagggtttcgtttttgttctgcttcattaagactggaatcaagcttacatgtaaactattggtaatttaagtttccttttgtgtcattcagtgtaaaactgtctaatttgaaaaaaaatgtaggttatgaaaataaagatttaggcactgtt

SEQ ID NO: 343138 - DNA, 6413 bp, Homo sapiens
aagcttgcggccgccgggccccggggttgaggcgaggagcccgcgggcggccggtcgggcggggcggcggcgctgacagcatcctgaggttagcattacacttctcccagtggagcccatgacttctgatcaggacgctaaggttgtggctgaaccgcagacgcagagagtccaggagggcaaggacagcgctcatctgatgaatggtcctatatctcaaaccacttctcagacaagttccatcccacctttgagtcaggtaccagcaactaaggtttcagagctgaaccctaatgcagaagtgtggggggctcctgtgttacatctggaagcaagcagtgctgctgacggtgtgagtgctgcatgggaggaggtggctggccaccacgcagaccgtggcccgcagggatcggatgccaatggtgatggtgaccagggccatgagaatgccgcattgccagacccgcaggagtcggacccagcagacatgaacgctctcgctctgggtccctcagaatatgactctctgcctgaaaatagcgagacaggaggaaatgagtctcaaccagacagccaggaagacccccgagaagtacttaaaaaaacattggaattctgcttatctagggagaaccttgctagtgacatgtatcttatatcacagatggatagtgaccagtatgtgccaatcacaacggtggctaacctcgaccacatcaagaagctcagcactgatgtggacttgattgtggaagtgctaagatctttacctttagtccaagtggatgaaaagggagaaaaagtaaggccaaatcaaaatcgctgcatagtaatattgcgtgaaatatctgaatctacccccgtggaagaagtagaagcactatttaaaggagataatttaccaaaatttataaactgtgaatttgcatataatgataattggtttattacatttgaaacagaagctgatgcacaacaggcttacaaataccttcgagaagaagtcaaaacttttcaaggaaaaccaattaaggcacggataaaagcaaaggcaatagctataaacacatttttgccaaagaatggatttagacccctggacgtgagcctgtatgcccagcagcgctacgcgacgtcgttctacttccctcccatgtacagcccccagcagcagttccccctgtacagcctgatcactccccagacgtggtcagcaacgcacagctatcttgacccacccttggtaactccatttccaaatactggatttataaatgggtttacgtctccagcgttcaagcctgcggcgtctcctctgacttctctcagacagtatcctcctcgaagcaggaatcctagtaaatctcatctgcggcatgcgattcctagtgcagagaggggacctgggttattagaaagtccttcaatatttaacttcactgcagatcgattaattaatggtgtccggagtccacaaacaaggcaagcaggtcaaactagaacacggattcaaaacccttcagcatatgccaagagagaggctgggcctgggcgtgtggagccaggcagtctcgaatcctctcctggtttagggaggggaaggaagaattcctttggctaccggaagaaaagggaggagaagtttacaagcagccagacacagtctccaacgccaccaaagcctccgtcgccaagcttcgagctggggctgtccagcttccctccattacctggagctgccggcaatttgaagacagaggacttgtttgaaaacaggctatctagcttgataataggaccatccaaagaaaggaccctcagtgcagacgcaagcgtgaacacccttcctgtagtggtctccagagagccctcggtgccggcttcttgtgctgtatcagcaacgtacgagcgatccccctccccagctcatttacccgatgatcccaaggtggcggagaaacagagggaaacccacagtgtggacagacttccttccgccctcactgcgaccgcgtgtaaatcggtgcaggtgaacggagccgccacggaattgcgaaagcccagctacgcagagatttgtcagagaacgagtaaagagcctccttcttccccattgcaaccccaaaaagaacaaaagccaaacactgttggttgtgggaaggaggaaaagaagctggcagagcccgcagagagataccgggagcccccagccctcaagtccacacctggagcccccagagaccagaggcggccggcggggggccggccctcgccctcggccatggggaagcgtctcagccgagagcagagcactccccccaagtctcctcagtgaaaaccgtacgtctgggaggggtcgcagagcgctgtgttaaccacaaacgagacactctcccactcagtgcgagggcgagccgctggttaggagcttgcagtgtctgaggcctgtgggatcctcaagttggttttcttctgtgagttggattctccccctcttgaaaaaaaatcgatttttcaggatttaattaatacaaaccttattttaggttggtgcttaactggaggtgatgcataagtctgatttttttttccaagatagaaaaagcatttatcctaacaaattggtattttttattaagcctccatgtggctctgaatgcaagctatatatagtgagtttttctaaattaagggaactctgcttttttttttttttttttaagtaactggtctgtaagtgcatatctctagaacgtccccgcagatgaatgagggccagtggccttggcagaggcaggtgtggcctcgtagaggcagtgctggccgcgccagggcatcagtgctgatgtgggagctgtgcttccacctaagccgttggtaggggactgtggcatttaagaatgtagagagcgcatcctttttgatctcctgggcggagtgaacctgcaggggccaccccagaaaccttggttctgatgcactgcaagcaagtaaccagcttctcactccagtttcaagtggctattatgtaatataaattcaaagcacattgtgaatagaacctacatgaaaacatacactttgttgcccactgacatgttaccagaagttgtaccatgatgttgttttgacccctgtgagctgatggccccggccctgctctgtgcacatttctgtccgtgttccccagcactctggttggagagagtccacatcttcagctccgtgtggacatctccctgtacctctgcatcagcacatggatttaagagttatgtaatcgtgagagaatggtgtttgtggtttttccccctctttggctggtggaggataaagttcctgctcttttacctccaagacgagggcctcattgattcacttccagaagtgctgcacttctgaagaacaaggatgcactaaagttagcaagtttataataaagttaaatataaattattttgttttaaaatgcctcaaatttttctttattctaagcagcaaacattaaaataagaatatttcctgctaaatgtaaccatacactttattccacaaaatgttatttaacaagactgagggttttttttaagaaaaaattatttccatccaatatttaaagacttgaattttatttaaacttgaaaatgactttgccttaacttttgtataagacagcttagagtccatggagcccggccctgggttggcgtgagtgggtcagagttactcagttactgcgtggatctcctgtcgctagttttactgagtaagcatactgtagtacaagagctagtagtagtttttgtaatataccttaaagatcttcaacagttgatcttttttcagaatgttggaaaatcctgtaaatgcaaatagtcaatactgtattaaatacgtgcacttggagtgtgcttcgcttgtacagttgtaaataatcagaacatatgaaaaaggtaccctacagagaaaattctgatacagattattgatatattataaatgttgctgttgagcgggatgtagataaactaaatgttgtggtttgaatattattttgatttgttgagattttcttttttctcttacatcggtgtgttgaactgattctgcctctttgctgcaaaagggaattggaaagtcttattaaaagcctccagatgttttcatactcttttaaaatgtatgtaaatgcatactaatcatatctaatgtgaaagagttttaaagtatatagagagcaaaaactggcaggatcgtaagtgaaggtgactagtaatctaattaaaatcacctgcagctaagcatgattgaccctgccagaggaaaacatgcctatttgaccatttcctttaaagcagttgccattattcaaatacagagaaatagccacagggctagtgtttttcaaatgcattttaaagaacatggggatttttttttgtagttgtcagttcactgaccaaaaaaaaaaaaaaaatcagaaataattgatctgtgaaacccaaactctcaatactcagaaagctgggaggcaacctcgaggcctgggcctacgagctgcatcttcgctacggaagggccagggcgccatcagccattcccaaaacacaaggcctgcccgtccgccagtgagtccttggtttttaataatgagaagtcctttcccccaaggtgtgagcattgcagcgcagtgtgtgtgtgtggttagagccagcttagtccttcactttgtcgaccgaagtgggagctcaacagctgcatgaggagggcagcgcgtgcattagccagtcgccactggagggctctgctgccctccggtcaatacactgtagttactgcctagccagcagcagtcttctgcatcaagaactgaaaccttgctcggaggtgatttttatagcatcctttttaattaaaggtgaaatacagattgctatataatgtctgaaaaaacctgatactacttcaagagtttctgctcagaagaaaatgagagttatcataataggaagctgtggcggtccatgccaactgtgctgtgtcacatacagcgatgagagtggctttcatactttttttttttttaagttaacaccctcctttacccccagcagtatctcaggttatagaatcagagatgcagcagtgacaaatggcattttaacttgtaaaatcgtgtgatgatgcttatcattttgaaatagaagaataaaaacctggtcccgtttcaccagacatgaatttcaagtggagtcgtcgttctctgagagtgagtgtcttgacattttcacccaggccctcctgtcatcacatcaccggctgtcactggcgggtggccgtaaacgtcctgcgttgctatattaggatctctgcagttcaggcttcaaaaccagttcagtgtatccgggcgacgggtagtggtggtgcatgcctgtctgtgtgccccgctggcgagctgtagttgcggcttgcgtgcctcgcggcccactacagggctgcagacaatcgaggcgagggcgctggccgccagcagctcacagcgcgggggtcatgtggtcgctcctcgagggtttcgtttttgttctgcttcattaagactggaatcaagcttacatgtaaactattggtaatttaagtttccttttgtgtcattcagtgtaaaactgtctaatttgaaaaaaaatgtaggttatgaaaataaagatttaggcactgttcaatttttcttttgattttttttaaattaaaatttcttcaataatgaaaattttctaaacatagttttttgtctgttcccataagtgcatgagaaagaaacacgggcctcatatatgattggatcctaaagccttctcacctacgtgggggctggctgtggcacacggggctcaccctttgtgttttagtggttcagagtgagcattaacatcagatgctcatgcggagacagccattactgtgactgccaagatgtactgcaaaaatacatgttcctgtatcaggactttgattttgttaaaatggcactctctccaaagctgtgtccatgaagctgtttggagctaacgttgggtcttcatggtgatggactcatccttaggcagcagtgatgtctgcactaggaagaggctggcgggaggcggggcccctcctgtgccaggcaccgagtggatgggggactgattaacatgttgctgccttcctcctctgtgcattgccttttcatgtcgtcttcccatttttactctttttctgatggaattaatattcttgatctgttaaggctattaatcctttgtcatatatgttacaaatattttctttcaatctaccatttgtcttaactctttatttagaatagtatcttttacggtgtttaattattgtgtagtaaaatctatcaatcttctcct

SEQ ID NO: 343139 - DNA, 5219 bp, Homo sapiens
aaccattgcccctgtttccgaattcgggccggggacccatccggtttcccccaaaaaaaaaaaaaaaaaaagttgtgcagttatcagcccagaacatgatatgatagttttcacattaatctagcttaatggtatcttgagagtaggggaagctgtaagttgtgtgactgcttttctctatggcattgtgattctgattctggaagccctgctgaaccctcatccttttgggaagagagatttactaggcatcatggtacgtttgtttaaggatagttccttaagagaatgcatttgttaaaaaaattttgggtgaggacaaaaactgacattgttgagaattaatttctaacatctctatttcctgtaggaagtagaagcactatttaaaggagataatttaccaaaatttataaactgtgaatttgcatataatgataattggtttattacatttgaaacagaagctgatgcacaacaggcttacaaataccttcgagaagaagtcaaaacttttcaaggaaaaccaattaaggcacggataaaagcaaaggcaatagctataaacacatttttgccaaagaatggatttagacccctggacgtgagcctgtatgcccagcagcgctacgcgacgtcgttctacttccctcccatgtacagcccccagcagcagttccccctgtacagcctgatcactccccagacgtggtcagcaacgcacagctatcttgacccacccttggtaactccatttccaaatactggatttataaatgggtttacgtctccagcgttcaagcctgcggcgtctcctctgacttctctcagacagtatcctcctcgaagcaggaatcctagtaaatctcatctgcggcatgcgattcctagtgcagagaggggacctgggttattagaaagtccttcaatatttaacttcactgcagatcgattaattaatggtgtccggagtccacaaacaaggcaagcaggtcaaactagaacacggattcaaaacccttcagcatatgccaagagagaggctgggcctgggcgtgtggagccaggcagtctcgaatcctctcctggtttagggaggggaaggaagaattcctttggctaccggaagaaaagggaggagaagtttacaagcagccagacacagtctccaacgccaccaaagcctccgtcgccaagcttcgagctggggctgtccagcttccctccattacctggagctgccggcaatttgaagacagaggacttgtttgaaaacaggctatctagcttgataataggaccatccaaagaaaggaccctcagtgcagacgcaagcgtgaacacccttcctgtagtggtctccagagagccctcggtgccggcttcttgtgctgtatcagcaacgtacgagcgatccccctccccagctcatttacccgatgatcccaaggtggcggagaaacagagggaaacccacagtgtggacagacttccttccgccctcactgcgaccgcgtgtaaatcggtgcaggtgaacggagccgccacggaattgcgaaagcccagctacgcagagatttgtcagagaacgagtaaagagcctccttcttccccattgcaaccccaaaaagaacaaaagccaaacactgttggttgtgggaaggaggaaaagaagctggcagagcccgcagagagataccgggagcccccagccctcaagtccacacctggagcccccagagaccagaggcggccggcggggggccggccctcgccctcggccatggggaagcgtctcagccgagagcagagcactccccccaagtctcctcagtgaaaaccgtacgtctgggaggggtcgcagagcgctgtgttaaccacaaacgagacactctcccactcagtgcgagggcgagccgctggttaggagcttgcagtgtctgaggcctgtgggatcctcaagttggttttcttctgtgagttggattctccccctcttgaaaaaaaatcgatttttcaggatttaattaatacaaaccttattttaggttggtgcttaactggaggtgatgcataagtctgatttttttttccaagatagaaaaagcatttatcctaacaaattggtattttttattaagcctccatgtggctctgaatgcaagctatatatagtgagtttttctaaattaagggaactctgcttttttttttttttttttaagtaactggtctgtaagtgcatatctctagaacgtccccgcagatgaatgagggccagtggccttggcagaggcaggtgtggcctcgtagaggcagtgctggccgcgccagggcatcagtgctgatgtgggagctgtgcttccacctaagccgttggtaggggactgtggcatttaagaatgtagagagcgcatcctttttgatctcctgggcggagtgaacctgcaggggccaccccagaaaccttggttctgatgcactgcaagcaagtaaccagcttctcactccagtttcaagtggctattatgtaatataaattcaaagcacattgtgaatagaacctacatgaaaacatacactttgttgcccactgacatgttaccagaagttgtaccatgatgttgttttgacccctgtgagctgatggccccggccctgctctgtgcacatttctgtccgtgttccccagcactctggttggagagagtccacatcttcagctccgtgtggacatctccctgtacctctgcatcagcacatggatttaagagttatgtaatcgtgagagaatggtgtttgtggtttttccccctctttggctggtggaggataaagttcctgctcttttacctccaagacgagggcctcattgattcacttccagaagtgctgcacttctgaagaacaaggatgcactaaagttagcaagtttataataaagttaaatataaattattttgttttaaaatgcctcaaatttttctttattctaagcagcaaacattaaaataagaatatttcctgctaaatgtaaccatacactttattccacaaaatgttatttaacaagactgagggttttttttaagaaaaaattatttccatccaatatttaaagacttgaattttatttaaacttgaaaatgactttgccttaacttttgtataagacagcttagagtccatggagcccggccctgggttggcgtgagtgggtcagagttactcagttactgcgtggatctcctgtcgctagttttactgagtaagcatactgtagtacaagagctagtagtagtttttgtaatataccttaaagatcttcaacagttgatcttttttcagaatgttggaaaatcctgtaaatgcaaatagtcaatactgtattaaatacgtgcacttggagtgtgcttcgcttgtacagttgtaaataatcagaacatatgaaaaaggtaccctacagagaaaattctgatacagattattgatatattataaatgttgctgttgagcgggatgtagataaactaaatgttgtggtttgaatattattttgatttgttgagattttcttttttctcttacatcggtgtgttgaactgattctgcctctttgctgcaaaagggaattggaaagtcttattaaaagcctccagatgttttcatactcttttaaaatgtatgtaaatgcatactaatcatatctaatgtgaaagagttttaaagtatatagagagcaaaaactggcaggatcgtaagtgaaggtgactagtaatctaattaaaatcacctgcagctaagcatgattgaccctgccagaggaaaacatgcctatttgaccatttcctttaaagcagttgccattattcaaatacagagaaatagccacagggctagtgtttttcaaatgcattttaaagaacatggggatttttttttgtagttgtcagttcactgaccaaaaaaaaaaaaaaaatcagaaataattgatctgtgaaacccaaactctcaatactcagaaagctgggaggcaacctcgaggcctgggcctacgagctgcatcttcgctacggaagggccagggcgccatcagccattcccaaaacacaaggcctgcccgtccgccagtgagtccttggtttttaataatgagaagtcctttcccccaaggtgtgagcattgcagcgcagtgtgtgtgtgtggttagagccagcttagtccttcactttgtcgaccgaagtgggagctcaacagctgcatgaggagggcagcgcgtgcattagccagtcgccactggagggctctgctgccctccggtcaatacactgtagttactgcctagccagcagcagtcttctgcatcaagaactgaaaccttgctcggaggtgatttttatagcatcctttttaattaaaggtgaaatacagattgctatataatgtctgaaaaaacctgatactacttcaagagtttctgctcagaagaaaatgagagttatcataataggaagctgtggcggtccatgccaactgtgctgtgtcacatacagcgatgagagtggctttcatactttttttttttttaagttaacaccctcctttacccccagcagtatctcaggttatagaatcagagatgcagcagtgacaaatggcattttaacttgtaaaatcgtgtgatgatgcttatcattttgaaatagaagaataaaaacctggtcccgtttcaccagacatgaatttcaagtggagtcgtcgttctctgagagtgagtgtcttgacattttcacccaggccctcctgtcatcacatcaccggctgtcactggcgggtggccgtaaacgtcctgcgttgctatattaggatctctgcagttcaggcttcaaaaccagttcagtgtatccgggcgacgggtagtggtggtgcatgcctgtctgtgtgccccgctggcgagctgtagttgcggcttgcgtgcctcgcggcccactacagggctgcagacaatcgaggcgagggcgctggccgccagcagctcacagcgcgggggtcatgtggtcgctcctcgagggtttcgtttttgttctgcttcattaagactggaatcaagcttacatgtaaactattggtaatttaagtttccttttgtgtcattcagtgtaaaactgtctaatttgaaaaaaaatgtaggttatgaaaataaagatttaggcactgtt

SEQ ID NO: 343140 - DNA, 4102 bp, Homo sapiens
ttaaagactgtttttggagtttgcctttcagggttgagtaccgtgtgagggtccattgcccaccgtgggcacctgggacacccttctgttgtcctgagctggcggagccagtgtgggcagcatccggactcttcctaggcttccgcattgcccaagcaggcatagggctgggtagggatggtgttgagtcagcactcttcttcgtcatgccttttctaattttatccattactacagtagcacagagggagtgttctgctgcaggggaaactaaatcattagattttatgaactttttaaaagttaaaaacactagtgaagatggaaacttagttacagttgaaaactcttttatcttaagtgaacttgatttcctgtcttgtccctagagacaccatttcacacaggtaacccaggattgtctgtttccaggaattgcgaaagcccagctacgcagagatttgtcagagaacgagtaaagagcctccttcttccccattgcaaccccaaaaagaacaaaagccaaacactgttggttgtgggaaggaggaaaagaagctggcagagcccgcagagagataccgggagcccccagccctcaagtccacacctggagcccccagagaccagaggcggccggcggggggccggccctcgccctcggccatggggaagcgtctcagccgagagcagagcactccccccaagtctcctcagtgaaaaccgtacgtctgggaggggtcgcagagcgctgtgttaaccacaaacgagacactctcccactcagtgcgagggcgagccgctggttaggagcttgcagtgtctgaggcctgtgggatcctcaagttggttttcttctgtgagttggattctccccctcttgaaaaaaaatcgatttttcaggatttaattaatacaaaccttattttaggttggtgcttaactggaggtgatgcataagtctgatttttttttccaagatagaaaaagcatttatcctaacaaattggtattttttattaagcctccatgtggctctgaatgcaagctatatatagtgagtttttctaaattaagggaactctgcttttttttttttttttttaagtaactggtctgtaagtgcatatctctagaacgtccccgcagatgaatgagggccagtggccttggcagaggcaggtgtggcctcgtagaggcagtgctggccgcgccagggcatcagtgctgatgtgggagctgtgcttccacctaagccgttggtaggggactgtggcatttaagaatgtagagagcgcatcctttttgatctcctgggcggagtgaacctgcaggggccaccccagaaaccttggttctgatgcactgcaagcaagtaaccagcttctcactccagtttcaagtggctattatgtaatataaattcaaagcacattgtgaatagaacctacatgaaaacatacactttgttgcccactgacatgttaccagaagttgtaccatgatgttgttttgacccctgtgagctgatggccccggccctgctctgtgcacatttctgtccgtgttccccagcactctggttggagagagtccacatcttcagctccgtgtggacatctccctgtacctctgcatcagcacatggatttaagagttatgtaatcgtgagagaatggtgtttgtggtttttccccctctttggctggtggaggataaagttcctgctcttttacctccaagacgagggcctcattgattcacttccagaagtgctgcacttctgaagaacaaggatgcactaaagttagcaagtttataataaagttaaatataaattattttgttttaaaatgcctcaaatttttctttattctaagcagcaaacattaaaataagaatatttcctgctaaatgtaaccatacactttattccacaaaatgttatttaacaagactgagggttttttttaagaaaaaattatttccatccaatatttaaagacttgaattttatttaaacttgaaaatgactttgccttaacttttgtataagacagcttagagtccatggagcccggccctgggttggcgtgagtgggtcagagttactcagttactgcgtggatctcctgtcgctagttttactgagtaagcatactgtagtacaagagctagtagtagtttttgtaatataccttaaagatcttcaacagttgatcttttttcagaatgttggaaaatcctgtaaatgcaaatagtcaatactgtattaaatacgtgcacttggagtgtgcttcgcttgtacagttgtaaataatcagaacatatgaaaaaggtaccctacagagaaaattctgatacagattattgatatattataaatgttgctgttgagcgggatgtagataaactaaatgttgtggtttgaatattattttgatttgttgagattttcttttttctcttacatcggtgtgttgaactgattctgcctctttgctgcaaaagggaattggaaagtcttattaaaagcctccagatgttttcatactcttttaaaatgtatgtaaatgcatactaatcatatctaatgtgaaagagttttaaagtatatagagagcaaaaactggcaggatcgtaagtgaaggtgactagtaatctaattaaaatcacctgcagctaagcatgattgaccctgccagaggaaaacatgcctatttgaccatttcctttaaagcagttgccattattcaaatacagagaaatagccacagggctagtgtttttcaaatgcattttaaagaacatggggatttttttttgtagttgtcagttcactgaccaaaaaaaaaaaaaaaatcagaaataattgatctgtgaaacccaaactctcaatactcagaaagctgggaggcaacctcgaggcctgggcctacgagctgcatcttcgctacggaagggccagggcgccatcagccattcccaaaacacaaggcctgcccgtccgccagtgagtccttggtttttaataatgagaagtcctttcccccaaggtgtgagcattgcagcgcagtgtgtgtgtgtggttagagccagcttagtccttcactttgtcgaccgaagtgggagctcaacagctgcatgaggagggcagcgcgtgcattagccagtcgccactggagggctctgctgccctccggtcaatacactgtagttactgcctagccagcagcagtcttctgcatcaagaactgaaaccttgctcggaggtgatttttatagcatcctttttaattaaaggtgaaatacagattgctatataatgtctgaaaaaacctgatactacttcaagagtttctgctcagaagaaaatgagagttatcataataggaagctgtggcggtccatgccaactgtgctgtgtcacatacagcgatgagagtggctttcatactttttttttttttaagttaacaccctcctttacccccagcagtatctcaggttatagaatcagagatgcagcagtgacaaatggcattttaacttgtaaaatcgtgtgatgatgcttatcattttgaaatagaagaataaaaacctggtcccgtttcaccagacatgaatttcaagtggagtcgtcgttctctgagagtgagtgtcttgacattttcacccaggccctcctgtcatcacatcaccggctgtcactggcgggtggccgtaaacgtcctgcgttgctatattaggatctctgcagttcaggcttcaaaaccagttcagtgtatccgggcgacgggtagtggtggtgcatgcctgtctgtgtgccccgctggcgagctgtagttgcggcttgcgtgcctcgcggcccactacagggctgcagacaatcgaggcgagggcgctggccgccagcagctcacagcgcgggggtcatgtggtcgctcctcgagggtttcgtttttgttctgcttcattaagactggaatcaagcttacatgtaaactattggtaatttaagtttccttttgtgtcattcagtgtaaaactgtctaatttgaaaaaaaatgtaggttatgaaaataaagatttaggcactgtt

SEQ ID NO: 343141 - DNA, 2878 bp, Homo sapiens
aagcttgcggccgccgggccccggggttgaggcgaggagcccgcgggcggccggtcgggcggggcggcggcgctgacagcatcctgaggttagcattacacttctcccagtggagcccatgacttctgatcagctgatgcactgcaagcaagtaaccagcttctcactccagtttcaagtggctattatgtaatataaattcaaagcacattgtgaatagaacctacatgaaaacatacactttgttgcccactgacatgttaccagaagttgtaccatgatgttgttttgacccctgtgagctgatggccccggccctgctctgtgcacatttctgtccgtgttccccagcactctggttggagagagtccacatcttcagctccgtgtggacatctccctgtacctctgcatcagcacatggatttaagagttatgtaatcgtgagagaatggtgtttgtggtttttccccctctttggctggtggaggataaagttcctgctcttttacctccaagacgagggcctcattgattcacttccagaagtgctgcacttctgaagaacaaggatgcactaaagttagcaagtttataataaagttaaatataaattattttgttttaaaatgcctcaaatttttctttattctaagcagcaaacattaaaataagaatatttcctgctaaatgtaaccatacactttattccacaaaatgttatttaacaagactgagggttttttttaagaaaaaattatttccatccaatatttaaagacttgaattttatttaaacttgaaaatgactttgccttaacttttgtataagacagcttagagtccatggagcccggccctgggttggcgtgagtgggtcagagttactcagttactgcgtggatctcctgtcgctagttttactgagtaagcatactgtagtacaagagctagtagtagtttttgtaatataccttaaagatcttcaacagttgatcttttttcagaatgttggaaaatcctgtaaatgcaaatagtcaatactgtattaaatacgtgcacttggagtgtgcttcgcttgtacagttgtaaataatcagaacatatgaaaaaggtaccctacagagaaaattctgatacagattattgatatattataaatgttgctgttgagcgggatgtagataaactaaatgttgtggtttgaatattattttgatttgttgagattttcttttttctcttacatcggtgtgttgaactgattctgcctctttgctgcaaaagggaattggaaagtcttattaaaagcctccagatgttttcatactcttttaaaatgtatgtaaatgcatactaatcatatctaatgtgaaagagttttaaagtatatagagagcaaaaactggcaggatcgtaagtgaaggtgactagtaatctaattaaaatcacctgcagctaagcatgattgaccctgccagaggaaaacatgcctatttgaccatttcctttaaagcagttgccattattcaaatacagagaaatagccacagggctagtgtttttcaaatgcattttaaagaacatggggatttttttttgtagttgtcagttcactgaccaaaaaaaaaaaaaaaatcagaaataattgatctgtgaaacccaaactctcaatactcagaaagctgggaggcaacctcgaggcctgggcctacgagctgcatcttcgctacggaagggccagggcgccatcagccattcccaaaacacaaggcctgcccgtccgccagtgagtccttggtttttaataatgagaagtcctttcccccaaggtgtgagcattgcagcgcagtgtgtgtgtgtggttagagccagcttagtccttcactttgtcgaccgaagtgggagctcaacagctgcatgaggagggcagcgcgtgcattagccagtcgccactggagggctctgctgccctccggtcaatacactgtagttactgcctagccagcagcagtcttctgcatcaagaactgaaaccttgctcggaggtgatttttatagcatcctttttaattaaaggtgaaatacagattgctatataatgtctgaaaaaacctgatactacttcaagagtttctgctcagaagaaaatgagagttatcataataggaagctgtggcggtccatgccaactgtgctgtgtcacatacagcgatgagagtggctttcatactttttttttttttaagttaacaccctcctttacccccagcagtatctcaggttatagaatcagagatgcagcagtgacaaatggcattttaacttgtaaaatcgtgtgatgatgcttatcattttgaaatagaagaataaaaacctggtcccgtttcaccagacatgaatttcaagtggagtcgtcgttctctgagagtgagtgtcttgacattttcacccaggccctcctgtcatcacatcaccggctgtcactggcgggtggccgtaaacgtcctgcgttgctatattaggatctctgcagttcaggcttcaaaaccagttcagtgtatccgggcgacgggtagtggtggtgcatgcctgtctgtgtgccccgctggcgagctgtagttgcggcttgcgtgcctcgcggcccactacagggctgcagacaatcgaggcgagggcgctggccgccagcagctcacagcgcgggggtcatgtggtcgctcctcgagggtttcgtttttgttctgcttcattaagactggaatcaagcttacatgtaaactattggtaatttaagtttccttttgtgtcattcagtgtaaaactgtctaatttgaaaaaaaatgtaggttatgaaaataaagatttaggcactgtt

SEQ ID NO: 343142 - DNA, 4052 bp, Homo sapiens
aagcttgcggccgccgggccccggggttgaggcgaggagcccgcgggcggccggtcgggcggggcggcggcgctgacagcatcctgaggttagcattacacttctcccagtggagcccatgacttctgatcaggacgctaaggttgtggctgaaccgcagacgcagagagtccaggagggcaaggacagcgctcatctgatgaatggtcctatatctcaaaccacttctcagacaagttccatcccacctttgagtcaggtaccagcaactaaggtttcagagctgaaccctaatgcagaagtgtggggggctcctgtgttacatctggaagcaagcagtgctgctgacggtgtgagtgctgcatgggaggaggtggctggccaccacgcagaccgtggcccgcagggatcggatgccaatggtgatggtgaccagggccatgagaatgccgcattgccagacccgcaggagtcggacccagcagacatgaacgctctcgctctgggtccctcagaatatgactctctgcctgaaaatagcgagacaggaggaaatgagtctcaaccagacagccaggaagacccccgagaagtacttaaaaaaacattggaattctgcttatctagggagaaccttgctagtgacatgtatcttatatcacagatggatagtgaccagtatgtgccaatcacaacggtggctaacctcgaccacatcaagaagctcagcactgatgtggacttgattgtggaagtgctaagatctttacctttagtccaagtggatgaaaagggagaaaaagtaaggccaaatcaaaatcgctgcatagtaatattgcgtgaaatatctgaatctacccccgtggaagaagtagaagcactatttaaaggagataatttaccaaaatttataaactgtgaatttgcatataatgataattggtttattacatttgaaacagaagctgatgcacaacaggcttacaaataccttcgagaagaagtcaaaacttttcaaggaaaaccaattaaggcacggataaaagcaaaggcaatagctataaacacatttttgccaaagaatggatttagacccctggacgtgagcctgtatgcccagcagcgctacgcgacgtcgttctacttccctcccatgtacagcccccagcagcagttccccctgtacagcctgatcactccccagacgtggtcagcaacgcacagctatcttgacccacccttggtaactccatttccaaatactggatttataaatgggtttacgtctccagcgttcaagcctgcggcgtctcctctgacttctctcagacagtatcctcctcgaagcaggaatcctagtaaatctcatctgcggcatgcgattcctagtgcagagaggggacctgggttattagaaagtccttcaatatttaacttcactgcagatcgattaattaatggtgtccggagtccacaaacaaggcaagcaggtcaaactagaacacggattcaaaacccttcagcatatgccaagagagaggctgggcctgggcgtgtggagccaggcagtctcgaatcctctcctggtttagggaggggaaggaagaattcctttggctaccggaagaaaagggaggagaagtttacaagcagccagacacagtctccaacgccaccaaagcctccgtcgccaagcttcgagctggggctgtccagcttccctccattacctggagctgccggcaatttgaagacagaggacttgtttgaaaacaggctatctagcttgataataggaccatccaaagaaaggaccctcagtgcagacgcaagcgtgaacacccttcctgtagtggtctccagagagccctcggtgccggcttcttgtgctgtatcagcaacgtacgagcgatccccctccccagctcatttacccgatgatcccaaggtggcggagaaacagagggaaacccacagtgtggacagacttccttccgccctcactgcgaccgcgtgtaaatcggtgcaggtgaacggagccgccacggaattgcgaaagcccagctacgcagagatttgtcagagaacgagtaaagagcctccttcttccccattgcaaccccaaaaagaacaaaagccaaacactgttggttgtgggaaggaggaaaagaagctggcagagcccgcagagagataccgggagcccccagccctcaagtccacacctggagcccccagagaccagaggcggccggcggggggccggccctcgccctcggccatggggaagcgtctcagccgagagcagagcactccccccaagtctcctcagtgaaaaccgtacgtctgggaggggtcgcagagcgctgtgttaaccacaaacgagacactctcccactcagtgcgagggcgagccgctggttaggagcttgcagtgtctgaggcctgtgggatcctcaagttggttttcttctgtgagttggattctccccctcttgaaaaaaaatcgatttttcaggatttaattaatacaaaccttattttaggttggtgcttaactggaggtgatgcataagtctgatttttttttccaagatagaaaaagcatttatcctaacaaattggtattttttattaagcctccatgtggctctgaatgcaagctatatatagtgagtttttctaaattaagggaactctgcttttttttttttttttttaagtaactggtctgtaagtgcatatctctagaacgtccccgcagatgaatgagggccagtggccttggcagaggcaggtgtggcctcgtagaggcagtgctggccgcgccagggcatcagtgctgatgtgggagctgtgcttccacctaagccgttggtaggggactgtggcatttaagaatgtagagagcgcatcctttttgatctcctgggcggagtgaacctgcaggggccaccccagaaaccttggttctgatgcactgcaagcaagtaaccagcttctcactccagtttcaagtggctattatgtaatataaattcaaagcacattgtgaatagaacctacatgaaaacatacactttgttgcccactgacatgttaccagaagttgtaccatgatgttgttttgacccctgtgagctgatggccccggccctgctctgtgcacatttctgtccgtgttccccagcactctggttggagagagtccacatcttcagctccgtgtggacatctccctgtacctctgcatcagcacatggatttaagagttatgtaatcgtgagagaatggtgtttgtggtttttccccctctttggctggtggaggataaagttcctgctcttttacctccaagacgagggcctcattgattcacttccagaagtgctgcacttctgaagaacaaggatgcactaaagttagcaagtttataataaagttaaatataaattattttgttttaaaatgcctcaaatttttctttattctaagcagcaaacattaaaataagaatatttcctgctaaatgtaaccatacactttattccacaaaatgttatttaacaagactgagggttttttttaagaaaaaattatttccatccaatatttaaagacttgaattttatttaaacttgaaaatgactttgccttaacttttgtataagacagcttagagtccatggagcccggccctgggttggcgtgagtgggtcagagttactcagttactgcgtggatctcctgtcgctagttttactgagtaagcatactgtagtacaagagctagtagtagtttttgtaatataccttaaagatcttcaacagttgatcttttttcagaatgttggaaaatcctgtaaatgcaaatagtcaatactgtattaaatacgtgcacttggagtgtgcttcgcttgtacagttgtaaataatcagaacatatgaaaaaggtaccctacagagaaaattctgatacagattattgatatattataaatgttgctgttgagcgggatgtagataaactaaatgttgtggtttgaatatta

SEQ ID NO: 343143 - DNA, 3466 bp, Homo sapiens
aagcttgcggccgccgggccccggggttgaggcgaggagcccgcgggcggccggtcgggcggggcggcggcgctgacagcatcctgaggttagcattacacttctcccagtggagcccatgacttctgatcaggacgctaaggttgtggctgaaccgcagacgcagagagtccaggagggcaaggacagcgctcatctgatgaatggtcctatatctcaaaccacttctcagacaagttccatcccacctttgagtcaggtaccagcaactaaggtttcagagctgaaccctaatgcagaagtgtggggggctcctgtgttacatctggaagcaagcagtgctgctgacggtgtgagtgctgcatgggaggaggtggctggccaccacgcagaccgtggcccgcagggatcggatgccaatggtgatggtgaccagggccatgagaatgccgcattgccagacccgcaggagtcggacccagcagacatgaacgctctcgctctgggtccctcagaatatgactctctgcctgaaaatagcgagacaggaggaaatgagtctcaaccagacagccaggaagacccccgagaagtacttaaaaaaacattggaattctgcttatctagggagaaccttgctagtgacatgtatcttatatcacagatggatagtgaccagtatgtgccaatcacaacggtggctaacctcgaccacatcaagaagctcagcactgatgtggacttgattgtggaagtgctaagatctttacctttagtccaagtggatgaaaagggagaaaaagtaaggccaaatcaaaatcgctgcatagtaatattgcgtgaaatatctgaatctacccccgtggaagaagtagaagcactatttaaaggagataatttaccaaaatttataaactgtgaatttgcatataatgataattggtttattacatttgaaacagaagctgatgcacaacaggcttacaaataccttcgagaagaagtcaaaacttttcaaggaaaaccaattaaggcacggataaaagcaaaggcaatagctataaacacatttttgccaaagaatggatttagacccctggacgtgagcctgtatgcccagcagcgctacgcgacgtcgttctacttccctcccatgtacagcccccagcagcagttccccctgtacagcctgatcactccccagacgtggtcagcaacgcacagctatcttgacccacccttggtaactccatttccaaatactggatttataaatgggtttacgtctccagcgttcaagcctgcggcgtctcctctgacttctctcagacagtatcctcctcgaagcaggaatcctagtaaatctcatctgcggcatgcgattcctagtgcagagaggggacctgggttattagaaagtccttcaatatttaacttcactgcagatcgattaattaatggtgtccggagtccacaaacaaggcaagcaggtcaaactagaacacggattcaaaacccttcagcatatgccaagagagaggctgggcctgggcgtgtggagccaggcagtctcgaatcctctcctggtttagggaggggaaggaagaattcctttggctaccggaagaaaagggaggagaagtttacaagcagccagacacagtctccaacgccaccaaagcctccgtcgccaagcttcgagctggggctgtccagcttccctccattacctggagctgccggcaatttgaagacagaggacttgtttgaaaacaggctatctagcttgataataggaccatccaaagaaaggaccctcagtgcagacgcaagcgtgaacacccttcctgtagtggtctccagagagccctcggtgccggcttcttgtgctgtatcagcaacgtacgagcgatccccctccccagctcatttacccgatgatcccaaggtggcggagaaacagagggaaacccacagtgtggacagacttccttccgccctcactgcgaccgcgtgtaaatcggtgcaggtgaacggagccgccacggaattgcgaaagcccagctacgcagagatttgtcagagaacgagtaaagagcctccttcttccccattgcaaccccaaaaagaacaaaagccaaacactgttggttgtgggaaggaggaaaagaagctggcagagcccgcagagagataccgggagcccccagccctcaagtccacacctggagcccccagagaccagaggcggccggcggggggccggccctcgccctcggccatggggaagcgtctcagccgagagcagagcactccccccaagtctcctcagtgaaaaccgtacgtctgggaggggtcgcagagcgctgtgttaaccacaaacgagacactctcccactcagtgcgagggcgagccgctggttaggagcttgcagtgtctgaggcctgtgggatcctcaagttggttttcttctgtgagttggattctccccctcttgaaaaaaaatcgatttttcaggatttaattaatacaaaccttattttaggttggtgcttaactggaggtgatgcataagtctgatttttttttccaagatagaaaaagcatttatcctaacaaattggtattttttattaagcctccatgtggctctgaatgcaagctatatatagtgagtttttctaaattaagggaactctgcttttttttttttttttttaagtaactggtctgtaagtgcatatctctagaacgtccccgcagatgaatgagggccagtggccttggcagaggcaggtgtggcctcgtagaggcagtgctggccgcgccagggcatcagtgctgatgtgggagctgtgcttccacctaagccgttggtaggggactgtggcatttaagaatgtagagagcgcatcctttttgatctcctgggcggagtgaacctgcaggggccaccccagaaaccttggttctgatgcactgcaagcaagtaaccagcttctcactccagtttcaagtggctattatgtaatataaattcaaagcacattgtgaatagaacctacatgaaaacatacactttgttgcccactgacatgttaccagaagttgtaccatgatgttgttttgacccctgtgagctgatggccccggccctgctctgtgcacatttctgtccgtgttccccagcactctggttggagagagtccacatcttcagctccgtgtggacatctccctgtacctctgcatcagcacatggatttaagagttatgtaatcgtgagagaatggtgtttgtggtttttccccctctttggctggtggaggataaagttcctgctcttttacctccaagacgagggcctcattgattcacttccagaagtgctgcacttctgaagaacaaggatgcactaaagttagcaagtttataataaagttaaatataaattattttgtttta

SEQ ID NO: 343144 - DNA, 2092 bp, Homo sapiens
aagcttgcggccgccgggccccggggttgaggcgaggagcccgcgggcggccggtcgggcggggcggcggcgctgacagcatcctgaggttagcattacacttctcccagtggagcccatgacttctgatcaggacgctaaggttgtggctgaaccgcagacgcagagagtccaggagggcaaggacagcgctcatctgatgaatggtcctatatctcaaaccacttctcagacaagttccatcccacctttgagtcaggtaccagcaactaaggtttcagagctgaaccctaatgcagaagtgtggggggctcctgtgttacatctggaagcaagcagtgctgctgacggtgtgagtgctgcatgggaggaggtggctggccaccacgcagaccgtggcccgcagggatcggatgccaatggtgatggtgaccagggccatgagaatgccgcattgccagacccgcaggagtcggacccagcagacatgaacgctctcgctctgggtccctcagaatatgactctctgcctgaaaatagcgagacaggaggaaatgagtctcaaccagacagccaggaagacccccgagaagtacttaaaaaaacattggaattctgcttatctagggagaaccttgctagtgacatgtatcttatatcacagatggatagtgaccagtatgtgccaatcacaacggtggctaacctcgaccacatcaagaagctcagcactgatgtggacttgattgtggaagtgctaagatctttacctttagtccaagtggatgaaaagggagaaaaagtaaggccaaatcaaaatcgctgcatagtaatattgcgtgaaatatctgaatctacccccgtggaagaagtagaagcactatttaaaggagataatttaccaaaatttataaactgtgaatttgcatataatgataattggtttattacatttgaaacagaagctgatgcacaacaggcttacaaataccttcgagaagaagtcaaaacttttcaaggaaaaccaattaaggcacggataaaagcaaaggcaatagctataaacacatttttgccaaagaatggatttagacccctggacgtgagcctgtatgcccagcagcgctacgcgacgtcgttctacttccctcccatgtacagcccccagcagcagttccccctgtacagcctgatcactccccagacgtggtcagcaacgcacagctatcttgacccacccttggtaactccatttccaaatactggatttataaatgggtttacgtctccagcgttcaagcctgcggcgtctcctctgacttctctcagacagtatcctcctcgaagcaggaatcctagtaaatctcatctgcggcatgcgattcctagtgcagagaggggacctgggttattagaaagtccttcaatatttaacttcactgcagatcgattaattaatggtgtccggagtccacaaacaaggcaagcaggtcaaactagaacacggattcaaaacccttcagcatatgccaagagagaggctgggcctgggcgtgtggagccaggcagtctcgaatcctctcctggtttagggaggggaaggaagaattcctttggctaccggaagaaaagggaggagaagtttacagtgagtacataaagcatatacctcttcacaagacatttaaatctaatttataccaaacctgagatttaattaaatggattaaggttaaggcacaagaatgagcatttcaaaagacttgtaacgtgaaatccactaagtaataactgacaccctggctggcctaggaggaagcaactgtagaggttttggaaatagcgatgtgctgcacaggactccacagtgcacaggcgtgttgtgctgtggcacaggcatggccaggaacttgctgtcgcatgcactgcagcctacacacgggtgtgcacgtgagctcttctgtgtggcagctgtaccggagagtctgaaatgactggagccattcatttcaatgagcagagtaagcatcttccacggagcaatttgtttgtcggtgtttttccttcaaaactttcgaatactctcccactg

SEQ ID NO: 343145 - DNA, 600 bp, Homo sapiens
aagcttgcggccgccgggccccggggttgaggcgaggagcccgcgggcggccggtcgggcggggcggcggcgctgacagcatcctgaggttagcattacacttctcccagtggagcccatgacttctgatcaggacgctaaggttgtggctgaaccgcagacgcagagagtccaggagggcaaggacagcgctcatctgatgaatggtcctatatctcaaaccacttctcagacaagttccatcccacctttgagtcaggtaccagcaactaaggtttcagagctgaaccctaatgcagaagtgtggggggctcctgtgttacatctggaagcaagcagtgctgctgacggtgtgagtgctgcatgggaggaggtggctggccaccacgcagaccgtggcccgcagggatcggatgccaatggtgatggtgaccagggccatgagaatgccgcattgccagacccgcaggagtcggacccagcagacatgaacgctctcgctctgggtccctcagaatatgactctctgcctgaaaatagcgagacaggaggaaatgagtctcaaccagacagtcaggagctggtcgaccggtaccggcc

SEQ ID NO: 343146 - DNA, 1349 bp, Homo sapiens
gttatgtgtattaagtctatcgtatctgtcatttctaggtctaatcttttgcattataggtcatattttctatttctttgcatgctttgtgatttttgaggagatgctcggagttttaaattttactttactgaatatttttgtattctaataaatattcttgagctttgttttgaaatgcagtgaagttacctggaaccaactttctaggtggaatcagagcagccttttctctagggctcattttccccactgcggaagcagtgcccttctgagcactgtccctgctatcctgtgtgtttaggagagttttccactgtggccggtgggaaaacaaaccattcctctcttggtgagccttccctgggcttgttccctctcatccctcaggcggttgtttcccaggctgaagatgtggggaaggccatctgcaggcttaccctgccggctctgcggcccaggcactgaaggccaactcccctgttcatgtccctctcagggatcacactcgtgttcacgctggggttcagggcctgaaactgttcttcatgtattttgtctttggttttttaattgagtcatctgggagagtaaatctagtccatcatggccagaagcaaaagtccaagcaaattttttttcttaaattgcctttaaaaaaaaaaaaaaaaaaaaagttgtgcagttatcagcccagaacatgatatgatagttttcacattaatctagcttaatggtatcttgagagtaggggaagctgtaagttgtgtgactgcttttctctatggcattgtgattctgattctggaagccctgctgaaccctcatccttttgggaagagagatttactaggcatcatggtacgtttgtttaaggatagttccttaagagaatgcatttgttaaaaaaattttgggtgaggacaaaaactgacattgttgagaattaatttctaacatctctatttcctgtaggaagtagaagcactatttaaaggagataatttaccaaaatttataaactgtgaatttgcatataatgataattggtttattacatttgaaacagaagctgatgcacaacaggtaagttctttccaccatcaccctatgaattgcatagtttaccagtttttactattagtgcatgttgggactaaacttgggcattgagattacttgtgatggtaagtttgaatataatctgcagaggaaatcaagttgtagaaacttaaatatttgagtgtatttgtatggacaatttttatagcaatataaaaagcatgtgattttactttctaaggacaacaagctaagcaacctaggaaaatcagttttgttcttctatc

SEQ ID NO: 343147 - DNA, 589 bp, Homo sapiens
gaaagtcctgagccccatcagtctgaaaaatgtagaggtagcttagtagaggaaactataagtagtagatgataacaaaaacaaaattgttatagctctagatactcaaatccatttattttttaaatcaaggatatgtagtgatttgtaaatagtttaataacattatagtcactatagtaggatgtatttaaagagttaggattttaatatacatttttttgactacttttgttcatttaaacattttatgtcaagcagtaatatttaaagttccaaagtggctttgagcaaagtagcttttcttagttttccccattgaatctacaaagaactttatctatgatgttcattcagaatttaaaaattttaagcctcctacattctgaatatcttatgaattcatgaatttgtcatgtgaaatgtgcatttcttggtgggtttagttttgcctaattactgtggtttgaaaatatgttgtttctttttaaacattgtactgatgttgtctttgttttcaattttacagatgaatggtcctatatctcaaaccacttctcagacaagttccatcccacctttgagtcag

SEQ ID NO: 343148 - DNA, 428 bp, Homo sapiens
tagtgccccaagtgggaaaggtgcagagtgctttgaaggaactagtgtgaacaaggctgaaggaagagaacgcggctgggaggtaggtggagagttttattttacagagcttgggaggtcccatataggttgattattttgccctttatcctaagaccagtgggaagcagttggaggattttatgtcatagaattgtcttttttaaatgattctgctttgcagagtcgtgtggaagcagggagtggtcacatgtgggtgttactgggcggcaaggtagggaatctctttcttcttgtgtacacctctcttcatagttgaaaaggccaagccccagtctaaatgagaccagccagcttccttaaaatccctttaatttgtattacatataatcgtgtatgtttaaaaaatattttatttttttgagaca

SEQ ID NO: 343149 - DNA, 466 bp, Homo sapiens
atcacttgcctggacttccacgttagtcccttgctgtcaactttgtgttgttctgcttacgcttcctgaagttgggattttagaattgaaagtcatctttgaaaggtttcaaagtgataaagactgaattgatgtgtactttgattatgtgagtgcaaacgtgctcaataataaattctccaagtgggaaaaaaataacagtctttcactttccactcctctaggaagaattcctttggctaccggaagaaaagggaggagaagtttacagtgagtacataaagcatatacctcttcacaagacatttaaatctaatttataccaaacctgagatttaattaaatggattaaggttaaggcacaagaatgagcatttcaaaagacttgtaacgtgaaatccactaagtaataactgacaccctggctggcctaggaggaagcaactgtagaggttttggaaatagc

SEQ ID NO: 343150 - DNA, 5717 bp, Homo sapiens
aagcttgcggccgccgggccccggggttgaggcgaggagcccgcgggcggccggtcgggcggggcggcggcgctgacagcatcctgaggttagcattacacttctcccagtggagcccatgacttctgatcaggacgctaaggttgtggctgaaccgcagacgcagagagtccaggagggcaaggacagcgctcatctgatgaatggtcctatatctcaaaccacttctcagacaagttccatcccacctttgagtcaggtaccagcaactaaggtttcagagctgaaccctaatgcagaagtgtggggggctcctgtgttacatctggaagcaagcagtgctgctgacggtgtgagtgctgcatgggaggaggtggctggccaccacgcagaccgtggcccgcagggatcggatgccaatggtgatggtgaccagggccatgagaatgccgcattgccagacccgcaggagtcggacccagcagacatgaacgctctcgctctgggtccctcagaatatgactctctgcctgaaaatagcgagacaggaggaaatgagtctcaaccagacagccaggaagacccccgagaagtacttaaaaaaacattggaattctgcttatctagggagaaccttgctagtgacatgtatcttatatcacagatggatagtgaccagtatgtgccaatcacaacggtggctaacctcgaccacatcaagaagctcagcactgatgtggacttgattgtggaagtgctaagatctttacctttagtccaagtggatgaaaagggagaaaaagtaaggccaaatcaaaatcgctgcatagtaatattgcgtgaaatatctgaatctacccccgtggaagaagtagaagcactatttaaaggagataatttaccaaaatttataaactgtgaatttgcatataatgataattggtttattacatttgaaacagaagctgatgcacaacaggcttacaaataccttcgagaagaagtcaaaacttttcaaggaaaaccaattaaggcacggataaaagcaaaggcaatagctataaacacatttttgccaaagaatggatttagacccctggacgtgagcctgtatgcccagcagcgctacgcgacgtcgttctacttccctcccatgtacagcccccagcagcagttccccctgtacagcctgatcactccccagacgtggtcagcaacgcacagctatcttgacccacccttggtaactccatttccaaatactggatttataaatgggtttacgtctccagcgttcaagcctgcggcgtctcctctgacttctctcagacagtatcctcctcgaagcaggaatcctagtaaatctcatctgcggcatgcgattcctagtgcagagaggggacctgggttattagaaagtccttcaatatttaacttcactgcagatcgattaattaatggtgtccggagtccacaaacaaggcaagcaggtcaaactagaacacggattcaaaacccttcagcatatgccaagagagaggctgggcctgggcgtgtggagccaggcagtctcgaatcctctcctggtttagggaggggaaggaagaattcctttggctaccggaagaaaagggaggagaagtttacaagcagccagacacagtctccaacgccaccaaagcctccgtcgccaagcttcgagctggggctgtccagcttccctccattacctggagctgccggcaatttgaagacagaggacttgtttgaaaacaggctatctagcttgataataggaccatccaaagaaaggaccctcagtgcagacgcaagcgtgaacacccttcctgtagtggtctccagagagccctcggtgccggcttcttgtgctgtatcagcaacgtacgagcgatccccctccccagctcatttacccgatgatcccaaggtggcggagaaacagagggaaacccacagtgtggacagacttccttccgccctcactgcgaccgcgtgtaaatcggtgcaggtgaacggagccgccacggaattgcgaaagcccagctacgcagagatttgtcagagaacgagtaaagagcctccttcttccccattgcaaccccaaaaagaacaaaagccaaacactgttggttgtgggaaggaggaaaagaagctggcagagcccgcagagagataccgggagcccccagccctcaagtccacacctggagcccccagagaccagaggcggccggcggggggccggccctcgccctcggccatggggaagcgtctcagccgagagcagagcactccccccaagtctcctcagtgaaaaccgtacgtctgggaggggtcgcagagcgctgtgttaaccacaaacgagacactctcccactcagtgcgagggcgagccgctggttaggagcttgcagtgtctgaggcctgtgggatcctcaagttggttttcttctgtgagttggattctccccctcttgaaaaaaaatcgatttttcaggatttaattaatacaaaccttattttaggttggtgcttaactggaggtgatgcataagtctgatttttttttccaagatagaaaaagcatttatcctaacaaattggtattttttattaagcctccatgtggctctgaatgcaagctatatatagtgagtttttctaaattaagggaactctgcttttttttttttttttttaagtaactggtctgtaagtgcatatctctagaacgtccccgcagatgaatgagggccagtggccttggcagaggcaggtgtggcctcgtagaggcagtgctggccgcgccagggcatcagtgctgatgtgggagctgtgcttccacctaagccgttggtaggggactgtggcatttaagaatgtagagagcgcatcctttttgatctcctgggcggagtgaacctgcaggggccaccccagaaaccttggttctgatgcactgcaagcaagtaaccagcttctcactccagtttcaagtggctattatgtaatataaattcaaagcacattgtgaatagaacctacatgaaaacatacactttgttgcccactgacatgttaccagaagttgtaccatgatgttgttttgacccctgtgagctgatggccccggccctgctctgtgcacatttctgtccgtgttccccagcactctggttggagagagtccacatcttcagctccgtgtggacatctccctgtacctctgcatcagcacatggatttaagagttatgtaatcgtgagagaatggtgtttgtggtttttccccctctttggctggtggaggataaagttcctgctcttttacctccaagacgagggcctcattgattcacttccagaagtgctgcacttctgaagaacaaggatgcactaaagttagcaagtttataataaagttaaatataaattattttgttttaaaatgcctcaaatttttctttattctaagcagcaaacattaaaataagaatatttcctgctaaatgtaaccatacactttattccacaaaatgttatttaacaagactgagggttttttttaagaaaaaattatttccatccaatatttaaagacttgaattttatttaaacttgaaaatgactttgccttaacttttgtataagacagcttagagtccatggagcccggccctgggttggcgtgagtgggtcagagttactcagttactgcgtggatctcctgtcgctagttttactgagtaagcatactgtagtacaagagctagtagtagtttttgtaatataccttaaagatcttcaacagttgatcttttttcagaatgttggaaaatcctgtaaatgcaaatagtcaatactgtattaaatacgtgcacttggagtgtgcttcgcttgtacagttgtaaataatcagaacatatgaaaaaggtaccctacagagaaaattctgatacagattattgatatattataaatgttgctgttgagcgggatgtagataaactaaatgttgtggtttgaatattattttgatttgttgagattttcttttttctcttacatcggtgtgttgaactgattctgcctctttgctgcaaaagggaattggaaagtcttattaaaagcctccagatgttttcatactcttttaaaatgtatgtaaatgcatactaatcatatctaatgtgaaagagttttaaagtatatagagagcaaaaactggcaggatcgtaagtgaaggtgactagtaatctaattaaaatcacctgcagctaagcatgattgaccctgccagaggaaaacatgcctatttgaccatttcctttaaagcagttgccattattcaaatacagagaaatagccacagggctagtgtttttcaaatgcattttaaagaacatggggatttttttttgtagttgtcagttcactgaccaaaaaaaaaaaaaaaatcagaaataattgatctgtgaaacccaaactctcaatactcagaaagctgggaggcaacctcgaggcctgggcctacgagctgcatcttcgctacggaagggccagggcgccatcagccattcccaaaacacaaggcctgcccgtccgccagtgagtccttggtttttaataatgagaagtcctttcccccaaggtgtgagcattgcagcgcagtgtgtgtgtgtggttagagccagcttagtccttcactttgtcgaccgaagtgggagctcaacagctgcatgaggagggcagcgcgtgcattagccagtcgccactggagggctctgctgccctccggtcaatacactgtagttactgcctagccagcagcagtcttctgcatcaagaactgaaaccttgctcggaggtgatttttatagcatcctttttaattaaaggtgaaatacagattgctatataatgtctgaaaaaacctgatactacttcaagagtttctgctcagaagaaaatgagagttatcataataggaagctgtggcggtccatgccaactgtgctgtgtcacatacagcgatgagagtggctttcatactttttttttttttaagttaacaccctcctttacccccagcagtatctcaggttatagaatcagagatgcagcagtgacaaatggcattttaacttgtaaaatcgtgtgatgatgcttatcattttgaaatagaagaataaaaacctggtcccgtttcaccagacatgaatttcaagtggagtcgtcgttctctgagagtgagtgtcttgacattttcacccaggccctcctgtcatcacatcaccggctgtcactggcgggtggccgtaaacgtcctgcgttgctatattaggatctctgcagttcaggcttcaaaaccagttcagtgtatccgggcgacgggtagtggtggtgcatgcctgtctgtgtgccccgctggcgagctgtagttgcggcttgcgtgcctcgcggcccactacagggctgcagacaatcgaggcgagggcgctggccgccagcagctcacagcgcgggggtcatgtggtcgctcctcgagggtttcgtttttgttctgcttcattaagactggaatcaagcttacatgtaaactattggtaatttaagtttccttttgtgtcattcagtgtaaaactgtctaatttgaaaaaaaatgtaggttatgaaaataaagatttaggcactgtt

SEQ ID NO: 343151 - DNA, 5768 bp, Homo sapiens
aagcttgcggccgccgggccccggggttgaggcgaggagcccgcgggcggccggtcgggcggggcggcggcgctgacagtcgtgtggaagcagggagtggtcacatgtgggtgttactgggcggcaagagcatcctgaggttagcattacacttctcccagtggagcccatgacttctgatcaggacgctaaggttgtggctgaaccgcagacgcagagagtccaggagggcaaggacagcgctcatctgatgaatggtcctatatctcaaaccacttctcagacaagttccatcccacctttgagtcaggtaccagcaactaaggtttcagagctgaaccctaatgcagaagtgtggggggctcctgtgttacatctggaagcaagcagtgctgctgacggtgtgagtgctgcatgggaggaggtggctggccaccacgcagaccgtggcccgcagggatcggatgccaatggtgatggtgaccagggccatgagaatgccgcattgccagacccgcaggagtcggacccagcagacatgaacgctctcgctctgggtccctcagaatatgactctctgcctgaaaatagcgagacaggaggaaatgagtctcaaccagacagccaggaagacccccgagaagtacttaaaaaaacattggaattctgcttatctagggagaaccttgctagtgacatgtatcttatatcacagatggatagtgaccagtatgtgccaatcacaacggtggctaacctcgaccacatcaagaagctcagcactgatgtggacttgattgtggaagtgctaagatctttacctttagtccaagtggatgaaaagggagaaaaagtaaggccaaatcaaaatcgctgcatagtaatattgcgtgaaatatctgaatctacccccgtggaagaagtagaagcactatttaaaggagataatttaccaaaatttataaactgtgaatttgcatataatgataattggtttattacatttgaaacagaagctgatgcacaacaggcttacaaataccttcgagaagaagtcaaaacttttcaaggaaaaccaattaaggcacggataaaagcaaaggcaatagctataaacacatttttgccaaagaatggatttagacccctggacgtgagcctgtatgcccagcagcgctacgcgacgtcgttctacttccctcccatgtacagcccccagcagcagttccccctgtacagcctgatcactccccagacgtggtcagcaacgcacagctatcttgacccacccttggtaactccatttccaaatactggatttataaatgggtttacgtctccagcgttcaagcctgcggcgtctcctctgacttctctcagacagtatcctcctcgaagcaggaatcctagtaaatctcatctgcggcatgcgattcctagtgcagagaggggacctgggttattagaaagtccttcaatatttaacttcactgcagatcgattaattaatggtgtccggagtccacaaacaaggcaagcaggtcaaactagaacacggattcaaaacccttcagcatatgccaagagagaggctgggcctgggcgtgtggagccaggcagtctcgaatcctctcctggtttagggaggggaaggaagaattcctttggctaccggaagaaaagggaggagaagtttacaagcagccagacacagtctccaacgccaccaaagcctccgtcgccaagcttcgagctggggctgtccagcttccctccattacctggagctgccggcaatttgaagacagaggacttgtttgaaaacaggctatctagcttgataataggaccatccaaagaaaggaccctcagtgcagacgcaagcgtgaacacccttcctgtagtggtctccagagagccctcggtgccggcttcttgtgctgtatcagcaacgtacgagcgatccccctccccagctcatttacccgatgatcccaaggtggcggagaaacagagggaaacccacagtgtggacagacttccttccgccctcactgcgaccgcgtgtaaatcggtgcaggtgaacggagccgccacggaattgcgaaagcccagctacgcagagatttgtcagagaacgagtaaagagcctccttcttccccattgcaaccccaaaaagaacaaaagccaaacactgttggttgtgggaaggaggaaaagaagctggcagagcccgcagagagataccgggagcccccagccctcaagtccacacctggagcccccagagaccagaggcggccggcggggggccggccctcgccctcggccatggggaagcgtctcagccgagagcagagcactccccccaagtctcctcagtgaaaaccgtacgtctgggaggggtcgcagagcgctgtgttaaccacaaacgagacactctcccactcagtgcgagggcgagccgctggttaggagcttgcagtgtctgaggcctgtgggatcctcaagttggttttcttctgtgagttggattctccccctcttgaaaaaaaatcgatttttcaggatttaattaatacaaaccttattttaggttggtgcttaactggaggtgatgcataagtctgatttttttttccaagatagaaaaagcatttatcctaacaaattggtattttttattaagcctccatgtggctctgaatgcaagctatatatagtgagtttttctaaattaagggaactctgcttttttttttttttttttaagtaactggtctgtaagtgcatatctctagaacgtccccgcagatgaatgagggccagtggccttggcagaggcaggtgtggcctcgtagaggcagtgctggccgcgccagggcatcagtgctgatgtgggagctgtgcttccacctaagccgttggtaggggactgtggcatttaagaatgtagagagcgcatcctttttgatctcctgggcggagtgaacctgcaggggccaccccagaaaccttggttctgatgcactgcaagcaagtaaccagcttctcactccagtttcaagtggctattatgtaatataaattcaaagcacattgtgaatagaacctacatgaaaacatacactttgttgcccactgacatgttaccagaagttgtaccatgatgttgttttgacccctgtgagctgatggccccggccctgctctgtgcacatttctgtccgtgttccccagcactctggttggagagagtccacatcttcagctccgtgtggacatctccctgtacctctgcatcagcacatggatttaagagttatgtaatcgtgagagaatggtgtttgtggtttttccccctctttggctggtggaggataaagttcctgctcttttacctccaagacgagggcctcattgattcacttccagaagtgctgcacttctgaagaacaaggatgcactaaagttagcaagtttataataaagttaaatataaattattttgttttaaaatgcctcaaatttttctttattctaagcagcaaacattaaaataagaatatttcctgctaaatgtaaccatacactttattccacaaaatgttatttaacaagactgagggttttttttaagaaaaaattatttccatccaatatttaaagacttgaattttatttaaacttgaaaatgactttgccttaacttttgtataagacagcttagagtccatggagcccggccctgggttggcgtgagtgggtcagagttactcagttactgcgtggatctcctgtcgctagttttactgagtaagcatactgtagtacaagagctagtagtagtttttgtaatataccttaaagatcttcaacagttgatcttttttcagaatgttggaaaatcctgtaaatgcaaatagtcaatactgtattaaatacgtgcacttggagtgtgcttcgcttgtacagttgtaaataatcagaacatatgaaaaaggtaccctacagagaaaattctgatacagattattgatatattataaatgttgctgttgagcgggatgtagataaactaaatgttgtggtttgaatattattttgatttgttgagattttcttttttctcttacatcggtgtgttgaactgattctgcctctttgctgcaaaagggaattggaaagtcttattaaaagcctccagatgttttcatactcttttaaaatgtatgtaaatgcatactaatcatatctaatgtgaaagagttttaaagtatatagagagcaaaaactggcaggatcgtaagtgaaggtgactagtaatctaattaaaatcacctgcagctaagcatgattgaccctgccagaggaaaacatgcctatttgaccatttcctttaaagcagttgccattattcaaatacagagaaatagccacagggctagtgtttttcaaatgcattttaaagaacatggggatttttttttgtagttgtcagttcactgaccaaaaaaaaaaaaaaaatcagaaataattgatctgtgaaacccaaactctcaatactcagaaagctgggaggcaacctcgaggcctgggcctacgagctgcatcttcgctacggaagggccagggcgccatcagccattcccaaaacacaaggcctgcccgtccgccagtgagtccttggtttttaataatgagaagtcctttcccccaaggtgtgagcattgcagcgcagtgtgtgtgtgtggttagagccagcttagtccttcactttgtcgaccgaagtgggagctcaacagctgcatgaggagggcagcgcgtgcattagccagtcgccactggagggctctgctgccctccggtcaatacactgtagttactgcctagccagcagcagtcttctgcatcaagaactgaaaccttgctcggaggtgatttttatagcatcctttttaattaaaggtgaaatacagattgctatataatgtctgaaaaaacctgatactacttcaagagtttctgctcagaagaaaatgagagttatcataataggaagctgtggcggtccatgccaactgtgctgtgtcacatacagcgatgagagtggctttcatactttttttttttttaagttaacaccctcctttacccccagcagtatctcaggttatagaatcagagatgcagcagtgacaaatggcattttaacttgtaaaatcgtgtgatgatgcttatcattttgaaatagaagaataaaaacctggtcccgtttcaccagacatgaatttcaagtggagtcgtcgttctctgagagtgagtgtcttgacattttcacccaggccctcctgtcatcacatcaccggctgtcactggcgggtggccgtaaacgtcctgcgttgctatattaggatctctgcagttcaggcttcaaaaccagttcagtgtatccgggcgacgggtagtggtggtgcatgcctgtctgtgtgccccgctggcgagctgtagttgcggcttgcgtgcctcgcggcccactacagggctgcagacaatcgaggcgagggcgctggccgccagcagctcacagcgcgggggtcatgtggtcgctcctcgagggtttcgtttttgttctgcttcattaagactggaatcaagcttacatgtaaactattggtaatttaagtttccttttgtgtcattcagtgtaaaactgtctaatttgaaaaaaaatgtaggttatgaaaataaagatttaggcactgtt

SEQ ID NO: 343152 - DNA, 5663 bp, Homo sapiens
aagcttgcggccgccgggccccggggttgaggcgaggagcccgcgggcggccggtcgggcggggcggcggcgctgacagcatcctgaggttagcattacacttctcccagtggagcccatgacttctgatcaggacgctaaggttgtggctgaaccgcagacgcagagagtccaggagggcaaggacagcgctcatctgatgaatggtcctatatctcaaaccacttctcagacaagttccatcccacctttgagtcaggtaccagcaactaaggtttcagagctgaaccctaatgcagaagtgtggggggctcctgtgttacatctggaagcaagcagtgctgctgacggtgtgagtgctgcatgggaggaggtggctggccaccacgcagaccgtggcccgcagggatcggatgccaatggtgatggtgaccagggccatgagaatgccgcattgccagacccgcaggagtcggacccagcagacatgaacgctctcgctctgggtccctcagaatatgactctctgcctgaaaatagcgagacaggaggaaatgagtctcaaccagacagccaggaagacccccgagaagtacttaaaaaaacattggaattctgcttatctagggagaaccttgctagtgacatgtatcttatatcacagatggatagtgaccagtatgtgccaatcacaacggtggctaacctcgaccacatcaagaagctcagcactgatgtggacttgattgtggaagtgctaagatctttacctttagtccaagtggatgaaaagggagaaaaagtaaggccaaatcaaaatcgctgcatagtaatattgcgtgaaatatctgaatctacccccgtggaagaagtagaagcactatttaaaggagataatttaccaaaatttataaactgtgaatttgcatataatgataattggtttattacatttgaaacagaagctgatgcacaacaggcttacaaataccttcgagaagaagtcaaaacttttcaaggaaaaccaattaaggcacggataaaagcaaaggcaatagctataaacacatttttgccaaagaatggatttagacccctggacgtgagcctgtatgcccagcagcgctacgcgacgtcgttctacttccctcccatgtacagcccccagcagcagttccccctgtacagcctgatcactccccagacgtggtcagcaacgcacagctatcttgacccacccttggtaactccatttccaaatactggatttataaatgggtttacgtctccagcgttcaagcctgcggcgtctcctctgacttctctcagacagtatcctcctcgaagcaggaatcctagtaaatctcatctgcggcatgcgattcctagtgcagagaggggacctgggttattagaaagtccttcaatatttaacttcactgcagatcgattaattaatggtgtccggagtccacaaacaaggcaagcaggtcaaactagaacacggattcaaaacccttcagcatatgccaagagagaggctgggcctgggcgtgtggagccaggcagtctcgaatcctctcctggtttagggaggggaaggaagaattcctttggctaccggaagaaaagggaggagaagtttacaagcagccagacacagtctccaacgccaccaaagcctccgtcgccaagcttcgagctggggctgtccagcttccctccattacctggagctgccggcaatttgaagacagaggacttgtttgaaaacaggctatctagcttgataataggaccatccaaagaaaggaccctcagtgcagacgcaagcgtgaacacccttcctgtagtggtctccagagagccctcggtgccggcttcttgtgctgtatcagcaacgtacgagcgatccccctccccagctcatttacccgatgatcccaaggtggcggagaaacagagggaaacccacagtgtggacagacttccttccgccctcactgcgaccgcgtgtaaatcggtgcaggtgaacggagccgccacggaattgcgaaagcccagctacgcagagatttgtcagagaacgagtaaagagcctccttcttccccattgcaaccccaaaaagaacaaaagccaaacactgttggttgtgggaaggaggaaaagaagctggcagagcccgcagagagataccgggagcccccagccctcaagtccacacctggagcccccagagaccagaggcggccggcggggggccggccctcgccctcggccatggggaagcgtctcagccgagagcagagcactccccccaagtctcctcagtgaaaaccgtacgtctgggaggggtcgcagagcgctgtgttaaccacaaacgagacactctcccactcagtgcgagggcgagccgctggttaggagcttgcagtgtctgaggcctgtgggatcctcaagttggttttcttctgtgagttggattctccccctcttgaaaaaaaatcgatttttcaggatttaattaatacaaaccttattttaggttggtgcttaactggaggtgatgcataagtctgatttttttttccaagatagagaatgcaagctatatatagtgagtttttctaaattaagggaactctgcttttttttttttttttttaagtaactggtctgtaagtgcatatctctagaacgtccccgcagatgaatgagggccagtggccttggcagaggcaggtgtggcctcgtagaggcagtgctggccgcgccagggcatcagtgctgatgtgggagctgtgcttccacctaagccgttggtaggggactgtggcatttaagaatgtagagagcgcatcctttttgatctcctgggcggagtgaacctgcaggggccaccccagaaaccttggttctgatgcactgcaagcaagtaaccagcttctcactccagtttcaagtggctattatgtaatataaattcaaagcacattgtgaatagaacctacatgaaaacatacactttgttgcccactgacatgttaccagaagttgtaccatgatgttgttttgacccctgtgagctgatggccccggccctgctctgtgcacatttctgtccgtgttccccagcactctggttggagagagtccacatcttcagctccgtgtggacatctccctgtacctctgcatcagcacatggatttaagagttatgtaatcgtgagagaatggtgtttgtggtttttccccctctttggctggtggaggataaagttcctgctcttttacctccaagacgagggcctcattgattcacttccagaagtgctgcacttctgaagaacaaggatgcactaaagttagcaagtttataataaagttaaatataaattattttgttttaaaatgcctcaaatttttctttattctaagcagcaaacattaaaataagaatatttcctgctaaatgtaaccatacactttattccacaaaatgttatttaacaagactgagggttttttttaagaaaaaattatttccatccaatatttaaagacttgaattttatttaaacttgaaaatgactttgccttaacttttgtataagacagcttagagtccatggagcccggccctgggttggcgtgagtgggtcagagttactcagttactgcgtggatctcctgtcgctagttttactgagtaagcatactgtagtacaagagctagtagtagtttttgtaatataccttaaagatcttcaacagttgatcttttttcagaatgttggaaaatcctgtaaatgcaaatagtcaatactgtattaaatacgtgcacttggagtgtgcttcgcttgtacagttgtaaataatcagaacatatgaaaaaggtaccctacagagaaaattctgatacagattattgatatattataaatgttgctgttgagcgggatgtagataaactaaatgttgtggtttgaatattattttgatttgttgagattttcttttttctcttacatcggtgtgttgaactgattctgcctctttgctgcaaaagggaattggaaagtcttattaaaagcctccagatgttttcatactcttttaaaatgtatgtaaatgcatactaatcatatctaatgtgaaagagttttaaagtatatagagagcaaaaactggcaggatcgtaagtgaaggtgactagtaatctaattaaaatcacctgcagctaagcatgattgaccctgccagaggaaaacatgcctatttgaccatttcctttaaagcagttgccattattcaaatacagagaaatagccacagggctagtgtttttcaaatgcattttaaagaacatggggatttttttttgtagttgtcagttcactgaccaaaaaaaaaaaaaaaatcagaaataattgatctgtgaaacccaaactctcaatactcagaaagctgggaggcaacctcgaggcctgggcctacgagctgcatcttcgctacggaagggccagggcgccatcagccattcccaaaacacaaggcctgcccgtccgccagtgagtccttggtttttaataatgagaagtcctttcccccaaggtgtgagcattgcagcgcagtgtgtgtgtgtggttagagccagcttagtccttcactttgtcgaccgaagtgggagctcaacagctgcatgaggagggcagcgcgtgcattagccagtcgccactggagggctctgctgccctccggtcaatacactgtagttactgcctagccagcagcagtcttctgcatcaagaactgaaaccttgctcggaggtgatttttatagcatcctttttaattaaaggtgaaatacagattgctatataatgtctgaaaaaacctgatactacttcaagagtttctgctcagaagaaaatgagagttatcataataggaagctgtggcggtccatgccaactgtgctgtgtcacatacagcgatgagagtggctttcatactttttttttttttaagttaacaccctcctttacccccagcagtatctcaggttatagaatcagagatgcagcagtgacaaatggcattttaacttgtaaaatcgtgtgatgatgcttatcattttgaaatagaagaataaaaacctggtcccgtttcaccagacatgaatttcaagtggagtcgtcgttctctgagagtgagtgtcttgacattttcacccaggccctcctgtcatcacatcaccggctgtcactggcgggtggccgtaaacgtcctgcgttgctatattaggatctctgcagttcaggcttcaaaaccagttcagtgtatccgggcgacgggtagtggtggtgcatgcctgtctgtgtgccccgctggcgagctgtagttgcggcttgcgtgcctcgcggcccactacagggctgcagacaatcgaggcgagggcgctggccgccagcagctcacagcgcgggggtcatgtggtcgctcctcgagggtttcgtttttgttctgcttcattaagactggaatcaagcttacatgtaaactattggtaatttaagtttccttttgtgtcattcagtgtaaaactgtctaatttgaaaaaaaatgtaggttatgaaaataaagatttaggcactgtt

SEQ ID NO: 343153 - DNA, 5663 bp, Homo sapiens
aagcttgcggccgccgggccccggggttgaggcgaggagcccgcgggcggccggtcgggcggggcggcggcgctgacagcatcctgaggttagcattacacttctcccagtggagcccatgacttctgatcaggacgctaaggttgtggctgaaccgcagacgcagagagtccaggagggcaaggacagcgctcatctgatgaatggtcctatatctcaaaccacttctcagacaagttccatcccacctttgagtcaggtaccagcaactaaggtttcagagctgaaccctaatgcagaagtgtggggggctcctgtgttacatctggaagcaagcagtgctgctgacggtgtgagtgctgcatgggaggaggtggctggccaccacgcagaccgtggcccgcagggatcggatgccaatggtgatggtgaccagggccatgagaatgccgcattgccagacccgcaggagtcggacccagcagacatgaacgctctcgctctgggtccctcagaatatgactctctgcctgaaaatagcgagacaggaggaaatgagtctcaaccagacagccaggaagacccccgagaagtacttaaaaaaacattggaattctgcttatctagggagaaccttgctagtgacatgtatcttatatcacagatggatagtgaccagtatgtgccaatcacaacggtggctaacctcgaccacatcaagaagctcagcactgatgtggacttgattgtggaagtgctaagatctttacctttagtccaagtggatgaaaagggagaaaaagtaaggccaaatcaaaatcgctgcatagtaatattgcgtgaaatatctgaatctacccccgtggaagaagtagaagcactatttaaaggagataatttaccaaaatttataaactgtgaatttgcatataatgataattggtttattacatttgaaacagaagctgatgcacaacaggcttacaaataccttcgagaagaagtcaaaacttttcaaggaaaaccaattaaggcacggataaaagcaaaggcaatagctataaacacatttttgccaaagaatggatttagacccctggacgtgagcctgtatgcccagcagcgctacgcgacgtcgttctacttccctcccatgtacagcccccagcagcagttccccctgtacagcctgatcactccccagacgtggtcagcaacgcacagctatcttgacccacccttggtaactccatttccaaatactggatttataaatgggtttacgtctccagcgttcaagcctgcggcgtctcctctgacttctctcagacagtatcctcctcgaagcaggaatcctagtaaatctcatctgcggcatgcgattcctagtgcagagaggggacctgggttattagaaagtccttcaatatttaacttcactgcagatcgattaattaatggtgtccggagtccacaaacaaggcaagcaggtcaaactagaacacggattcaaaacccttcagcatatgccaagagagaggctgggcctgggcgtgtggagccaggcagtctcgaatcctctcctggtttagggaggggaaggaagaattcctttggctaccggaagaaaagggaggagaagtttacaagcagccagacacagtctccaacgccaccaaagcctccgtcgccaagcttcgagctggggctgtccagcttccctccattacctggagctgccggcaatttgaagacagaggacttgtttgaaaacaggctatctagcttgataataggaccatccaaagaaaggaccctcagtgcagacgcaagcgtgaacacccttcctgtagtggtctccagagagccctcggtgccggcttcttgtgctgtatcagcaacgtacgagcgatccccctccccagctcatttacccgatgatcccaaggtggcggagaaacagagggaaacccacagtgtggacagacttccttccgccctcactgcgaccgcgtgtaaatcggtgcaggtgaacggagccgccacggaattgcgaaagcccagctacgcagagatttgtcagagaacgagtaaagagcctccttcttccccattgcaaccccaaaaagaacaaaagccaaacactgttggttgtgggaaggaggaaaagaagctggcagagcccgcagagagataccgggagcccccagccctcaagtccacacctggagcccccagagaccagaggcggccggcggggggccggccctcgccctcggccatggggaagcgtctcagccgagagcagagcactccccccaagtctcctcagtgaaaaccgtacgtctgggaggggtcgcagagcgctgtgttaaccacaaacgagacactctcccactcagtgcgagggcgagccgctggttaggagcttgcagtgtctgaggcctgtgggatcctcaagttggttttcttctgtgagttggattctccccctcttgaaaaaaaatcgatttttcaggatttaattaatacaaaccttattttaggttggtgcttaactggaggtgatgcataagtctgatttttttttccaagatagaaaaagcatttatcctaacaaattggtattttttattaagcctccatgtggctctgaatgcaagctatatatagtgagtttttctaaattaagggaactctgcttttttttttttttttttaagtaactggtctgtaagtgcatatctctagaacgtccccgcagatgaatgagggccagtggccttggcagaggcaggtgtggcctcgtagaggcagtgctggccgcgccagggcatcagtgctgatgtgggagctgtgcttccacctaagccgttggtaggggactgtggcatttaagaatgtagagagcgcatcctttttgatctcctgggcggagtgaacctgcaggggccaccccagaaaccttggttctgatgcactgcaagcaagtaaccagcttctcactccagtttcaagtggctattatgtaatataaattcaaagcacattgtgaatagaacctacatgaaaacatacactttgttgcccactgacatgttaccagaagttgtaccatgatgttgttttgacccctgtgagctgatggccccggccctgctctgtgcacatttctgtccgtgttccccagcactctggttggagagagtccacatcttcagctccgtgtggacatctccctgtacctctgcatcagcacatggatttaagagttatgtaatcgtgagagaatggtgtttgtggtttttccccctctttggctggtggaggataaagttcctgctcttttacctccaagacgagggcctcattgattcacttccagaagtgctgcacttctgaagaacaaggatgcactaaagttagcaagtttataataaagttaaatataaattattttgttttaaaatgcctcaaatttttctttattctaagcagcaaacattaaaataagaatatttcctgctaaatgtaaccatacactttattccacaaaatgttatttaacaagactgagggttttttttaagaaaaaattatttccatccaatatttaaagacttgaattttatttaaacttgaaaatgactttgccttaacttttgtataagacagcttagagtccatggagcccggccctgggttggcgtgagtgggtcagagttactcagttactgcgtggatctcctgtcgctagttttactgagtaagcatactgtagtacaagagctagtagtagtttttgtaatataccttaaagatcttcaacagttgatcttttttcagaatgttggaaaatcctgtaaatgcaaatagtcaatactgtattaaatacgtgcacttggagtgtgcttcgcttgtacagttgtaaataatcagaacatatgaaaaaggtaccctacagagaaaattctgatacagattattgatatattataaatgttgctgttgagcgggatgtagataaactaaatgttgtggtttgaatattattttgatttgttgagattttcttttttctcttacatcggtgtgttgaactgattctgcctctttgctgcaaaagggaattggaaagtcttattaaaagcctccagatgttttcatactcttttaaaatgtatgtaaatgcatactaatcatatctaatgtgaaagagttttaaagtatatagagagcaaaaactggcaggatcgtaagtgaaggtgactagtaatctaattaaaatcacctgcagctaagcatgattgaccctgccagaggaaaacatgcctatttgaccatttcctttaaagcagttgccattattcaaatacagagaaatagccacagggctagtgtttttcaaatgcattttaaagaacatggggatttttttttgtagttgtcagttcactgaccaaaaaaaaaaaaaaaatcagaaataattgatctgtgaaacccaaactctcaatactcagaaagctgggaggcaacctcgaggcctgggcctacgagctgcatcttcgctacggaagggccagggcgccatcagccattcccatcctttcccccaaggtgtgagcattgcagcgcagtgtgtgtgtgtggttagagccagcttagtccttcactttgtcgaccgaagtgggagctcaacagctgcatgaggagggcagcgcgtgcattagccagtcgccactggagggctctgctgccctccggtcaatacactgtagttactgcctagccagcagcagtcttctgcatcaagaactgaaaccttgctcggaggtgatttttatagcatcctttttaattaaaggtgaaatacagattgctatataatgtctgaaaaaacctgatactacttcaagagtttctgctcagaagaaaatgagagttatcataataggaagctgtggcggtccatgccaactgtgctgtgtcacatacagcgatgagagtggctttcatactttttttttttttaagttaacaccctcctttacccccagcagtatctcaggttatagaatcagagatgcagcagtgacaaatggcattttaacttgtaaaatcgtgtgatgatgcttatcattttgaaatagaagaataaaaacctggtcccgtttcaccagacatgaatttcaagtggagtcgtcgttctctgagagtgagtgtcttgacattttcacccaggccctcctgtcatcacatcaccggctgtcactggcgggtggccgtaaacgtcctgcgttgctatattaggatctctgcagttcaggcttcaaaaccagttcagtgtatccgggcgacgggtagtggtggtgcatgcctgtctgtgtgccccgctggcgagctgtagttgcggcttgcgtgcctcgcggcccactacagggctgcagacaatcgaggcgagggcgctggccgccagcagctcacagcgcgggggtcatgtggtcgctcctcgagggtttcgtttttgttctgcttcattaagactggaatcaagcttacatgtaaactattggtaatttaagtttccttttgtgtcattcagtgtaaaactgtctaatttgaaaaaaaatgtaggttatgaaaataaagatttaggcactgtt

SEQ ID NO: 343154 - DNA, 5824 bp, Homo sapiens
gttatgtgtattaagtctatcgtatctgtcatttctaggtctaatcttttgcattataggtcatattttctatttctttgcatgctttgtgatttttgaggagatgctcggagttttaaattttactttactgaatatttttgtattctaataaatattcttgagctttgttttgaaatgcagtgaagttacctggaaccaactttctaggtggaatcagagcagccttttctctagggctcattttccccactgcggaagcagtgcccttctgagcactgtccctgctatcctgtgtgtttaggagagttttccactgtggccggtgggaaaacaaaccattcctctcttggtgagccttccctgggcttgttccctctcatccctcaggcggttgtttcccaggctgaagatgtggggaaggccatctgcaggcttaccctgccggctctgcggcccaggcactgaaggccaactcccctgttcatgtccctctcagggatcacactcgtgttcacgctggggttcagggcctgaaactgttcttcatgtattttgtctttggttttttaattgagtcatctgggagagtaaatctagtccatcatggccagaagcaaaagtccaagcaaattttttttcttaaattgcctttaaaaaaaaaaaaaaaaaaaaagttgtgcagttatcagcccagaacatgatatgatagttttcacattaatctagcttaatggtatcttgagagtaggggaagctgtaagttgtgtgactgcttttctctatggcattgtgattctgattctggaagccctgctgaaccctcatccttttgggaagagagatttactaggcatcatggtacgtttgtttaaggatagttccttaagagaatgcatttgttaaaaaaattttgggtgaggacaaaaactgacattgttgagaattaatttctaacatctctatttcctgtaggaagtagaagcactatttaaaggagataatttaccaaaatttataaactgtgaatttgcatataatgataattggtttattacatttgaaacagaagctgatgcacaacaggcttacaaataccttcgagaagaagtcaaaacttttcaaggaaaaccaattaaggcacggataaaagcaaaggcaatagctataaacacatttttgccaaagaatggatttagacccctggacgtgagcctgtatgcccagcagcgctacgcgacgtcgttctacttccctcccatgtacagcccccagcagcagttccccctgtacagcctgatcactccccagacgtggtcagcaacgcacagctatcttgacccacccttggtaactccatttccaaatactggatttataaatgggtttacgtctccagcgttcaagcctgcggcgtctcctctgacttctctcagacagtatcctcctcgaagcaggaatcctagtaaatctcatctgcggcatgcgattcctagtgcagagaggggacctgggttattagaaagtccttcaatatttaacttcactgcagatcgattaattaatggtgtccggagtccacaaacaaggcaagcaggtcaaactagaacacggattcaaaacccttcagcatatgccaagagagaggctgggcctgggcgtgtggagccaggcagtctcgaatcctctcctggtttagggaggggaaggaagaattcctttggctaccggaagaaaagggaggagaagtttacaagcagccagacacagtctccaacgccaccaaagcctccgtcgccaagcttcgagctggggctgtccagcttccctccattacctggagctgccggcaatttgaagacagaggacttgtttgaaaacaggctatctagcttgataataggaccatccaaagaaaggaccctcagtgcagacgcaagcgtgaacacccttcctgtagtggtctccagagagccctcggtgccggcttcttgtgctgtatcagcaacgtacgagcgatccccctccccagctcatttacccgatgatcccaaggtggcggagaaacagagggaaacccacagtgtggacagacttccttccgccctcactgcgaccgcgtgtaaatcggtgcaggtgaacggagccgccacggaattgcgaaagcccagctacgcagagatttgtcagagaacgagtaaagagcctccttcttccccattgcaaccccaaaaagaacaaaagccaaacactgttggttgtgggaaggaggaaaagaagctggcagagcccgcagagagataccgggagcccccagccctcaagtccacacctggagcccccagagaccagaggcggccggcggggggccggccctcgccctcggccatggggaagcgtctcagccgagagcagagcactccccccaagtctcctcagtgaaaaccgtacgtctgggaggggtcgcagagcgctgtgttaaccacaaacgagacactctcccactcagtgcgagggcgagccgctggttaggagcttgcagtgtctgaggcctgtgggatcctcaagttggttttcttctgtgagttggattctccccctcttgaaaaaaaatcgatttttcaggatttaattaatacaaaccttattttaggttggtgcttaactggaggtgatgcataagtctgatttttttttccaagatagaaaaagcatttatcctaacaaattggtattttttattaagcctccatgtggctctgaatgcaagctatatatagtgagtttttctaaattaagggaactctgcttttttttttttttttttaagtaactggtctgtaagtgcatatctctagaacgtccccgcagatgaatgagggccagtggccttggcagaggcaggtgtggcctcgtagaggcagtgctggccgcgccagggcatcagtgctgatgtgggagctgtgcttccacctaagccgttggtaggggactgtggcatttaagaatgtagagagcgcatcctttttgatctcctgggcggagtgaacctgcaggggccaccccagaaaccttggttctgatgcactgcaagcaagtaaccagcttctcactccagtttcaagtggctattatgtaatataaattcaaagcacattgtgaatagaacctacatgaaaacatacactttgttgcccactgacatgttaccagaagttgtaccatgatgttgttttgacccctgtgagctgatggccccggccctgctctgtgcacatttctgtccgtgttccccagcactctggttggagagagtccacatcttcagctccgtgtggacatctccctgtacctctgcatcagcacatggatttaagagttatgtaatcgtgagagaatggtgtttgtggtttttccccctctttggctggtggaggataaagttcctgctcttttacctccaagacgagggcctcattgattcacttccagaagtgctgcacttctgaagaacaaggatgcactaaagttagcaagtttataataaagttaaatataaattattttgttttaaaatgcctcaaatttttctttattctaagcagcaaacattaaaataagaatatttcctgctaaatgtaaccatacactttattccacaaaatgttatttaacaagactgagggttttttttaagaaaaaattatttccatccaatatttaaagacttgaattttatttaaacttgaaaatgactttgccttaacttttgtataagacagcttagagtccatggagcccggccctgggttggcgtgagtgggtcagagttactcagttactgcgtggatctcctgtcgctagttttactgagtaagcatactgtagtacaagagctagtagtagtttttgtaatataccttaaagatcttcaacagttgatcttttttcagaatgttggaaaatcctgtaaatgcaaatagtcaatactgtattaaatacgtgcacttggagtgtgcttcgcttgtacagttgtaaataatcagaacatatgaaaaaggtaccctacagagaaaattctgatacagattattgatatattataaatgttgctgttgagcgggatgtagataaactaaatgttgtggtttgaatattattttgatttgttgagattttcttttttctcttacatcggtgtgttgaactgattctgcctctttgctgcaaaagggaattggaaagtcttattaaaagcctccagatgttttcatactcttttaaaatgtatgtaaatgcatactaatcatatctaatgtgaaagagttttaaagtatatagagagcaaaaactggcaggatcgtaagtgaaggtgactagtaatctaattaaaatcacctgcagctaagcatgattgaccctgccagaggaaaacatgcctatttgaccatttcctttaaagcagttgccattattcaaatacagagaaatagccacagggctagtgtttttcaaatgcattttaaagaacatggggatttttttttgtagttgtcagttcactgaccaaaaaaaaaaaaaaaatcagaaataattgatctgtgaaacccaaactctcaatactcagaaagctgggaggcaacctcgaggcctgggcctacgagctgcatcttcgctacggaagggccagggcgccatcagccattcccaaaacacaaggcctgcccgtccgccagtgagtccttggtttttaataatgagaagtcctttcccccaaggtgtgagcattgcagcgcagtgtgtgtgtgtggttagagccagcttagtccttcactttgtcgaccgaagtgggagctcaacagctgcatgaggagggcagcgcgtgcattagccagtcgccactggagggctctgctgccctccggtcaatacactgtagttactgcctagccagcagcagtcttctgcatcaagaactgaaaccttgctcggaggtgatttttatagcatcctttttaattaaaggtgaaatacagattgctatataatgtctgaaaaaacctgatactacttcaagagtttctgctcagaagaaaatgagagttatcataataggaagctgtggcggtccatgccaactgtgctgtgtcacatacagcgatgagagtggctttcatactttttttttttttaagttaacaccctcctttacccccagcagtatctcaggttatagaatcagagatgcagcagtgacaaatggcattttaacttgtaaaatcgtgtgatgatgcttatcattttgaaatagaagaataaaaacctggtcccgtttcaccagacatgaatttcaagtggagtcgtcgttctctgagagtgagtgtcttgacattttcacccaggccctcctgtcatcacatcaccggctgtcactggcgggtggccgtaaacgtcctgcgttgctatattaggatctctgcagttcaggcttcaaaaccagttcagtgtatccgggcgacgggtagtggtggtgcatgcctgtctgtgtgccccgctggcgagctgtagttgcggcttgcgtgcctcgcggcccactacagggctgcagacaatcgaggcgagggcgctggccgccagcagctcacagcgcgggggtcatgtggtcgctcctcgagggtttcgtttttgttctgcttcattaagactggaatcaagcttacatgtaaactattggtaatttaagtttccttttgtgtcattcagtgtaaaactgtctaatttgaaaaaaaatgtaggttatgaaaataaagatttaggcactgtt

SEQ ID NO: 343155 - DNA, 4074 bp, Homo sapiens
gggcagaggatagtcctgggctctgtgacatttttgctggagaagaccctcttcccctatgtccttgtgctgctctcccaaggctgttcacgggtggggtgaacgggcactggtaccagctccgcttagtgccggcaggactctgatgaacactcttgaccctgtttcagaccctcagtgcagacgcaagcgtgaacacccttcctgtagtggtctccagagagccctcggtgccggcttcttgtgctgtatcagcaacgtacgagcgatccccctccccagctcatttacccgatgatcccaaggtggcggagaaacagagggaaacccacagtgtggacagacttccttccgccctcactgcgaccgcgtgtaaatcggtgcaggtgaacggagccgccacggaattgcgaaagcccagctacgcagagatttgtcagagaacgagtaaagagcctccttcttccccattgcaaccccaaaaagaacaaaagccaaacactgttggttgtgggaaggaggaaaagaagctggcagagcccgcagagagataccgggagcccccagccctcaagtccacacctggagcccccagagaccagaggcggccggcggggggccggccctcgccctcggccatggggaagcgtctcagccgagagcagagcactccccccaagtctcctcagtgaaaaccgtacgtctgggaggggtcgcagagcgctgtgttaaccacaaacgagacactctcccactcagtgcgagggcgagccgctggttaggagcttgcagtgtctgaggcctgtgggatcctcaagttggttttcttctgtgagttggattctccccctcttgaaaaaaaatcgatttttcaggatttaattaatacaaaccttattttaggttggtgcttaactggaggtgatgcataagtctgatttttttttccaagatagaaaaagcatttatcctaacaaattggtattttttattaagcctccatgtggctctgaatgcaagctatatatagtgagtttttctaaattaagggaactctgcttttttttttttttttttaagtaactggtctgtaagtgcatatctctagaacgtccccgcagatgaatgagggccagtggccttggcagaggcaggtgtggcctcgtagaggcagtgctggccgcgccagggcatcagtgctgatgtgggagctgtgcttccacctaagccgttggtaggggactgtggcatttaagaatgtagagagcgcatcctttttgatctcctgggcggagtgaacctgcaggggccaccccagaaaccttggttctgatgcactgcaagcaagtaaccagcttctcactccagtttcaagtggctattatgtaatataaattcaaagcacattgtgaatagaacctacatgaaaacatacactttgttgcccactgacatgttaccagaagttgtaccatgatgttgttttgacccctgtgagctgatggccccggccctgctctgtgcacatttctgtccgtgttccccagcactctggttggagagagtccacatcttcagctccgtgtggacatctccctgtacctctgcatcagcacatggatttaagagttatgtaatcgtgagagaatggtgtttgtggtttttccccctctttggctggtggaggataaagttcctgctcttttacctccaagacgagggcctcattgattcacttccagaagtgctgcacttctgaagaacaaggatgcactaaagttagcaagtttataataaagttaaatataaattattttgttttaaaatgcctcaaatttttctttattctaagcagcaaacattaaaataagaatatttcctgctaaatgtaaccatacactttattccacaaaatgttatttaacaagactgagggttttttttaagaaaaaattatttccatccaatatttaaagacttgaattttatttaaacttgaaaatgactttgccttaacttttgtataagacagcttagagtccatggagcccggccctgggttggcgtgagtgggtcagagttactcagttactgcgtggatctcctgtcgctagttttactgagtaagcatactgtagtacaagagctagtagtagtttttgtaatataccttaaagatcttcaacagttgatcttttttcagaatgttggaaaatcctgtaaatgcaaatagtcaatactgtattaaatacgtgcacttggagtgtgcttcgcttgtacagttgtaaataatcagaacatatgaaaaaggtaccctacagagaaaattctgatacagattattgatatattataaatgttgctgttgagcgggatgtagataaactaaatgttgtggtttgaatattattttgatttgttgagattttcttttttctcttacatcggtgtgttgaactgattctgcctctttgctgcaaaagggaattggaaagtcttattaaaagcctccagatgttttcatactcttttaaaatgtatgtaaatgcatactaatcatatctaatgtgaaagagttttaaagtatatagagagcaaaaactggcaggatcgtaagtgaaggtgactagtaatctaattaaaatcacctgcagctaagcatgattgaccctgccagaggaaaacatgcctatttgaccatttcctttaaagcagttgccattattcaaatacagagaaatagccacagggctagtgtttttcaaatgcattttaaagaacatggggatttttttttgtagttgtcagttcactgaccaaaaaaaaaaaaaaaatcagaaataattgatctgtgaaacccaaactctcaatactcagaaagctgggaggcaacctcgaggcctgggcctacgagctgcatcttcgctacggaagggccagggcgccatcagccattcccaaaacacaaggcctgcccgtccgccagtgagtccttggtttttaataatgagaagtcctttcccccaaggtgtgagcattgcagcgcagtgtgtgtgtgtggttagagccagcttagtccttcactttgtcgaccgaagtgggagctcaacagctgcatgaggagggcagcgcgtgcattagccagtcgccactggagggctctgctgccctccggtcaatacactgtagttactgcctagccagcagcagtcttctgcatcaagaactgaaaccttgctcggaggtgatttttatagcatcctttttaattaaaggtgaaatacagattgctatataatgtctgaaaaaacctgatactacttcaagagtttctgctcagaagaaaatgagagttatcataataggaagctgtggcggtccatgccaactgtgctgtgtcacatacagcgatgagagtggctttcatactttttttttttttaagttaacaccctcctttacccccagcagtatctcaggttatagaatcagagatgcagcagtgacaaatggcattttaacttgtaaaatcgtgtgatgatgcttatcattttgaaatagaagaataaaaacctggtcccgtttcaccagacatgaatttcaagtggagtcgtcgttctctgagagtgagtgtcttgacattttcacccaggccctcctgtcatcacatcaccggctgtcactggcgggtggccgtaaacgtcctgcgttgctatattaggatctctgcagttcaggcttcaaaaccagttcagtgtatccgggcgacgggtagtggtggtgcatgcctgtctgtgtgccccgctggcgagctgtagttgcggcttgcgtgcctcgcggcccactacagggctgcagacaatcgaggcgagggcgctggccgccagcagctcacagcgcgggggtcatgtggtcgctcctcgagggtttcgtttttgttctgcttcattaagactggaatcaagcttacatgtaaactattggtaatttaagtttccttttgtgtcattcagtgtaaaactgtctaatttgaaaaaaaatgtaggttatgaaaataaagatttaggcactgtt

SEQ ID NO: 343156 - DNA, 5733 bp, Homo sapiens
aagcttgcggccgccgggccccggggttgaggcgaggagcccgcgggcggccggtcgggcggggcggcggcgctgacagcatcctgaggttagcattacacttctcccagtggagcccatgacttctgatcaggacgctaaggttgtggctgaaccgcagacgcagagagtccaggagggcaaggacagcgctcatctgatgaatggtcctatatctcaaaccacttctcagacaagttccatcccacctttgagtcaggtaccagcaactaaggtttcagagctgaaccctaatgcagaagtgtggggggctcctgtgttacatctggaagcaagcagtgctgctgacggtgtgagtgctgcatgggaggaggtggctggccaccacgcagaccgtggcccgcagggatcggatgccaatggtgatggtgaccagggccatgagaatgccgcattgccagacccgcaggagtcggacccagcagacatgaacgctctcgctctgggtccctcagaatatgactctctgcctgaaaatagcgagacaggaggaaatgagtctcaaccagacagccaggaagacccccgagaagtacttaaaaaaacattggaattctgcttatctagggagaaccttgctagtgacatgtatcttatatcacagatggatagtgaccagtatgtgccaatcacaacggtggctaacctcgaccacatcaagaagctcagcactgatgtggacttgattgtggaagtgctaagatctttacctttagtccaagtggatgaaaagggagaaaaagtaaggccaaatcaaaatcgctgcatagtaatattgcgtgaaatatctgaatctacccccgtggaagaagtagaagcactatttaaaggagataatttaccaaaatttataaactgtgaatttgcatataatgataattggtttattacatttgaaacagaagctgatgcacaacaggcttacaaataccttcgagaagaagtcaaaacttttcaaggaaaaccaattaaggcacggataaaagcaaaggcaatagctataaacacatttttgccaaagaatggatttagacccctggacgtgagcctgtatgcccagcagcgctacgcgacgtcgttctacttccctcccatgtacagcccccagcagcagttccccctgtacagcctgatcactccccagacgtggtcagcaacgcacagctatcttgacccacccttggtaactccatttccaaatactggatttataaatgggtttacgtctccagcgttcaagcctgcggcgtctcctctgacttctctcagacagtatcctcctcgaagcaggaatcctagtaaatctcatctgcggcatgcgattcctagtgcagagaggggacctgggttattagaaagtccttcaatatttaacttcactgcagatcgattaattaatggtgtccggagtccacaaacaaggcaagcaggtcaaactagaacacggattcaaaacccttcagcatatgccaagagagaggctgggcctgggcgtgtggagccaggcagtctcgaatcctctcctggtttagggaggggaaggaagaattcctttggctaccggaagaaaagggaggagaagtttacaagcagccagacacagtctccaacgccaccaaagcctccgtcgccaagcttcgagctggggctgtccagcttccctccattacctggagctgccggcaatttgaagacagaggacttgtttgaaaacaggctatctagcttgataataggaccatccaaagaaaggaccctcagtgcagacgcaagcgtgaacacccttcctgtagtggtctccagagagccctcggtgccggcttcttgtgctgtatcagcaacgtacgagcgatccccctccccagctcatttacccgatgatcccaaggtggcggagaaacagagggaaacccacagtgtggacagacttccttccgccctcactgcgaccgcgtgtaaatcggtgcaggtgaacggagccgccacggaattgcgaaagcccagctacgcagagatttgtcagagaacgagtaaagagcctccttcttccccattgcaaccccaaaaagaacaaaagccaaacactgttggttgtgggaaggaggaaaagaagctggcagagcccgcagagagataccgggagcccccagccctcaagtccacacctggagcccccagagaccagaggcggccggcggggggccggccctcgccctcggccatggggaagcgtctcagccgagagcagagcactccccccaagtctcctcagtgaaaaccgtacgtctgggaggggtcgcagagcgctgtgttaaccacaaacgagacactctcccactcagtgcgagggcgagccgctggttaggagcttgcagtgtctgaggcctgtgggatcctcaagttggttttcttctgtgagttggattctccccctcttgaaaaaaaatcgatttttcaggatttaattaatacaaaccttattttaggttggtgcttaactggaggtgatgcataagtctgatttttttttccaagatagaaaaagcatttatcctaacaaattggtattttttattaagcctccatgtggctctgaatgcaagctatatatagtgagtttttctaaattaagggaactctgcttttttttttttttttttaagtaactggtctgtaagtgcatatctctagaacgtccccgcagatgaatgagggccagtggccttggcagaggcaggtgtggcctcgtagaggcagtgctggccgcgccagggcatcagtgctgatgtgggagctgtgcttccacctaagccgttggtaggggactgtggcatttaagaatgtagagagcgcatcctttttgatctcctgggcggagtgaacctgcaggggccaccccagaaaccttggttctgatgcactgcaagcaagtaaccagcttctcactccagtttcaagtggctattatgtaatataaattcaaagcacattgtgaatagaacctacatgaaaacatacactttgttgcccactgacatgttaccagaagttgtaccatgatgttgttttgacccctgtgagctgatggccccggccctgctctgtgcacatttctgtccgtgttccccagcactctggttggagagagtccacatcttcagctccgtgtggacatctccctgtacctctgcatcagcacatggatttaagagttatgtaatcgtgagagaatggtgtttgtggtttttccccctctttggctggtggaggataaagttcctgctcttttacctccaagacgagggcctcattgattcacttccagaagtgctgcacttctgaagaacaaggatgcactaaagttagcaagtttataataaagttaaatataaattattttgttttaaaatgcctcaaatttttctttattctaagcagcaaacattaaaataagaatatttcctgctaaatgtaaccatacactttattccacaaaatgttatttaacaagactgagggttttttttaagaaaaaattatttccatccaatatttaaagacttgaattttatttaaacttgaaaatgactttgccttaacttttgtataagacagcttagagtccatggagcccggccctgggttggcgtgagtgggtcagagttactcagttactgcgtggatctcctgtcgctagttttactgagtaagcatactgtagtacaagagctagtagtagtttttgtaatataccttaaagatcttcaacagttgatcttttttcagaatgttggaaaatcctgtaaatgcaaatagtcaatactgtattaaatacgtgcacttggagtgtgcttcgcttgtacagttgtaaataatcagaacatatgaaaaaggtaccctacagagaaaattctgatacagattattgatatattataaatgttgctgttgagcgggatgtagataaactaaatgttgtggtttgaatattattttgatttgttgagattttcttttttctcttacatcggtgtgttgaactgattctgcctctttgctgcaaaagggaattggaaagtcttattaaaagcctccagatgttttcatactcttttaaaatgtatgtaaatgcatactaatcatatctaatgtgaaagagttttaaagtatatagagagcaaaaactggcaggatcgtaagtgaaggtgactagtaatctaattaaaatcacctgcagctaagcatgattgaccctgccagaggaaaacatgcctatttgaccatttcctttaaagcagttgccattattcaaatacagagaaatagccacagggctagtgtttttcaaatgcattttaaagaacatggggatttttttttgtagttgtcagttcactgaccaaaaaaaaaaaaaaaatcagaaataattgatctgtgaaacccaaactctcaatactcagaaagctgggaggcaacctcgaggcctgggcctacgagctgcatcttcgctacggaagggccagggcgccatcagccattcccaaaacacaaggcctgcccgtccgccagtgagtccttggtttttaataatgagaagtcctttcccccaaggtgtgagcattgcagcgcagtgtgtgtgtgtggttagagccattcagtgtatccgggcgacgggtagtggtggtgcatgcctgtctgtgtgccccgctggcgagctgtagttgcggcttgcgtgcctcgcggcccactacagggctgcagacaatcgaggcgagggcgctggccgccagcagctcacagcgcgggggtcatgtggtcgctcctcgagggtttcgtttttgttctgcttcattaagactggaatcaagcttacatgtaaactattggtaatttaagtttccttttgtgtcattcagtgtaaaactgtctaatttgaaaaaaaatgtaggttatgaaaataaagatttaggcactgttcaatttttcttttgattttttttaaattaaaatttcttcaataatgaaaattttctaaacatagttttttgtctgttcccataagtgcatgagaaagaaacacgggcctcatatatgattggatcctaaagccttctcacctacgtgggggctggctgtggcacacggggctcaccctttgtgttttagtggttcagagtgagcattaacatcagatgctcatgcggagacagccattactgtgactgccaagatgtactgcaaaaatacatgttcctgtatcaggactttgattttgttaaaatggcactctctccaaagctgtgtccatgaagctgtttggagctaacgttgggtcttcatggtgatggactcatccttaggcagcagtgatgtctgcactaggaagaggctggcgggaggcggggcccctcctgtgccaggcaccgagtggatgggggactgattaacatgttgctgccttcctcctctgtgcattgccttttcatgtcgtcttcccatttttactctttttctgatggaattaatattcttgatctgttaaggctattaatcctttgtcatatatgttacaaatattttctttcaatctaccatttgtcttaactctttatttagaatagtatcttttacggtgtttaattattgtgtagtaaaatctatcaatcttctcct

SEQ ID NO: 343157 - DNA, 2347 bp, Homo sapiens
aagcttgcggccgccgggccccggggttgaggcgaggagcccgcgggcggccggtcgggcggggcggcggcgctgacagcatcctgaggttagcattacacttctcccagtggagcccatgacttctgatcaggacgctaaggttgtggctgaaccgcagacgcagagagtccaggagggcaaggacagcgctcatctgatgaatggtcctatatctcaaaccacttctcagacaagttccatcccacctttgagtcaggtaccagcaactaaggtttcagagctgaaccctaatgcagaagtgtggggggctcctgtgttacatctggaagcaagcagtgctgctgacggtgtgagtgctgcatgggaggaggtggctggccaccacgcagaccgtggcccgcagggatcggatgccaatggtgatggtgaccagggccatgagaatgccgcattgccagacccgcaggagtcggacccagcagacatgaacgctctcgctctgggtccctcagaatatgactctctgcctgaaaatagcgagacaggaggaaatgagtctcaaccagacagccaggaagacccccgagaagtacttaaaaaaacattggaattctgcttatctagggagaaccttgctagtgacatgtatcttatatcacagatggatagtgaccagtatgtgccaatcacaacggtggctaacctcgaccacatcaagaagctcagcactgatgtggacttgattgtggaagtgctaagatctttacctttagtccaagtggatgaaaagggagaaaaagtaaggccaaatcaaaatcgctgcatagtaatattgcgtgaaatatctgaatctacccccgtggaagaagtagaagcactatttaaaggagataatttaccaaaatttataaactgtgaatttgcatataatgataattggtttattacatttgaaacagaagctgatgcacaacaggcttacaaataccttcgagaagaagtcaaaacttttcaaggaaaaccaattaaggcacggataaaagcaaaggcaatagctataaacacatttttgccaaagaatggatttagacccctggacgtgagcctgtatgcccagcagcgctacgcgacgtcgttctacttccctcccatgtacagcccccagcagcagttccccctgtacagcctgatcactccccagacgtggtcagcaacgcacagctatcttgacccacccttggtaactccatttccaaatactggatttataaatgggtttacgtctccagcgttcaagcctgcggcgtctcctctgacttctctcagacagtatcctcctcgaagcaggaatcctagtaaatctcatctgcggcatgcgattcctagtgcagagaggggacctgggttattagaaagtccttcaatatttaacttcactgcagatcgattaattaatggtgtccggagtccacaaacaaggcaagcaggtcaaactagaacacggattcaaaacccttcagcatatgccaagagagaggctgggcctgggcgtgtggagccaggcagtctcgaatcctctcctggtttagggaggggaaggaagaattcctttggctaccggaagaaaagggaggagaagtttacaagcagccagacacagtctccaacgccaccaaagcctccgtcgccaagcttcgagctggggctgtccagcttccctccattacctggagctgccggcaatttgaagacagaggacttgtttgaaaacaggctatctagcttgataataggaccatccaaagaaaggaccctcagtgcagacgcaagcgtgaacacccttcctgtagtggtctccagagagccctcggtgccggcttcttgtgctgtatcagcaacgtacgagcgatccccctccccagctcatttacccgatgatcccaaggtggcggagaaacagagggaaacccacagtgtggacagacttccttccgccctcactgcgaccgcgtgtaaatcggtgcaggtgaacggagccgccacggtacgtacctcgtgcctgccttcctgcacgacagccgcgaggctctggtgtgaacagacgctgcgcactcctgcacctgctcgttttttaatcacatctaatttggtgggtttttatttgcgtctgtctgtgttgtgttttctgtacaaaatacctttaatatttgctaataattttccactaactactctagttctttctcagaccaccatgtagtccttttatttcagtgttggtcaatagaggtttcttgagtagtaacaagaccccagctcctgtttctccatagactttaggatc

SEQ ID NO: 343158 - DNA, 949 bp, Homo sapiens
aagcttgcggccgccgggccccggggttgaggcgaggagcccgcgggcggccggtcgggcggggcggcggcgctgacagcatcctgaggttagcattacacttctcccagtggagcccatgacttctgatcaggacgctaaggttgtggctgaaccgcagacgcagagagtccaggagggcaaggacagcgctcatctgatgaatggtcctatatctcaaaccacttctcagacaagttccatcccacctttgagtcaggtaccagcaactaaggtttcagagctgaaccctaatgcagaagtgtggggggctcctgtgttacatctggaagcaagcagtgctgctgacggtgtgagtgctgcatgggaggaggtggctggccaccacgcagaccgtggcccgcagggatcggatgccaatggtgatggtgaccagggccatgagaatgccgcattgccagacccgcaggagtcggacccagcagacatgaacgctctcgctctgggtccctcagaatatgactctctgcctgaaaatagcgagacaggaggaaatgagtctcaaccagacagccaggaagacccccgagaagtacttaaaaaaacattggaattctgcttatctaggtaaggctggtggtggtttttctagtacctgatatttctagtattgtgcaaatagttaaagtatatacaaatgtgatattttatgaaggagtatctactcatatccatatatatgtatatgaagacgtggaatattgagtaatgacagtcttttgacatttgagcatggaacgtaaccttcatgtctgtggtccccagtggtctcggtggtcactgtctggaatgcgtctaaagtgccccgcccgccctgtgctgccgagtcagacttcctcacactgaagttggagaacaagtgtgccacgttgtttctgaaagcacacca

SEQ ID NO: 343159 - DNA, 161 bp, Homo sapiens
gccacgtgaatgcggggaggccatgttttggaagcccgagggaggatccacactttgtccctgcacatggcccagcctcagacgctagacaaaatgaggggcagagaatggccccttctgcagacgcagtgcatctggcccagcccacaacgagcctctcc

SEQ ID NO: 343160 - DNA, 933 bp, Homo sapiens
atgggagacaatataacatccatcagagagttcctcctactgggatttcccgttggcccaaggattcagatgctcctctttgggctcttctccctgttctacgtcttcaccctgctggggaacgggaccatactggggctcatctcactggactccagactgcacgcccccatgtacttcttcctctcacacctggcggtcgtcgacatcgcctacgcctgcaacacggtgccccggatgctggtgaacctcctgcatccagccaagcccatctcctttgcgggccgcatgatgcagacctttctgttttccacttttgctgtcacagaatgtctcctcctggtggtgatgtcctatgatctgtacgtggccatctgccaccccctccgatatttggccatcatgacctggagagtctgcatcaccctcgcggtgacttcctggaccactggagtccttttatccttgattcatcttgtgttacttctacctttacccttctgtaggccccagaaaatttatcactttttttgtgaaatcttggctgttctcaaacttgcctgtgcagatacccacatcaatgagaacatggtcttggccggagcaatttctgggctggtgggacccttgtccacaattgtagtttcatatatgtgcatcctctgtgctatccttcagatccaatcaagggaagttcagaggaaagccttccgcacctgcttctcccacctctgtgtgattggactcgtttatggcacagccattatcatgtatgttggacccagatatgggaaccccaaggagcagaagaaatatctcctgctgtttcacagcctctttaatcccatgctcaatccccttatctgtagtcttaggaactcagaagtgaagaatactttgaagagagtgctgggagtagaaagggctttatga

SEQ ID NO: 343161 - DNA, 579 bp, Homo sapiens
tatgttgtccaaggtggtcttgaactcctgggctcaagtgatcctcctgcctcagcctcctgagtaactgggactacaggggcccacaagtaattgttaatattctagctagtaacacaatttgcttttttgcagattttttggatgccttttgtcctccatacacattaattgcctctggcattcactgcccatcttttcagtttttacttgtaatctgagtaaataaagtttagggaagtagactaccacctactcctctgtaaaatatgaatcccttagatattgaatgtgttgtgttaagctctttggattgacatatgtagactttataaaccattatattaatctagattatgtgatgatttaagaattattaataaatcagtgaataaaacaaggttctaccaaaagcatagtgatcctgcacaaatgggccttttaaacactttctttaagggcaacttttactccgtgtaccttttgttccagtgtgtttaaactcaccaagaaaagttggtgtgagttgagaaatctcatgtttgttgtctcttaattttctatttcagactatattgc

SEQ ID NO: 343162 - DNA, 267 bp, Homo sapiens
acagacagacagacagacacacacacacacacacacacacacacacacagaggtttatagaagcctcctcatctataaatattaaaacccaagtaggaaggaaaaagtttttttgaaaaaagattatagtagagtttgatgtaattctccaaatggactgatcaaatatataaccctcttgtggaagcatttgtggctcttgcaaaagatgaactttaaaatgagcccagagtagagtttttcagatgttttgtcaggggagaaatg

SEQ ID NO: 343163 - DNA, 476 bp, Homo sapiens
catgccaatacccttcctgccattgcacctgctgctccctttgcccagaaccctctttccacagataatctgcacagctttctccattaggggcttgatgctacctctgtgaggcttctcttagatgtggcagcctcatcacctcctaccctatcctctttacctgctttatttttctccttagctctcctccctatctaacacagtttatgttttattacttccccccaatggaatgtaaccttcacaaagaaagggattttgtttcacttggcatttgttcactgccatatctcctgtacctagaaaagtgtctggcacaaagtagacgctcagtaaatttttgttgaatgaataagttaacagcttcagacatttgagatagcttcaaaaacagactaagataagcaggaaggagggatgtttttgttttgttttttgcccagtggaatgaaataaaagattatccattttcc

SEQ ID NO: 343164 - DNA, 121 bp, Homo sapiens
actaccaataaacccttatttaaggaatgtctgatcccagaagaacatgtgaaatataagaagaaatgataagcaaaagagatgataatcatgtatgtaattctcaacaaaaattgatgat

SEQ ID NO: 343165 - DNA, 286 bp, Homo sapiens
ctgttgtttcaaatctcattatttatcaagaagtgtaaagagccaaccaaggtgattaagggggaaaagacttctgaaccaaatatgtttactcatcactctaaagtatatgggcttatgcagaaatgctaaccctgctacaaatttacactgttcagcaaatactgggtctctatgttttgtttattccaattgtgtcctttagtctctgagtctctgaaagcatggtacaggttgaatgtagccatctgtgatgtcctgtctgatgtatcagagttatcttgac

SEQ ID NO: 343166 - DNA, 1223 bp, Homo sapiens
tttaggggttgtggtttgaggctagcatagttgaccttgagcagataaaatttaagaggttggcagtaggtaaatgcccttcttttgtagggaaatcctttattcctatgtagttacaggggcttctttttacccagagagataaactaatttcaggctagcgttctggctttagctagaattgcaggcatctgggattccagcttctttattccattctctaagcccaaggcccttgctgtggccaccacagttaggggacagagattctggactgtgttgtttacagacaacataggtgggaaatagggacccaggatgtacaaggcctagtcacaagttggggactgcctagggaagaaggagctgatgactatgggggaagctaaccaaggaatcactgttgccatgggagaagggaataactgaatcccctgaaagtttagccctgcttctcccacttcacttgttctcttggtattaagccctcctctccaactctcatccctgactctgcatttcacacccatcctgcctatccccttacaaaatacttcccttgcctttaactctcccatgctcatcttatcatccgttcccatccttagttctacctccctcaccaacctttaatccgcacatcctacctgaatttaccctcatcaaaacctgagctttcccatcattttaaattactctcctaccattttcacccagtcatgtacctacattccacctggtcatctgctgaataccctactcccatcccctgctgtgtgtcaccccctggatctaagcctcttttaatttcttggaccatttgtagatccccttccccattcccagcctgatgcagtcactaacccaaccccatctgcccctagtggctactaatcatatactcataccctttttccccacagcctaaccacatcccgtaaccacagcctcatcctcacattctctgcccaacctgatcctttcccctcttcccaattcgtcgcctaaactcaagctgccccagccgctaaagtggctgctgatgataggaagctgtgggactctaacctgtctaccttagtagttattaggtcctgtcatttctacctccccaaacttgttctgagtgacatcttcctcaatgccattccaactccggcttcattacctttaatttgtactaatacagtgtccttctaactaatctccaaggtactgccaga

SEQ ID NO: 343167 - DNA, 1058 bp, Homo sapiens
tttaggggttgtggtttgaggctagcatagttgaccttgagcagataaaatttaagaggttggcagtaggtaaatgcccttcttttgtagggaaatcctttattcctatgtagttacaggggcttctttttacccagagagataaactaatttcaggctagcgttctggctttagctagaattgcaggcatctgggattccagcttctttattccattctctaagcccaaggcccttgctgtggccaccacagttaggggacagagattctggactgtgttgtttacagacaacataggtgggaaatagggacccaggatgtacaaggcctagtcacaagttggggactgcctagggaagaaggagctgatgactatgggggaagctaaccaaggaatcactgttgccatgggagaagggaataactgaatcccctgaaagtttagccctgcttctcccacttcacttgttctcttggtattaagccctcctctccaactctcatccctgactctgcatttcacacccatcctgcctatccccttacaaaatacttcccttgcctttaactctcccatgctcatcttatcatccgttcccatccttagttctacctccctcaccaacctttaatccgcacatcctacctgaatttaccctcatcaaaacctgagctttcccatcattttaaattactctcctaccattttcacccagtcatgtacctacattccacctggtcatctgctgaataccctactcccatcccctgctgtgtgtcaccccctggatctaagcctcttttaatttcttggaccatttgtagatccccttcccccactccccaacagaaaagaggaaacgagacccaaagaggaaactgggtcttgctgatcccacgcccagccaggccactgaccacacccccacttcactcccagcctgaccctgccactgaccacagcactatcctctactcagcctgacccagccactggctgtaccccatcccccatcccagctccagctttacttagacattgccaatgtcccttcac

SEQ ID NO: 343168 - DNA, 370 bp, Homo sapiens
ctccccaacagaaaagaggaaacgagacccaaagaggaaactgggtcttgctgatcccacgcccagccaggccactgaccacacccccacttcactcccagcctgaccctgccactgaccacagcactatcctctactcagcctgacccagccactggctgtaccccatcccccatcccagctccagctttacttagacattgccaatgtcccttcactttcccacccccaccccagtctgatttagtgactgaccacaggcccagctcttctcaacctcctatagcctgacctggcctctgacctcaccccatcattccctgacttagccaccatccatgtaatcattccccttcccccaacctgatgc

SEQ ID NO: 343169 - DNA, 822 bp, Homo sapiens
tgcctcctgaagttattagcactgcttccctttttatgaacataataacctcagcaattatgggaaaaagcaaaatcaatgcaaataaaccaagcctttttttttaatctttataccttacccttaaaaaaaaatgtcatttgaaggcttaattagatgctttttatttatgtaaatacatatgcccttttccttatacccaatgtttcttactaatgctagtagaattaaccctcaaattagaaatattgaactttttaaatgctttaagtaattaaatgcaaatgcttcgatcagaaataaaaacagtatatactatgcagcaaagttcaaggtaggtactatggtaagataaatgtttctctaaacttgaacttttcacttttggaaattaatagaaagacaaagctcaaaaaaaatttcatgtgttccatttcccacataatttaaagggcatccaacaaatggaagatgaatttatacctttcagtcaactggtttactttggaacatttgctatttatttatttatttatttaggagacagagtctcactctgtcacccgggctggagtgaagtggtgtgatctcagcttattgcaacctttgccccccaggttcaagtgattctcctgcctcagcctcctgagtagctgggattacagatgcctgccaccatgcctggctaatttttgtatttttagtagagacggggtttcactatgttggccaggctagtctcgaactcctgacttcaggtgatctgcccgcctccgcctcccaaagtgctgggattacaaggcttgatccaccgtgcccagc

SEQ ID NO: 343170 - DNA, 1933 bp, Homo sapiens
cgcgtgagaacgtccggggagcgcgcgcgccgccgccgttgccgccgggctgagagaagagcttgcggggtttgcggttgatggccccgactgaagggctggaggcggtgtatgccgctgttcttgctgtcgctcccgacacctccgtccgcttctggtcatgagaggagacagaggcctgaagcaaagacatctgggtcagagaaaaagtatttaagggccatgcaagccaatcgtagccaactgcacagtcctccaggaactggaagcagtgaggatgcctcaacccctcagtgtgtccacacaagattgacaggagagggttcttgccctcattctggagatgttcatatccagataaactccatacctaaagaatgtgcagaaaatgcaagctccagaaatataaggtcaggtgtccatagctgtgcccatggatgtgtacacagtcgcttacggggtcactcccacagtgaagcaaggctgactgatgatactgccgcagaatctggagatcatggtagtagctccttctcagaattccgctatctcttcaagtggctgcaaaaaagtcttccatatattttgattctgagcgtcaaacttgttatgcagcatataacaggaatttctcttggaattgggctgctaacaacttttatgtatgcaaacaaaagcattgtaaatcaggtttttctaagacttaatttttttaaatcctactttggaccatttgagcttctgggaagtattttggattgttggaattacagacttcattctgaaattctttttcatgggcttaaaatgccttattttattggtgccttctttcatcatgccttttaaatctaagggttactggtatatgcttttagaagaattgtgtcaatactaccgaacttttgttcccataccagtttggtttcgctaccttataagctatggggagtttggtaacgtaactagatggagtcttgggatactgctggctttactctacctcatattaaaacttttggaattttttgggcatctgagaactttcagacaggttttacgaatattttttacacaaccaagttatggagtggctgccagcaagagacagtgttcagatgtggatgatatttgttcaatatgtcaagctgaatttcagaagccaattcttctcatctgtcagcatatattttgtgaagagtgcatgaccttatggtttaacagagagaaaacatgtccactctgcagaactgtgatttcagaccatataaacaaatggaaggatggagccacttcatcacaccttcaaatatattaagttgtataaactatcaaggccacaaaatactaatgtcatttggtcataatgactactgataaggcatcagaatggattttcagggctaccagaaaaatgtttccagatggttttagaatgtaggacttatgatccaattcaccaaaagattaaatgaaaccaccctgtgttttaaaatatatataatgttcaacctaatgtatatgcaacatttattctattctaattatttgacaggtaactgcagtgttaaattgtaaatgtgttttctttatgttaccaaaacagcaatttgaaattagaactagtggttttagagaactcaggtattctttcctgacattgttttcagaataaagaatatttttcataatattttaagatacatactatctaaaagtagaattttgttcagcattgacttttataattcccatcctaaaaattcttaatattttcataaaatttgtatttttaaatgaaaattctaaatgttgtattttatcagtaacattttctaagtgaagattaatttactgaggatgatacattatagtattgtattattctctgtagtaagattagtaataagtgaaaataaatgatttaaattca

SEQ ID NO: 343171 - DNA, 325 bp, Homo sapiens
attaaagtaaaacagtttaatgatatttaaaattctggcaaaatcaaagtaacattataaaattgtttatctttcaggaaaggtcctcaaagattcagtgtgcttggttactggtattcttagcaggatcttctgttcttttatattacacctttcattctcagtcactttattacaggtaattagaggtccaaatacacaattacatttttaatgtaatcatatatttcatagcactttgtatcttacttcacatagtacttattgtattcagttcagttcagtttttaactttctcctttcataagcgagagctttttttttt

SEQ ID NO: 343172 - DNA, 2034 bp, Homo sapiens
cgcgtgagaacgtccggggagcgcgcgcgccgccgccgttgccgccgggctgagagaagagcttgcggggtttgcggttgatggccccgactgaagggctggaggcggtgtatgccgctgttcttgctgtcgctcccgacacctccgtccgcttctggtcatgagaggagacagaggcctgaagcaaagacatctgggtcagagaaaaagtatttaagggccatgcaagccaatcgtagccaactgcacagtcctccaggaactggaagcagtgaggatgcctcaacccctcagtgtgtccacacaagattgacaggagagggttcttgccctcattctggagatgttcatatccagataaactccatacctaaagaatgtgcagaaaatgcaagctccagaaatataaggtcaggtgtccatagctgtgcccatggatgtgtacacagtcgcttacggggtcactcccacagtgaagcaaggctgactgatgatactgccgcagaatctggagatcatggtagtagctccttctcagaattccgctatctcttcaagtggctgcaaaaaagtcttccatatattttgattctgagcgtcaaacttgttatgcagcatataacaggaatttctcttggaattgggctgctaacaacttttatgtatgcaaacaaaagcattgtaaatcaggtttttctaagagaaaggtcctcaaagattcagtgtgcttggttactggtattcttagcaggatcttctgttcttttatattacacctttcattctcagtcactttattacagcttaatttttttaaatcctactttggaccatttgagcttctgggaagtattttggattgttggaattacagacttcattctgaaattctttttcatgggcttaaaatgccttattttattggtgccttctttcatcatgccttttaaatctaagggttactggtatatgcttttagaagaattgtgtcaatactaccgaacttttgttcccataccagtttggtttcgctaccttataagctatggggagtttggtaacgtaactagatggagtcttgggatactgctggctttactctacctcatattaaaacttttggaattttttgggcatctgagaactttcagacaggttttacgaatattttttacacaaccaagttatggagtggctgccagcaagagacagtgttcagatgtggatgatatttgttcaatatgtcaagctgaatttcagaagccaattcttctcatctgtcagcatatattttgtgaagagtgcatgaccttatggtttaacagagagaaaacatgtccactctgcagaactgtgatttcagaccatataaacaaatggaaggatggagccacttcatcacaccttcaaatatattaagttgtataaactatcaaggccacaaaatactaatgtcatttggtcataatgactactgataaggcatcagaatggattttcagggctaccagaaaaatgtttccagatggttttagaatgtaggacttatgatccaattcaccaaaagattaaatgaaaccaccctgtgttttaaaatatatataatgttcaacctaatgtatatgcaacatttattctattctaattatttgacaggtaactgcagtgttaaattgtaaatgtgttttctttatgttaccaaaacagcaatttgaaattagaactagtggttttagagaactcaggtattctttcctgacattgttttcagaataaagaatatttttcataatattttaagatacatactatctaaaagtagaattttgttcagcattgacttttataattcccatcctaaaaattcttaatattttcataaaatttgtatttttaaatgaaaattctaaatgttgtattttatcagtaacattttctaagtgaagattaatttactgaggatgatacattatagtattgtattattctctgtagtaagattagtaataagtgaaaataaatgatttaaattca

SEQ ID NO: 343173 - DNA, 2424 bp, Homo sapiens
cgcgtgagaacgtccggggagcgcgcgcgccgccgccgttgccgccgggctgagagaagagcttgcggggtttgcggttgatggccccgactgaagggctggaggcggtgtatgccgctgttcttgctgtcgctcccgacacctccgtccgcttctggtcatgagaggagacagaggcctgaagcaaagacatctgggtcagagaaaaagtatttaagggccatgcaagccaatcgtagccaactgcacagtcctccaggaactggaagcagtgaggatgcctcaacccctcagtgtgtccacacaagattgacaggagagggttcttgccctcattctggagatgttcatatccagataaactccatacctaaagaatgtgcagaaaatgcaagctccagaaatataaggtcaggtgtccatagctgtgcccatggatgtgtacacagtcgcttacggggtcactcccacagtgaagcaaggctgactgatgatactgccgcagaatctggagatcatggtagtagctccttctcagaattccgctatctcttcaagtggctgcaaaaaagtcttccatatattttgattctgagcgtcaaacttgttatgcagcatataacaggaatttctcttggaattgggctgctaacaacttttatgtatgcaaacaaaagcattgtaaatcaggtttttctaagagaaaggtcctcaaagattcagtgtgcttggttactggtattcttagcaggatcttctgttcttttatattacacctttcattctcagtcactttattacagcttaatttttttaaatcctactttggaccatttgagcttctgggaagtattttggattgttggaattacagacttcattctgaaattctttttcatgggcttaaaatgccttattttattggtgccttctttcatcatgccttttaaatctaagggttactggtatatgcttttagaagaattgtgtcaatactaccgaacttttgttcccataccagtttggtttcgctaccttataagctatggggagtttggtaacgtaactagatggagtcttgggatactgctggctttactctacctcatattaaaacttttggaattttttgggcatctgagaactttcagacaggttttacgaatattttttacacaaccaagttatggagtggctgccagcaagagacagtgttcagatgtggatgatatttgttcaatatgtcaagctgaatttcagaagccaattcttctcatctgtcagcatatattttgtgaagagtgcatgaccttatggtttaacagagagaaaacatgtccactctgcagaactgtgatttcagaccatataaacaaatggaaggatggagccacttcatcacaccttcaaatatattaagttgtataaactatcaaggccacaaaatactaatgtcatttggtcataatgactactgataaggcatcagaatggattttcagggctaccagaaaaatgtttccagatggttttagaatgtaggacttatgatccaattcaccaaaagattaaatgaaaccaccctgtgttttaaaatatatataatgttcaacctaatgtatatgcaacatttattctattctaattatttgacaggtaactgcagtgttaaattgtaaatgtgttttctttatgttaccaaaacagcaatttgaaattagaactagtggttttagagaactcaggtattctttcctgacattgttttcagaataaagaatatttttcataatattttaagatacatactatctaaaagtagaattttgttcagcattgacttttataattcccatcctaaaaattcttaatattttcataaaatttgtatttttaaatgaaaattctaaatgttgtattttatcagtaacattttctaagtgaagattaatttactgaggatgatacattatagtattgtattattctctgtagtaagattagtaataagtgaaaataaatgatttaaattcattttgtctctggacgtcataaattcttcctgccatcagctttaatgttcatgatcatgctttttgtatagtaccatggagtatctcgaagtaactattaaaataattcatgtggattataaaaaaaaaaaaaaaaaaatgttgtgggcgccggggacgcgaaaaagtttcaaaccatcctgtgggggggggaccagaggtaaggacactgggcaaaacgtggtgcaagaaaaccggccagatggggtggttcccccaaaaaacccggcgacggggtcgaacatccagggtcggcttctcgtctccacaggtcccatctcacccccccgcgcgcggccaagaaacaaacaacaacaaaaacacaaaacacaagacaaccacaaaaggagaa

SEQ ID NO: 343174 - DNA, 2291 bp, Homo sapiens
cgcgtgagaacgtccggggagcgcgcgcgccgccgccgttgccgccgggctgagagaagagcttgcggggtttgcggttgatggccccgactgaagggctggaggcggtgtatgccgctgttcttgctgtcgctcccgacacctccgtccgcttctggtcatgagaggagacagaggcctgaagcaaagacatctgggtcagagaaaaagtatttaagggccatgcaagccaatcgtagccaactgcacagtcctccaggaactggaagcagtgaggatgcctcaacccctcagtgtgtccacacaagattgacaggagagggttcttgccctcattctggagatgttcatatccagataaactccatacctaaagaatgtgcagaaaatgcaagctccagaaatataaggtcaggtgtccatagctgtgcccatggatgtgtacacagtcgcttacggggtcactcccacagtgaagcaaggctgactgatgatactgccgcagaatctggagatcatggtagtagctccttctcagaattccgctatctcttcaagtggctgcaaaaaagtcttccatatattttgattctgagcgtcaaacttgttatgcagcatataacaggaatttctcttggaattgggctgctaacaacttttatgtatgcaaacaaaagcattgtaaatcaggtttttctaagagaaaggtcctcaaagattcagtgtgcttggttactggtattcttagcaggatcttctgttcttttatattacacctttcattctcagtcactttattacaggctagaaaggtgtcaactatgacaaaccgtgaagactttttccttattctatgaagggaagatctaaaatccaaacaggtttaaaaagtctctttaagcaaaatgatcctccattccattattgtgaactctgacatcctgccaaactcatattttttacatatcaaaataaaatatttgtagcaaattaaaaccctttattaatactttatctttgtatgttgctctgataaattttgatgtttttcttttggtagcttaatttttttaaatcctactttggaccatttgagcttctgggaagtattttggattgttggaattacagacttcattctgaaattctttttcatgggcttaaaatgccttattttattggtgccttctttcatcatgccttttaaatctaagggttactggtatatgcttttagaagaattgtgtcaatactaccgaacttttgttcccataccagtttggtttcgctaccttataagctatggggagtttggtaacgtaactagatggagtcttgggatactgctggctttactctacctcatattaaaacttttggaattttttgggcatctgagaactttcagacaggttttacgaatattttttacacaaccaagttatggagtggctgccagcaagagacagtgttcagatgtggatgatatttgttcaatatgtcaagctgaatttcagaagccaattcttctcatctgtcagcatatattttgtgaagagtgcatgaccttatggtttaacagagagaaaacatgtccactctgcagaactgtgatttcagaccatataaacaaatggaaggatggagccacttcatcacaccttcaaatatattaagttgtataaactatcaaggccacaaaatactaatgtcatttggtcataatgactactgataaggcatcagaatggattttcagggctaccagaaaaatgtttccagatggttttagaatgtaggacttatgatccaattcaccaaaagattaaatgaaaccaccctgtgttttaaaatatatataatgttcaacctaatgtatatgcaacatttattctattctaattatttgacaggtaactgcagtgttaaattgtaaatgtgttttctttatgttaccaaaacagcaatttgaaattagaactagtggttttagagaactcaggtattctttcctgacattgttttcagaataaagaatatttttcataatattttaagatacatactatctaaaagtagaattttgttcagcattgacttttataattcccatcctaaaaattcttaatattttcataaaatttgtatttttaaatgaaaattctaaatgttgtattttatcagtaacattttctaagtgaagattaatttactgaggatgatacattatagtattgtattattctctgtagtaagattagtaataagtgaaaataaatgatttaaattca

SEQ ID NO: 343175 - DNA, 1856 bp, Homo sapiens
cgcgtgagaacgtccggggagcgcgcgcgccgccgccgttgccgccgggctgagagaagagcttgcggggtttgcggttgatggccccgactgaagggctggaggcggtgtatgccgctgttcttgctgtcgctcccgacacctccgtccgcttctggtcatgagaggagacagaggcctgaagcaaagacatctgggtcagagaaaaagtatttaagggccatgcaagccaatcgtagccaactgcacagtcctccaggaactggaagcagtgaggatgcctcaacccctcagtgtgtccacacaagattgacaggagagggttcttgccctcattctggagatgttcatatccagataaactccatacctaaagaatgtgcagaaaatgcaagctccagaaatataaggtcaggtgtccatagctgtgcccatggatgtgtacacagtcgcttacggggtcactcccacagtgaagcaaggctgactgatgatactgccgcagaatctggagatcatggtagtagctccttctcagaattccgctatctcttcaagtggctgcaaaaaagtcttccatatattttgattctgagcgtcaaacttgttatgcagcatataacagcttaatttttttaaatcctactttggaccatttgagcttctgggaagtattttggattgttggaattacagacttcattctgaaattctttttcatgggcttaaaatgccttattttattggtgccttctttcatcatgccttttaaatctaagggttactggtatatgcttttagaagaattgtgtcaatactaccgaacttttgttcccataccagtttggtttcgctaccttataagctatggggagtttggtaacgtaactagatggagtcttgggatactgctggctttactctacctcatattaaaacttttggaattttttgggcatctgagaactttcagacaggttttacgaatattttttacacaaccaagttatggagtggctgccagcaagagacagtgttcagatgtggatgatatttgttcaatatgtcaagctgaatttcagaagccaattcttctcatctgtcagcatatattttgtgaagagtgcatgaccttatggtttaacagagagaaaacatgtccactctgcagaactgtgatttcagaccatataaacaaatggaaggatggagccacttcatcacaccttcaaatatattaagttgtataaactatcaaggccacaaaatactaatgtcatttggtcataatgactactgataaggcatcagaatggattttcagggctaccagaaaaatgtttccagatggttttagaatgtaggacttatgatccaattcaccaaaagattaaatgaaaccaccctgtgttttaaaatatatataatgttcaacctaatgtatatgcaacatttattctattctaattatttgacaggtaactgcagtgttaaattgtaaatgtgttttctttatgttaccaaaacagcaatttgaaattagaactagtggttttagagaactcaggtattctttcctgacattgttttcagaataaagaatatttttcataatattttaagatacatactatctaaaagtagaattttgttcagcattgacttttataattcccatcctaaaaattcttaatattttcataaaatttgtatttttaaatgaaaattctaaatgttgtattttatcagtaacattttctaagtgaagattaatttactgaggatgatacattatagtattgtattattctctgtagtaagattagtaataagtgaaaataaatgatttaaattca

SEQ ID NO: 343176 - DNA, 2041 bp, Homo sapiens
ggtcgatgacgcctttgtgacacaagaccttgcggtgtttgcggttgatggtccctattgactagggctggataccgtggtcgtttgacctggagtgttctgttgacttcgtcacctcacctgaacaaccatccgctgcgggttctgcgtcgatgtagcatggagcacagtagcgccttgagagctaactgacgatttgtgtctagagatactatcgtatttaagggccatgcaagccaatcgtagccaactgcacagtcctccaggaactggaagcagtgaggatgcctcaacccctcagtgtgtccacacaagattgacaggagagggttcttgccctcattctggagatgttcatatccagataaactccatacctaaagaatgtgcagaaaatgcaagctccagaaatataaggtcaggtgtccatagctgtgcccatggatgtgtacacagtcgcttacggggtcactcccacagtgaagcaaggctgactgatgatactgccgcagaatctggagatcatggtagtagctccttctcagaattccgctatctcttcaagtggctgcaaaaaagtcttccatatattttgattctgagcgtcaaacttgttatgcagcatataacaggaatttctcttggaattgggctgctaacaacttttatgtatgcaaacaaaagcattgtaaatcaggtttttctaagagaaaggtcctcaaagattcagtgtgcttggttactggtattcttagcaggatcttctgttcttttatattacacctttcattctcagtcactttattacagcttaatttttttaaatcctactttggaccatttgagcttctgggaagtattttggattgttggaattacagacttcattctgaaattctttttcatgggcttaaaatgccttattttattggtgccttctttcatcatgccttttaaatctaagggttactggtatatgcttttagaagaattgtgtcaatactaccgaacttttgttcccataccagtttggtttcgctaccttataagctatggggagtttggtaacgtaactagatggagtcttgggatactgctggctttactctacctcatattaaaacttttggaattttttgggcatctgagaactttcagacaggttttacgaatattttttacacaaccaagttatggagtggctgccagcaagagacagtgttcagatgtggatgatatttgttcaatatgtcaagctgaatttcagaagccaattcttctcatctgtcagcatatattttgtgaagagtgcatgaccttatggtttaacagagagaaaacatgtccactctgcagaactgtgatttcagaccatataaacaaatggaaggatggagccacttcatcacaccttcaaatatattaagttgtataaactatcaaggccacaaaatactaatgtcatttggtcataatgactactgataaggcatcagaatggattttcagggctaccagaaaaatgtttccagatggttttagaatgtaggacttatgatccaattcaccaaaagattaaatgaaaccaccctgtgttttaaaatatatataatgttcaacctaatgtatatgcaacatttattctattctaattatttgacaggtaactgcagtgttaaattgtaaatgtgttttctttatgttaccaaaacagcaatttgaaattagaactagtggttttagagaactcaggtattctttcctgacattgttttcagaataaagaatatttttcataatattttaagatacatactatctaaaagtagaattttgttcagcattgacttttataattcccatcctaaaaattcttaatattttcataaaatttgtatttttaaatgaaaattctaaatgttgtattttatcagtaacattttctaagtgaagattaatttactgaggatgatacattatagtattgtattattctctgtagtaagattagtaataagtgaaaataaatgatttaaattca

SEQ ID NO: 343177 - DNA, 1719 bp, Homo sapiens
aaaccagcagtgaaatatgagaaatagaaaagtgttgtgttaaaagtctagaaagaaaattattcagggagggaagatggaaaaagagagtgaccttgaaatttagccatacagagggagttgatgatcttgacaagcaattcattgaaaggaagagatggaatcctgattggaattggttaagaaaaacacagcagatgtctggtattgatgagtttttttcatttacaggctagaaaggtgtcaactatgacaaaccgtgaagactttttccttattctatgaagggaagatctaaaatccaaacaggtttaaaaagtctctttaagcaaaatgatcctccattccattattgtgaactctgacatcctgccaaactcatattttttacatatcaaaataaaatatttgtagcaaattaaaaccctttattaatactttatctttgtatgttgctctgataaattttgatgtttttcttttggtagcttaatttttttaaatcctactttggaccatttgagcttctgggaagtattttggattgttggaattacagacttcattctgaaattctttttcatgggcttaaaatgccttattttattggtgccttctttcatcatgccttttaaatctaagggttactggtatatgcttttagaagaattgtgtcaatactaccgaacttttgttcccataccagtttggtttcgctaccttataagctatggggagtttggtaacgtaactagatggagtcttgggatactgctggctttactctacctcatattaaaacttttggaattttttgggcatctgagaactttcagacaggttttacgaatattttttacacaaccaagttatggagtggctgccagcaagagacagtgttcagatgtggatgatatttgttcaatatgtcaagctgaatttcagaagccaattcttctcatctgtcagcatatattttgtgaagagtgcatgaccttatggtttaacagagagaaaacatgtccactctgcagaactgtgatttcagaccatataaacaaatggaaggatggagccacttcatcacaccttcaaatatattaagttgtataaactatcaaggccacaaaatactaatgtcatttggtcataatgactactgataaggcatcagaatggattttcagggctaccagaaaaatgtttccagatggttttagaatgtaggacttatgatccaattcaccaaaagattaaatgaaaccaccctgtgttttaaaatatatataatgttcaacctaatgtatatgcaacatttattctattctaattatttgacaggtaactgcagtgttaaattgtaaatgtgttttctttatgttaccaaaacagcaatttgaaattagaactagtggttttagagaactcaggtattctttcctgacattgttttcagaataaagaatatttttcataatattttaagatacatactatctaaaagtagaattttgttcagcattgacttttataattcccatcctaaaaattcttaatattttcataaaatttgtatttttaaatgaaaattctaaatgttgtattttatcagtaacattttctaagtgaagattaatttactgaggatgatacattatagtattgtattattctctgtagtaagattagtaataagtgaaaataaatgatttaaattca

SEQ ID NO: 343178 - DNA, 1433 bp, Homo sapiens
ggctattttataattggatactagccatgtagaacaatactgacatttgttactggattgtggccctttcctatactttatggcagttactagtaactcaaagaccttaagcagttatcatacttaatcttaaaggtgtcacctaaggatagcttttatggttaaatggatggtacagccagaacactagtggctctaccaatcatactgctctttgtcttcttgaatgtctcatacgttctccattttcacaattgtaaaatgaggggattagtgctcttcaaaatccctttcaggctggacacagtggctcacgcctgtaatcccagaactttgggaggctgaggtgggtggatcacctgaggtcaggagttcaagaccagcctgaccaacatggtgaaaccctgtctctactaaaaataaaaaaactagctgggcatggtggtggtggtcacctgtaatcccggcaacttgggaggctgaggcaggagaatcacttgaaccagtcgggggcggaggttgcagtgagccgagatggtgccattgcactccggcctgggtgacagagcaagacttcagtctccatctcaaaaaaaaaaaaaaagaatccctttcattccctacaatgtgatggatttaaaatgattatcaaatatcaaatctaattcttaattccattacagcatatattttgtgaagagtgcatgaccttatggtttaacagagagaaaacatgtccactctgcagaactgtgatttcagaccatataaacaaatggaaggatggagccacttcatcacaccttcaaatatattaagttgtataaactatcaaggccacaaaatactaatgtcatttggtcataatgactactgataaggcatcagaatggattttcagggctaccagaaaaatgtttccagatggttttagaatgtaggacttatgatccaattcaccaaaagattaaatgaaaccaccctgtgttttaaaatatatataatgttcaacctaatgtatatgcaacatttattctattctaattatttgacaggtaactgcagtgttaaattgtaaatgtgttttctttatgttaccaaaacagcaatttgaaattagaactagtggttttagagaactcaggtattctttcctgacattgttttcagaataaagaatatttttcataatattttaagatacatactatctaaaagtagaattttgttcagcattgacttttataattcccatcctaaaaattcttaatattttcataaaatttgtatttttaaatgaaaattctaaatgttgtattttatcagtaacattttctaagtgaagattaatttactgaggatgatacattatagtattgtattattctctgtagtaagattagtaataagtgaaaataaatgatttaaattca

SEQ ID NO: 343179 - DNA, 318 bp, Homo sapiens
gtaagtactttttatcagttaagaaaaacaccttcacctttcttcactgcaaaaatttttttagttcagcagttttacaagaatggatttcataaatagatgatccttttcttttactttgattattttctagtactttggcacttggggctataataatttaggagttttatctctgtgatcagattcttgaatcacacattgacaaccacctgctaattgttgcagtgcttatatatttgaacttgtctcttgcctcttcaatccactggacatttttaaggcttgtaaacccttaacaatcttatgaaattgtgt

SEQ ID NO: 343180 - DNA, 640 bp, Homo sapiens
gaggttcagtcataatcattatgaagattaattttatagttatttatattattgtataatatactcagtgttctcagtctaatattgtttgtgctatgtagttaagtagtttgggtagctctatttgttttcttcttattttttagggttactggtatatgcttttagaagaattgtgtcaatactaccgaacttttgttcccataccagtttggtttcgctaccttataagctatggggagtttggtaacgtaactagatggagtcttgggatactgctggctttactctacctcatattaaaagtaggtaacattacaaatcttgtcactgcatgattcacattaatgattactgatacatactactgttttcctcttttaacagttttatagtttatcttcatatcactagtttgaagtaatagcaggttctatatttgtttagaaatggagaaacggaaatagactatcttaatccagcggtcctcaggtttcactggagggaaggggagtcgaccttcacatagcgtggattatctaagtagggaaaacaagtggaatagaacatacccatcctcaacagtaacattgtcatacacataattcttaaactagtagagtatcttgtcctgttctct

SEQ ID NO: 343181 - DNA, 911 bp, Homo sapiens
cgcgtgagaacgtccggggagcgcgcgcgccgccgccgttgccgccgggctgagagaagagcttgcggggtttgcggttgatggccccgactgaagggctggaggcggtgtatgccgctgttcttgctgtcgctcccgacacctccgtccgcttctggtcatgagaggagacagaggcctgaagcaaagacatctgggtcagagaaaaagtatttaagggccatgcaagccaatcgtagccaactgcacagtcctccaggaactggaagcagtgaggatgcctcaacccctcagtgtgtccacacaagattgacaggagagggttcttgccctcattctggagatgttcatatccagataaactccatacctaaagaatgtgcagaaaatgcaagctccagaaatataaggtcaggtgtccatagctgtgcccatggatgtgtacacagtcgcttacggggtcactcccacagtgaagcaaggctgactgatgatactgccgcagaatctggagatcatggtagtagctccttctcagaattccgctatctcttcaagtggctgcaaaaaagtcttccatatattttgattctgagcgtcaaacttgttatgcagcatataacaggaatttctcttggaattgggctgctaacaacttttatgtatgcaaacaaaagcattgtaaatcaggtttttctaagagtaagataacaagcaactaaaaaattattaactgtttctctccatagattttagagaaataatttttagagaaataggaaataacttgaaagaaataggaagtgataggatatattgtaacatccacgttatgttaaatttggtatctaaatcctggaataaattatctctcctaatgctgaattccttcacctttccttctttgtaag

SEQ ID NO: 343182 - DNA, 2274 bp, Homo sapiens
cgcgtgagaacgtccggggagcgcgcgcgccgccgccgttgccgccgggctgagagaagagcttgcggggtttgcggttgatggccccgactgaagggctggaggcggtgtatgccgctgttcttgctgtcgctcccgacacctccgtccgcttctggtcatgagaggagacagaggcctgaagcaaagacatctgggtcagagaaaaagtatttaagggccatgcaagccaatcgtagccaactgcacagtcctccaggaactggaagcagtgaggatgcctcaacccctcagtgtgtccacacaagattgacaggagagggttcttgccctcattctggagatgttcatatccagataaactccatacctaaagaatgtgcagaaaatgcaagctccagaaatataaggtcaggtgtccatagctgtgcccatggatgtgtacacagtcgcttacggggtcactcccacagtgaagcaaggctgactgatgatactgccgcagaatctggagatcatggtagtagctccttctcagaattccgctatctcttcaagtggctgcaaaaaagtcttccatatattttgattctgagcgtcaaacttgttatgcagcatataacaggaatttctcttggaattgggctgctaacaacttttatgtatgcaaacaaaagcattgtaaatcaggtttttctaagagaaaggtcctcaaagattcagtgtgcttggttactggtattcttagcaggatcttctgttcttttatattacacctttcattctcagtcactttattacagcttaatttttttaaatcctactttggaccatttgagcttctgggaagtattttggattgttggaattacagacttcattctgaaattctttttcatgggcttaaaatgccttattttattggtgccttctttcatcatgccttttaaatctaagggttactggtatatgcttttagaagaattgtgtcaatactaccgaacttttgttcccataccagtttggtttcgctaccttataagctatggggagtttggtaacgtaactagatggagtcttgggatactgctggctttactctacctcatattaaaacttttggaattttttgggcatctgagaactttcagacaggttttacgaatattttttacacaaccaagttatggagtggctgccagcaagagacagtgttcagatgtggatgatatttgttcaatatgtcaagctgaatttcagaagccaattcttctcatctgtcagcatatattttgtgaagagtgcatgaccttatggtttaacagagagaaaacatgtccactctgcagaactgtgatttcagaccatataaacaaatggaaggatggagccacttcatcacaccttcaaatatattaagttgtataaactatcaaggccacaaaatactaatgtcatttggtcataatgactactgataaggcatcagaatggattttcagggctaccagaaaaatgtttccagatggttttagaatgtaggacttatgatccaattcaccaaaagattaaatgaaaccaccctgtgttttaaaatatatataatgttcaacctaatgtatatgcaacatttattctattctaattatttgacaggtaactgcagtgttaaattgtaaatgtgttttctttatgttaccaaaacagcaatttgaaattagaactagtggttttagagaactcaggtattctttcctgacattgttttcagaataaagaatatttttcataatattttaagatacatactatctaaaagtagaattttgttcagcattgacttttataattcccatcctaaaaattcttaatattttcataaaatttgtatttttaaatgaaaattctaaatgttgtattttatcagtaacattttctaagtgaagattaatttactgaggatgatacattatagtattgtattattctctgtagtaagattagtaataagtgaaaataaatgatttaaattcaaaaaaagaaaagaaacagaacgaccgaccgacagtacgagcgacccgagaacatgacacacagcaaacgaaccaagcgagcacaccaacgcgatcgccacaagcagcggcgagccgcccacgcgcctaaccaccctacagcggggcgggggacctatctaaaccacggggccgcgcccccacgccccgttctacaacaccgggcagcagaggtaagcccaagcgcgcgcccacacgcgac

SEQ ID NO: 343183 - DNA, 2112 bp, Homo sapiens
cgcgtgagaacgtccggggagcgcgcgcgccgccgccgttgccgccgggctgagagaagagcttgcggggtttgcggttgatggccccgactgaagggctggaggcggtgtatgccgctgttcttgctgtcgctcccgacacctccgtccgcttctggtcatgagaggagacagaggcctgaagcaaagacatctgggtcagagaaaaagtatttaagggccatgcaagccaatcgtagccaactgcacagtcctccaggaactggaagcagtgaggatgcctcaacccctcagtgtgtccacacaagattgacaggagagggttcttgccctcattctggagatgttcatatccagataaactccatacctaaagaatgtgcagaaaatgcaagctccagaaatataaggtcaggtgtccatagctgtgcccatggatgtgtacacagtcgcttacggggtcactcccacagtgaagcaaggctgactgatgatactgccgcagaatctggagatcatggtagtagctccttctcagaattccgctatctcttcaagtggctgcaaaaaagtcttccatatattttgattctgagcgtcaaacttgttatgcagcatataacaggaatttctcttggaattgggctgctaacaacttttatgtatgcaaacaaaagcattgtaaatcaggtttttctaagagaaaggtcctcaaagattcagtgtgcttggttactggtattcttagcaggatcttctgttcttttatattacacctttcattctcagtcactttattacaggctagaaaggtgtcaactatgacaaaccgtgaagactttttccttattctatgaagggaagatctaaaatccaaacagcttaatttttttaaatcctactttggaccatttgagcttctgggaagtattttggattgttggaattacagacttcattctgaaattctttttcatgggcttaaaatgccttattttattggtgccttctttcatcatgccttttaaatctaagggttactggtatatgcttttagaagaattgtgtcaatactaccgaacttttgttcccataccagtttggtttcgctaccttataagctatggggagtttggtaacgtaactagatggagtcttgggatactgctggctttactctacctcatattaaaacttttggaattttttgggcatctgagaactttcagacaggttttacgaatattttttacacaaccaagttatggagtggctgccagcaagagacagtgttcagatgtggatgatatttgttcaatatgtcaagctgaatttcagaagccaattcttctcatctgtcagcatatattttgtgaagagtgcatgaccttatggtttaacagagagaaaacatgtccactctgcagaactgtgatttcagaccatataaacaaatggaaggatggagccacttcatcacaccttcaaatatattaagttgtataaactatcaaggccacaaaatactaatgtcatttggtcataatgactactgataaggcatcagaatggattttcagggctaccagaaaaatgtttccagatggttttagaatgtaggacttatgatccaattcaccaaaagattaaatgaaaccaccctgtgttttaaaatatatataatgttcaacctaatgtatatgcaacatttattctattctaattatttgacaggtaactgcagtgttaaattgtaaatgtgttttctttatgttaccaaaacagcaatttgaaattagaactagtggttttagagaactcaggtattctttcctgacattgttttcagaataaagaatatttttcataatattttaagatacatactatctaaaagtagaattttgttcagcattgacttttataattcccatcctaaaaattcttaatattttcataaaatttgtatttttaaatgaaaattctaaatgttgtattttatcagtaacattttctaagtgaagattaatttactgaggatgatacattatagtattgtattattctctgtagtaagattagtaataagtgaaaataaatgatttaaattca

SEQ ID NO: 343184 - DNA, 1446 bp, Homo sapiens
cgcgtgagaacgtccggggagcgcgcgcgccgccgccgttgccgccgggctgagagaagagcttgcggggtttgcggttgatggccccgactgaagggctggaggcggtgtatgccgctgttcttgctgtcgctcccgacacctccgtccgcttctggtcatgagaggagacagaggcctgaagcaaagacatctgggtcagagaaaaagtatttaagggccatgcaagccaatcgtagccaactgcacagtcctccaggaactggaagcagtgaggatgcctcaacccctcagtgtgtccacacaagattgacaggagagggttcttgccctcattctggagatgttcatatccagataaactccatacctaaagaatgtgcagaaaatgcaagctccagaaatataaggtcaggtgtccatagctgtgcccatggatgtgtacacagtcgcttacggggtcactcccacagtgaagcaaggctgactgatgatactgccgcagaatctggagatcatggtagtagctccttctcagaattccgctatctcttcaagtggctgcaaaaaagtcttccatatattttgattctgagcgtcaaacttgttatgcagcatataacaggaatttctcttggaattgggctgctaacaacttttatgtatgcaaacaaaagcattgtaaatcaggtttttctaagagaaaggtcctcaaagattcagtgtgcttggttactggtattcttagcaggatcttctgttcttttatattacacctttcattctcagtcactttattacagcttaatttttttaaatcctactttggaccatttgagcttctgggaagtattttggattgttggaattacagacttcattctgaaattctttttcatgggcttaaaatgccttattttattggtgccttctttcatcatgccttttaaatctaagggttactggtatatgcttttagaagaattgtgtcaatactaccgaacttttgttcccataccagtttggtttcgctaccttataagctatggggagtttggtaacgtaactagatggagtcttgggatactgctggctttactctacctcatattaaaacttttggaattttttgggcatctgagaactttcagacaggttttacgaatattttttacacaaccaagttatggagtggctgccagcaagagacagtgttcagatgtggatgatatttgttcaatatgtcaagctgaatttcagaagccaattcttctcatctgtcagcatatattttgtgaagagtgcatgaccttatggtttaacagagagaaaacatgtccactctgcagaactgtgatttcagaccatataaacaaatggaaggatggagccaactttcaatcaaaaaaacttttccaaaaaatttaattttatttttaaagggtg

SEQ ID NO: 343185 - DNA, 273 bp, Homo sapiens
ctccggctgtgcaaggcaggctgcacgcttgggagccatgtactgcaggaggaaccttctggtaatgataggatagggttggaggataagtaccccggcctcctcattccccagtgggacgactctgcggcatgtctgcgctggctcccagggaacagcaccccagatgcccacactaataacctggtctctcactcatcctgactgggctgccttcccttccctgtctctcttcccctttcttctccctctcctcctgggatcacctcccat

SEQ ID NO: 343186 - DNA, 425 bp, Homo sapiens
aggatgcagcagaagcgacgctgtgtcacttccgaggctgaagctgcagagatttgaggcatctgctctcacccagcttgaagtgcttcctcttggaagccagccaccgtgaaaaaccccgccatgctgtgaggaagcccaagagagctgcatggagagaagggcctgtggaagagccctgaggtgccactcacatgaagtgaacctttgtggaccttccagcccagctaccagcaaaacgcaagcagcgagtgtccccagtcaacgcttctctctataggagacctgtaaatggggtggcggggggagcaggaggaattttctgatctcacacactgttatgagttgaattgtctccccacccaaattcatatgttgaagcccccaccttcagtactttacaaagtaatgtatttggagataat

SEQ ID NO: 343187 - DNA, 129 bp, Homo sapiens
tacacactagatactggcctatatggaatggtcccatttatgtaaaattgtgtatgtgcatgcacagatctgtcttctatcagggtatctggaaaatgttcaacaaaatagtaacaatggttatctgtt

SEQ ID NO: 343188 - DNA, 587 bp, Homo sapiens
gttggagagcaaacttcagaggctacaggctcagggtatccaagtatttgatcctggggagtctgattcagatgacaactgtacagatgtcactggtaagtgtatatcctatttatattttgagctttcaacatggctgtaatgacatgtagagccaactttgaattctgctagatttcttttacttatctatattaggttattgctttaactactgttgcaaatagtgtcgtgtgttctttctgtcagctgctaaaacacctcttctccacaaagtgtatgaattttggggactgaagttccttctaccttgtcactctgccaaccctaacccataacttttactctctagtctaagatatctaccccagctcccaccagcacatctgcattttagccaagggaaagaaggaaggggagaacacgttcctttcccagaaggtacaacctaagatcacttctcaaatcccattagtcagaactataactgggaagactggatagtgtaatcagcagccaggcagacatgtgtccaactaaaatgtagtgttctgttactgaagaaagaagaggagaatggatattgg

SEQ ID NO: 343189 - DNA, 130 bp, Homo sapiens
tggtcagtgtcgctaaaggatgctaaatgccctcacttgtattcaacaaacatgaccttaccctctgtatgacaggataaatgaagggtgctttgtcttgatgtgcagacattaggaaagcttaagtggc

SEQ ID NO: 343190 - DNA, 757 bp, Homo sapiens
cctgccagttttctccattcaagatagtccctttggagatgcgcccctgggtcgaagccactactggccatcccagagccagacctggtgtcccaagaccctgagcccatccaggtctcagagatccaggctcccacaagctcccaaggctctagccacaggtcccaactcccctgagctgtttgaggagtcctggccatccagttcagggaccccctccctgcccagcaccactgagggacagatgtgggcctccccagcacccaccctgattgacagcggggactccgtggtggccaagtatataaacaggttccgccaggctcagcccaccagtcgagaggagcgccagcctgcaggcccaaccccagctgacttttggtggctgcagtctgactctccagaccccagcagtcaaagtgcagcagcaggagccaacaaaccagaaggaagaccccatacagctgtccctactgcggtcaacgtgaccagtgcatcccatgctgtggctccccttcaggaaataaagcagaacctccacacatggaactcatccctgctggacctggagacgctgagcctacagagcagagctgccaggctgctcaaacgcagcaaagcctccatctcctcctcctcctccctcagccccagcgatgccagcacttcctcattccccaccagctctgatggctctctcccttctcggagaccttcatccctgactccagcaagggccttggccccagggcacccg

SEQ ID NO: 343191 - DNA, 411 bp, Homo sapiens
cctgccagttttctccattcaagatagtccctttggagatgcgcccctgggtcgaagccactactggccatcccagagccagacctggtgtcccaaggtatataaacaggttccgccaggctcagcccaccagtcgagaggagcgccagcctgcaggcccaaccccagctgacttttggtggctgcagtctgactctccagaccccagcagtcaaagtgcagcagcaggagccaacaaaccagaaggaagaccccatacagctgtccctactgcggtcaacgtgaccagtgcatcccatgctgtggctccccttcaggaaataaagcaggtgacatccccattcactccctcccttgggtgcctgaactgacaacaccagccctgggcaacaagtgaaattcaatctcaaa

SEQ ID NO: 343192 - DNA, 837 bp, Homo sapiens
cctgccagttttctccattcaagatagtccctttggagatgcgcccctgggtcgaagccactactggccatcccagagccagacctggtgtcccaagaccctgagcccatccaggtctcagagatccaggctcccacaagctcccaaggctctagccacaggtcccaactcccctgagctgtttgaggagtcctggccatccagttcagggaccccctccctgcccagcaccactgagggacagatgtgggcctccccagcacccaccctgattgacagcggggactccgtggtggccaagtatataaacaggttccgccaggctcagcccaccagtcgagaggagcgccagcctgcaggcccaaccccagctgacttttggtggctgcagtctgactctccagaccccagcagtcaaagtgcagcaggtacctctttcagtgccatccactactcccacccctaaacctttgctgatcaatgcccccagcagccactcctcctggccctcatacctcaactggggcttctcagcaggagccaacaaaccagaaggaagaccccatacagctgtccctactgcggtcaacgtgaccagtgcatcccatgctgtggctccccttcaggaaataaagcaggtgacatccccattcactccctcccttgggtgcctgaactgacaacaccagccctaggatagaattagaagatcaggagcagtggctcacacctgtaatcccagcactttgggaggccaaggtgagaggactgcttgaggccaggagttcaagaccagcttgggtgacatggtgagattctgcctctactaaaaaaaaa

SEQ ID NO: 343193 - DNA, 731 bp, Homo sapiens
cctgccagttttctccattcaagatagtccctttggagatgcgcccctgggtcgaagccactactggccatcccagagccagacctggtgtcccaagaccctgagcccatccaggtctcagagatccaggctcccacaagctcccaaggctctagccacaggtcccaactcccctgagctgtttgaggagtcctggccatccagttcagggaccccctccctgcccagcaccactgagggacagatgtgggcctccccagcacccaccctgattgacagcggggactccgtggtggccaagtatataaacaggttccgccaggctcagcccaccagtcgagaggagcgccagcctgcaggcccaaccccagctgacttttggtggctgcagtctgactctccagaccccagcagtcaaagtgcagcagcaggagccaacaaaccagaaggaagaccccatacagctgtccctactgcggtcaacgtgaccagtgcatcccatgctgtggctccccttcaggaaataaagcaggtgacatccccattcactccctcccttgggtgcctgaactgacaacaccagccctaggatagaattagaagatcaggagcagtggctcacacctgtaatcccagcactttgggaggccaaggtgagaggactgcttgaggccaggagttcaagaccagcttgggtgacatggtgagattctgcctctactaaaaaaaaa

SEQ ID NO: 343194 - DNA, 4659 bp, Homo sapiens
tgttctccgctgaggaggagcggggcagaggagggaggcagcgggtgagagttcagagttcagcagcagcagcccgagcccatgattcccatatgccctgtagtttctttcacctatgtgcccagccggctgggggaagatgccaaaatggcgaccggcaactactttggattcacccacagcggggcggcggcggcggcggctgcggcccaatatagccagcagccagcttcgggtgtagcctattctcatccaactacagttgctagctacactgtccatcaggctccagtagctgctcacacagttactgctgcctatgcaccagcagccgccacagttgcagttgccaggcctgctccagtagctgttgcagctgctgcaacagctgctgcttatggaggctaccccactgcacacacagcaactgactatggttatactcagaggcaacaagaagcaccaccaccaccacccccagctactacacaaaactaccaggattcatactcatatgtaaggtccacagctcctgctgtagcttatgatagtaagcaatactaccaacaaccaacagcaactgctgctgctgtagctgccgctgcccaacctcagccttctgttgctgaaacttactatcagacagcccccaaagcaggttacagccaaggtgcaactcagtatactcaagcccagcaaactcgacaagtgacagccataaaaccagccacaccaagtccagctaccactactttctccatctatcctgtatcctccaccgtacagccagtagcagctgcggctactgtggtgccatcctatactcagagtgctacttacagtaccacagcagttacatattctggtacgtcttattcaggttatgaagcagcagtgtattcagctgcatcttcctactatcaacagcagcagcagcaacagaagcaggcagcagcagcagctgctgctgctgctgcaacagctgcctggacagggaccacctttactaaaaaagcaccattccaaaataaacaactgaaaccaaaacagcctcccaaaccaccacagattcactattgtgatgtttgtaagatcagctgtgctggaccacagacttataaagaacatttagaaggacagaaacataaaaaaaaagaagctgcattgaaagcctcacaaaataccagcagcagcaacagttctactcgtgggactcaaaatcagctacgttgtgagctctgcgatgtgtcttgtacaggagcagatgcgtatgctgcccacattcgtggtgctaagcatcagaaagtggttaagttacacacaaaacttggtaaacccattccatcaacagaaccaaatgttgttagccaagctacttcttcaacagctgtatctgcttcaaagccgactgcctctccttcaagcattgcagcaaacaattgtactgtgaatacgtcatcaattgcaacgtcttcaatgaagggtcttacgactacaggaaactcgtctcttaatagcacatctaacactaaagtatcagcagtgcctacaaatatggctgccaagaaaacatctacccccaaaataaattttgttggtggtaataagctgcagtcaacaggaaataaagcagaagacataaaaggaaccgaatgtgttaaaagtactcctgtcacttctgctgtgcagattcctgaagtaaagcaagacacagtgtcagaaccagtcacacctgcatctcttgctgctttacagagtgatgtgcagccagtgggccatgattatgtggaagaggtacgaaatgatgaaggaaaagtaattcggttccattgtaaattatgcgagtgcagctttaatgatcccaatgctaaggagatgcacttaaaagggcgaagacacagacttcaatataaaattcaagaagagaaaatgaggaagcaaatgcagaaggaggagtactggcgaagacgagaagaagaggagcgttggagaatggaaatgagacgttatgaagaggacatgtactggaggagaatggaggaagaacaacatcattgggatgatcgccgccgaatgccagatggaggttatcctcatggtcctccaggcccattaggccttctgggagtccgaccaggcatgcctcctcagcctcaggggcctgcacccttacgtcgtcctgactcatctgatgaccgttatgtaatgacaaaacatgccaccatttatccaactgaagaggagttacaggcagttcagaaaattgtttctattactgaacgtgctttaaaactcgtttcagacagtttgtctgaacatgagaagaacaagaacaaagagggagatgataagaaagagggaggtaaagacagagctttgaaaggagttttgcgagtgggagtattggcaaaaggattacttctccgaggagatagaaatgtcaaccttgttttgctgtgctcagagaaaccttcaaagacattattaagccgtattgcagaaaacctacccaaacagcttgctgttataagccctgagaagtatgacataaaatgtgctgtatctgaagcggcaataattttgaattcatgtgtggaacccaaaatgcaagtcactatcacactgacatctccaattattcgagaagagaacatgagggaaggagatgtaacctcgggtatggtgaaagacccaccggacgtcttggacaggcaaaaatgccttgacgctctggctgctctacgccacgctaagtggttccaggctagagctaatggtctgcagtcctgtgtgattatcatacgcattcttcgagacctctgtcagcgagttccaacttggtctgattttccaagctgggctatggagttactagtagagaaagcaatcagcagtgcttctagccctcagagccctggggatgcactgagaagagtttttgaatgcatttcttcagggattattcttaaaggtagtcctggacttctggatccttgtgaaaaggatccctttgataccttggcaacaatgactgaccagcagcgtgaagacatcacatccagtgcacagtttgcattgagactccttgcattccgccagatacacaaagttctaggcatggatccattaccgcaaatgagccaacgttttaacatccacaacaacaggaaacgaagaagagatagtgatggagttgatggatttgaagctgaggggaaaaaagacaaaaaagattatgataacttttaaaaagtgtctgtaaatcttcagtgttaaaaaaacagatgcccatttgttggctgtttttcattcataataatgtctacattgaaaaatttatcaagaatttaaaggatttcatggaagaaccaagtttttctatgatattaaaaaatgtacagtgttaggtattatttgaatggaaagacacccaaaaaaaaaaatgtgctccgactagggggaaaacagtagttccgattttttcccattatttttattttattttctggttgccctagcttccccccctatttttgtgtcttttattaactagtgcattgtcttattaaatcttcactgtatttaatgcaggatgtgtgcttcagttgctctgtgtattttgatattttaatttagaggttttgtttgctttttgacactagttgtaagttactttgttatagatggtatcctttaccccttcttaatattttacagcagtacgtttttttgtaacgtgagactgcagagtttgtttttctatatgtgaaggattacaacacaaaaagttatcctgccattcgagtgctcagaactgaatgtttctgcagatcttgtggcatttgtctctagtgtgatatataaaggtgtaattaagacagagttctgttaatctaatcaagtttgctgttagttgtgcattagcagtataaaagctaatatatactatatggtcttgcaacagttttaaagcctctgcataattgataataaaaatgcatgacattcttgtttttaatagacttttaaaatcataattttaggtttaacacgtagatctttgtacagttgactttttgacatagcaaggccaaaaataactttctgaatatttttttcttgtgtataagtggaaagggcatttttcacatataagtgggctaaccaatattttcaaaagaacttcatcattgtacaactaacaacagtaactagcccttaattatggtgacagttccttattggtgtgtgtgagattactctagcaactattacagtataacacagatgatcttctccacacaccccatcacccagataatttacagttctgttaacagtgaggttgataaagtattactgataaaaaattatctaaggaaaaaaacagaaaattatttggtgtggccatcttacctgcttatgtctcctacacaaagctaaatattctagcagtgatgtaatgaaaaattacatcttactgttgatatatgtatgctctggtacacagatgtcattttgttgtcacagcactacagtgaaatacacaaaaaatgaaattcatataatgacttaaatgtattatatgttagaattgacaacataaactacttttgctttgaaatgatgtatgcttcagtaaaatcatattcaaattta

SEQ ID NO: 343195 - DNA, 4526 bp, Homo sapiens
ctagttctgttctctggagcagcatggaccagcagccagcttcgggtgtagcctattctcatccaactacagttgctagctacactgtccatcaggctccagtagctgctcacacagttactgctgcctatgcaccagcagccgccacagttgcagttgccaggcctgctccagtagctgttgcagctgctgcaacagctgctgcttatggaggctaccccactgcacacacagcaactgactatggttatactcagaggcaacaagaagcaccaccaccaccacccccagctactacacaaaactaccaggattcatactcatatgtaaggtccacagctcctgctgtagcttatgatagtaagcaatactaccaacaaccaacagcaactgctgctgctgtagctgccgctgcccaacctcagccttctgttgctgaaacttactatcagacagcccccaaagcaggttacagccaaggtgcaactcagtatactcaagcccagcaaactcgacaagtgacagccataaaaccagccacaccaagtccagctaccactactttctccatctatcctgtatcctccaccgtacagccagtagcagctgcggctactgtggtgccatcctatactcagagtgctacttacagtaccacagcagttacatattctggtacgtcttattcaggttatgaagcagcagtgtattcagctgcatcttcctactatcaacagcagcagcagcaacagaagcaggcagcagcagcagctgctgctgctgctgcaacagctgcctggacagggaccacctttactaaaaaagcaccattccaaaataaacaactgaaaccaaaacagcctcccaaaccaccacagattcactattgtgatgtttgtaagatcagctgtgctggaccacagacttataaagaacatttagaaggacagaaacataaaaaaaaagaagctgcattgaaagcctcacaaaataccagcagcagcaacagttctactcgtgggactcaaaatcagctacgttgtgagctctgcgatgtgtcttgtacaggagcagatgcgtatgctgcccacattcgtggtgctaagcatcagaaagtggttaagttacacacaaaacttggtaaacccattccatcaacagaaccaaatgttgttagccaagctacttcttcaacagctgtatctgcttcaaagccgactgcctctccttcaagcattgcagcaaacaattgtactgtgaatacgtcatcaattgcaacgtcttcaatgaagggtcttacgactacaggaaactcgtctcttaatagcacatctaacactaaagtatcagcagtgcctacaaatatggctgccaagaaaacatctacccccaaaataaattttgttggtggtaataagctgcagtcaacaggaaataaagcagaagacataaaaggaaccgaatgtgttaaaagtactcctgtcacttctgctgtgcagattcctgaagtaaagcaagacacagtgtcagaaccagtcacacctgcatctcttgctgctttacagagtgatgtgcagccagtgggccatgattatgtggaagaggtacgaaatgatgaaggaaaagtaattcggttccattgtaaattatgcgagtgcagctttaatgatcccaatgctaaggagatgcacttaaaagggcgaagacacagacttcaatataaaaaaaaagtaaatccagatttgcaagtagaagtaaagcctagtattcgagcaagaaagattcaagaagagaaaatgaggaagcaaatgcagaaggaggagtactggcgaagacgagaagaagaggagcgttggagaatggaaatgagacgttatgaagaggacatgtactggaggagaatggaggaagaacaacatcattgggatgatcgccgccgaatgccagatggaggttatcctcatggtcctccaggcccattaggccttctgggagtccgaccaggcatgcctcctcagcctcaggggcctgcacccttacgtcgtcctgactcatctgatgaccgttatgtaatgacaaaacatgccaccatttatccaactgaagaggagttacaggcagttcagaaaattgtttctattactgaacgtgctttaaaactcgtttcagacagtttgtctgaacatgagaagaacaagaacaaagagggagatgataagaaagagggaggtaaagacagagctttgaaaggagttttgcgagtgggagtattggcaaaaggattacttctccgaggagatagaaatgtcaaccttgttttgctgtgctcagagaaaccttcaaagacattattaagccgtattgcagaaaacctacccaaacagcttgctgttataagccctgagaagtatgacataaaatgtgctgtatctgaagcggcaataattttgaattcatgtgtggaacccaaaatgcaagtcactatcacactgacatctccaattattcgagaagagaacatgagggaaggagatgtaacctcgggtatggtgaaagacccaccggacgtcttggacaggcaaaaatgccttgacgctctggctgctctacgccacgctaagtggttccaggctagagctaatggtctgcagtcctgtgtgattatcatacgcattcttcgagacctctgtcagcgagttccaacttggtctgattttccaagctgggctatggagttactagtagagaaagcaatcagcagtgcttctagccctcagagccctggggatgcactgagaagagtttttgaatgcatttcttcagggattattcttaaaggtagtcctggacttctggatccttgtgaaaaggatccctttgataccttggcaacaatgactgaccagcagcgtgaagacatcacatccagtgcacagtttgcattgagactccttgcattccgccagatacacaaagttctaggcatggatccattaccgcaaatgagccaacgttttaacatccacaacaacaggaaacgaagaagagatagtgatggagttgatggatttgaagctgaggggaaaaaagacaaaaaagattatgataacttttaaaaagtgtctgtaaatcttcagtgttaaaaaaacagatgcccatttgttggctgtttttcattcataataatgtctacattgaaaaatttatcaagaatttaaaggatttcatggaagaaccaagtttttctatgatattaaaaaatgtacagtgttaggtattatttgaatggaaagacacccaaaaaaaaaaatgtgctccgactagggggaaaacagtagttccgattttttcccattatttttattttattttctggttgccctagcttccccccctatttttgtgtcttttattaactagtgcattgtcttattaaatcttcactgtatttaatgcaggatgtgtgcttcagttgctctgtgtattttgatattttaatttagaggttttgtttgctttttgacactagttgtaagttactttgttatagatggtatcctttaccccttcttaatattttacagcagtacgtttttttgtaacgtgagactgcagagtttgtttttctatatgtgaaggattacaacacaaaaagttatcctgccattcgagtgctcagaactgaatgtttctgcagatcttgtggcatttgtctctagtgtgatatataaaggtgtaattaagacagagttctgttaatctaatcaagtttgctgttagttgtgcattagcagtataaaagctaatatatactatatggtcttgcaacagttttaaagcctctgcataattgataataaaaatgcatgacattcttgtttttaatagacttttaaaatcataattttaggtttaacacgtagatctttgtacagttgactttttgacatagcaaggccaaaaataactttctgaatatttttttcttgtgtataagtggaaagggcatttttcacatataagtgggctaaccaatattttcaaaagaacttcatcattgtacaactaacaacagtaactagcccttaattatggtgacagttccttattggtgtgtgtgagattactctagcaactattacagtataacacagatgatcttctccacacaccccatcacccagataatttacagttctgttaacagtgaggttgataaagtattactgataaaaaattatctaaggaaaaaaacagaaaattatttggtgtggccatcttacctgcttatgtctcctacacaaagctaaatattctagcagtgatgtaatgaaaaattacatcttactgttgatatatgtatgctctggtacacagatgtcattttgttgtcacagcactacagtgaaatacacaaaaaatgaaattcatataatgacttaaatgtattatatgttagaattgacaacataaactacttttgctttgaaatgatgtatgcttcagtaaaatcatattcaaattta

SEQ ID NO: 343196 - DNA, 4356 bp, Homo sapiens
tgttctccgctgaggaggagcggggcagaggagggaggcagcgggtgagagttcagagttcagcagcagcagcccgagcccatgattcccatatgccctgtagtttctttcacctatgtgcccagccggctgggggaagatgccaaaatggcgaccggcaactactttggattcacccacagcggggcggcggcggcggcggctgcggcccaatatagccagcagccagcttcgggtgtagcctattctcatccaactacagttgctagctacactgtccatcaggctccagtagctgctcacacagttactgctgcctatgcaccagcagccgccacagttgcagttgccaggcctgctccagtagctgttgcagctgctgcaacagctgctgcttatggaggctaccccactgcacacacagcaactgactatggttatactcagaggcaacaagaagcaccaccaccaccacccccagctactacacaaaactaccaggattcatactcatatgtaaggtccacagctcctgctgtagcttatgatagtaagcaatactaccaacaacagcagcaacagaagcaggcagcagcagcagctgctgctgctgctgcaacagctgcctggacagggaccacctttactaaaaaagcaccattccaaaataaacaactgaaaccaaaacagcctcccaaaccaccacagattcactattgtgatgtttgtaagatcagctgtgctggaccacagacttataaagaacatttagaaggacagaaacataaaaaaaaagaagctgcattgaaagcctcacaaaataccagcagcagcaacagttctactcgtgggactcaaaatcagctacgttgtgagctctgcgatgtgtcttgtacaggagcagatgcgtatgctgcccacattcgtggtgctaagcatcagaaagtggttaagttacacacaaaacttggtaaacccattccatcaacagaaccaaatgttgttagccaagctacttcttcaacagctgtatctgcttcaaagccgactgcctctccttcaagcattgcagcaaacaattgtactgtgaatacgtcatcaattgcaacgtcttcaatgaagggtcttacgactacaggaaactcgtctcttaatagcacatctaacactaaagtatcagcagtgcctacaaatatggctgccaagaaaacatctacccccaaaataaattttgttggtggtaataagctgcagtcaacaggaaataaagcagaagacataaaaggaaccgaatgtgttaaaagtactcctgtcacttctgctgtgcagattcctgaagtaaagcaagacacagtgtcagaaccagtcacacctgcatctcttgctgctttacagagtgatgtgcagccagtgggccatgattatgtggaagaggtacgaaatgatgaaggaaaagtaattcggttccattgtaaattatgcgagtgcagctttaatgatcccaatgctaaggagatgcacttaaaagggcgaagacacagacttcaatataaaaaaaaagtaaatccagatttgcaagtagaagtaaagcctagtattcgagcaagaaagattcaagaagagaaaatgaggaagcaaatgcagaaggaggagtactggcgaagacgagaagaagaggagcgttggagaatggaaatgagacgttatgaagaggacatgtactggaggagaatggaggaagaacaacatcattgggatgatcgccgccgaatgccagatggaggttatcctcatggtcctccaggcccattaggccttctgggagtccgaccaggcatgcctcctcagcctcaggggcctgcacccttacgtcgtcctgactcatctgatgaccgttatgtaatgacaaaacatgccaccatttatccaactgaagaggagttacaggcagttcagaaaattgtttctattactgaacgtgctttaaaactcgtttcagacagtttgtctgaacatgagaagaacaagaacaaagagggagatgataagaaagagggaggtaaagacagagctttgaaaggagttttgcgagtgggagtattggcaaaaggattacttctccgaggagatagaaatgtcaaccttgttttgctgtgctcagagaaaccttcaaagacattattaagccgtattgcagaaaacctacccaaacagcttgctgttataagccctgagaagtatgacataaaatgtgctgtatctgaagcggcaataattttgaattcatgtgtggaacccaaaatgcaagtcactatcacactgacatctccaattattcgagaagagaacatgagggaaggagatgtaacctcgggtatggtgaaagacccaccggacgtcttggacaggcaaaaatgccttgacgctctggctgctctacgccacgctaagtggttccaggctagagctaatggtctgcagtcctgtgtgattatcatacgcattcttcgagacctctgtcagcgagttccaacttggtctgattttccaagctgggctatggagttactagtagagaaagcaatcagcagtgcttctagccctcagagccctggggatgcactgagaagagtttttgaatgcatttcttcagggattattcttaaaggtagtcctggacttctggatccttgtgaaaaggatccctttgataccttggcaacaatgactgaccagcagcgtgaagacatcacatccagtgcacagtttgcattgagactccttgcattccgccagatacacaaagttctaggcatggatccattaccgcaaatgagccaacgttttaacatccacaacaacaggaaacgaagaagagatagtgatggagttgatggatttgaagctgaggggaaaaaagacaaaaaagattatgataacttttaaaaagtgtctgtaaatcttcagtgttaaaaaaacagatgcccatttgttggctgtttttcattcataataatgtctacattgaaaaatttatcaagaatttaaaggatttcatggaagaaccaagtttttctatgatattaaaaaatgtacagtgttaggtattatttgaatggaaagacacccaaaaaaaaaaatgtgctccgactagggggaaaacagtagttccgattttttcccattatttttattttattttctggttgccctagcttccccccctatttttgtgtcttttattaactagtgcattgtcttattaaatcttcactgtatttaatgcaggatgtgtgcttcagttgctctgtgtattttgatattttaatttagaggttttgtttgctttttgacactagttgtaagttactttgttatagatggtatcctttaccccttcttaatattttacagcagtacgtttttttgtaacgtgagactgcagagtttgtttttctatatgtgaaggattacaacacaaaaagttatcctgccattcgagtgctcagaactgaatgtttctgcagatcttgtggcatttgtctctagtgtgatatataaaggtgtaattaagacagagttctgttaatctaatcaagtttgctgttagttgtgcattagcagtataaaagctaatatatactatatggtcttgcaacagttttaaagcctctgcataattgataataaaaatgcatgacattcttgtttttaatagacttttaaaatcataattttaggtttaacacgtagatctttgtacagttgactttttgacatagcaaggccaaaaataactttctgaatatttttttcttgtgtataagtggaaagggcatttttcacatataagtgggctaaccaatattttcaaaagaacttcatcattgtacaactaacaacagtaactagcccttaattatggtgacagttccttattggtgtgtgtgagattactctagcaactattacagtataacacagatgatcttctccacacaccccatcacccagataatttacagttctgttaacagtgaggttgataaagtattactgataaaaaattatctaaggaaaaaaacagaaaattatttggtgtggccatcttacctgcttatgtctcctacacaaagctaaatattctagcagtgatgtaatgaaaaattacatcttactgttgatatatgtatgctctggtacacagatgtcattttgttgtcacagcactacagtgaaatacacaaaaaatgaaattcatataatgacttaaatgtattatatgttagaattgacaacataaactacttttgctttgaaatgatgtatgcttcagtaaaatcatattcaaattta

SEQ ID NO: 343197 - DNA, 5409 bp, Homo sapiens
tgttctccgctgaggaggagcggggcagaggagggaggcagcgggtgagagttcagagttcagcagcagcagcccgagcccatgattcccatatgccctgtagtttctttcacctatgtgcccagccggctgggggaagatgccaaaatggcgaccggcaactactttggattcacccacagcggggcggcggcggcggcggctgcggcccaatatagccagcagccagcttcgggtgtagcctattctcatccaactacagttgctagctacactgtccatcaggctccagtagctgctcacacagttactgctgcctatgcaccagcagccgccacagttgcagttgccaggcctgctccagtagctgttgcagctgctgcaacagctgctgcttatggaggctaccccactgcacacacagcaactgactatggttatactcagaggcaacaagaagcaccaccaccaccacccccagctactacacaaaactaccaggattcatactcatatgtaaggtccacagctcctgctgtagcttatgatagtaagcaatactaccaacaaccaacagcaactgctgctgctgtagctgccgctgcccaacctcagccttctgttgctgaaacttactatcagacagcccccaaagcaggttacagccaaggtgcaactcagtatactcaagcccagcaaactcgacaagtgacagccataaaaccagccacaccaagtccagctaccactactttctccatctatcctgtatcctccaccgtacagccagtagcagctgcggctactgtggtgccatcctatactcagagtgctacttacagtaccacagcagttacatattctggtacgtcttattcaggttatgaagcagcagtgtattcagctgcatcttcctactatcaacagcagcagcagcaacagaagcaggcagcagcagcagctgctgctgctgctgcaacagctgcctggacagggaccacctttactaaaaaagcaccattccaaaataaacaactgaaaccaaaacagcctcccaaaccaccacagattcactattgtgatgtttgtaagatcagctgtgctggaccacagacttataaagaacatttagaaggacagaaacataaaaaaaaagaagctgcattgaaagcctcacaaaataccagcagcagcaacagttctactcgtgggactcaaaatcagctacgttgtgagctctgcgatgtgtcttgtacaggagcagatgcgtatgctgcccacattcgtggtgctaagcatcagaaagtggttaagttacacacaaaacttggtaaacccattccatcaacagaaccaaatgttgttagccaagctacttcttcaacagctgtatctgcttcaaagccgactgcctctccttcaagcattgcagcaaacaattgtactgtgaatacgtcatcaattgcaacgtcttcaatgaagggtcttacgactacaggaaactcgtctcttaatagcacatctaacactaaagtatcagcagtgcctacaaatatggctgccaagaaaacatctacccccaaaataaattttgttggtggtaataagctgcagtcaacaggaaataaagcagaagacataaaaggaaccgaatgtgttaaaagtactcctgtcacttctgctgtgcagattcctgaagtaaagcaagacacagtgtcagaaccagtcacacctgcatctcttgctgctttacagagtgatgtgcagccagtgggccatgattatgtggaagaggtacgaaatgatgaaggaaaagtaattcggttccattgtaaattatgcgagtgcagctttaatgatcccaatgctaaggagatgcacttaaaagggcgaagacacagacttcaatataaaaaaaaagtaaatccagatttgcaagtagaagtaaagcctagtattcgagcaagaaagattcaagaagagaaaatgaggaagcaaatgcagaaggaggagtactggcgaagacgagaagaagaggagcgttggagaatggaaatgagacgttatgaagaggacatgtactggaggagaatggaggaagaacaacatcattgggatgatcgccgccgaatgccagatggaggttatcctcatggtcctccaggcccattaggccttctgggagtccgaccaggcatgcctcctcagcctcaggggcctgcacccttacgtcgtcctgactcatctgatgaccgttatgtaatgacaaaacatgccaccatttatccaactgaagaggagttacaggcagttcagaaaattgtttctattactgaacgtgctttaaaactcgtttcagacagtttgtctgaacatgagaagaacaagaacaaagagggagatgataagaaagagggaggtaaagacagagctttgaaaggagttttgcgagtgggagtattggcaaaaggattacttctccgaggagatagaaatgtcaaccttgttttgctgtgctcagagaaaccttcaaagacattattaagccgtattgcagaaaacctacccaaacagcttgctgttataagccctgagaagtatgacataaaatgtgctgtatctgaagcggcaataattttgaattcatgtgtggaacccaaaatgcaagtcactatcacactgacatctccaattattcgagaagagaacatgagggaaggagatgtaacctcgggtatggtgaaagacccaccggacgtcttggacaggcaaaaatgccttgacgctctggctgctctacgccacgctaagtggttccaggctagagctaatggtctgcagtcctgtgtgattatcatacgcattcttcgagacctctgtcagcgagttccaacttggtctgattttccaagctgggctatggagttactagtagagaaagcaatcagcagtgcttctagccctcagagccctggggatgcactgagaagagtttttgaatgcatttcttcagggattattcttaaaggtagtcctggacttctggatccttgtgaaaaggatccctttgataccttggcaacaatgactgaccagcagcgtgaagacatcacatccagtgcacagtttgcattgagactccttgcattccgccagatacacaaagttctaggcatggatccattaccgcaaatgagccaacgttttaacatccacaacaacaggaaacgaagaagagatagtgatggagttgatggatttgaagctgaggggaaaaaagacaaaaaagattatgataacttttaaaaagtgtctgtaaatcttcagtgttaaaaaaacagatgcccatttgttggctgtttttcattcataataatgtctacattgaaaaatttatcaagaatttaaaggatttcatggaagaaccaagtttttctatgatattaaaaaatgtacagtgttaggtattatttgaatggaaagacacccaaaaaaaaaaatgtgctccgactagggggaaaacagtagttccgattttttcccattatttttattttattttctggttgccctagcttccccccctatttttgtgtcttttattaactagtgcattgtcttattaaatcttcactgtatttaatgcaggatgtgtgcttcagttgctctgtgtattttgatattttaatttagaggttttgtttgctttttgacactagttgtaagttactttgttatagatggtatcctttaccccttcttaatattttacagcagtacgtttttttgtaacgtgagactgcagagtttgtttttctatatgtgaaggattacaacacaaaaagttatcctgccattcgagtgctcagaactgaatgtttctgcagatcttgtggcatttgtctctagtgtgatatataaaggtgtaattaagacagagttctgttaatctaatcaagtttgctgttagttgtgcattagcagtataaaagctaatatatactatatggtcttgcaacagttttaaagcctctgcataattgataataaaaatgcatgacattcttgtttttaatagacttttaaaatcataattttaggtttaacacgtagatctttgtacagttgactttttgacatagcaaggccaaaaataactttctgaatatttttttcttgtgtataagtggaaagggcatttttcacatataagtgggctaaccaatattttcaaaagaacttcatcattgtacaactaacaacagtaactagcccttaattatggtgacagttccttattggtgtgtgtgagattactctagcaactattacagtataacacagatgatcttctccacacaccccatcacccagataatttacagttctgttaacagtgaggttgataaagtattactgataaaaaattatctaaggaaaaaaacagaaaattatttggtgtggccatcttacctgcttatgtctcctacacaaagctaaatattctagcagtgatgtaatgaaaaattacatcttactgttgatatatgtatgctctggtacacagatgtcattttgttgtcacagcactacagtgaaatacacaaaaaatgaaattcatataatgacttaaatgtattatatgttagaattgacaacataaactacttttgctttgaaatgatgtatgcttcagtaaaatcatattcaaatttaaaaaaaaaaaacaaaaaaacaaaaaaagaaacaaaaaaaaaaaaaaaaacaacaaaaaacaaaaaacaacacacacaaaacaaaaacaaaacacacaaagaaaaaaacacaaacacacagaggggggggcggcgcgccctacaaaatcaataccaacagaggagggagccaacaaatcatgagaggagacgagcgcaccaaaatatttgtaagacaagaaggagcgcgccccacaagagagaggaggcacgctaatatcaacaagacagcaacccgacgcgaggcagcggcgacgacaaaaaaacaacagtcgatgtgtgcaagcggagacaaaaagacacctactcagggagaactacatcaccgggagcaaaggaaagaaccaaccaacatacaagatgggctgggggaggggaacaaaaaaacataacgagggcgcaaacaacaaccacaacccaaggcggagagagaaagatgacaagagccacgcaagagagggagcaagcaaaaacaaaaaaacaccccaaacgagagcaggcacaccaccaggcggtcgtagacacacaacaagcagcagaaacaaacaatagacagcgcccgtacgcgaaacaaaaaacgacgaggcgaccatgaggagagatcagatgatacgctccaaaaagcaacaaaatatcacaacacacgacaaaggaa

SEQ ID NO: 343198 - DNA, 4661 bp, Homo sapiens
tgttctccgctgaggaggagcggggcagaggagggaggcagcgggtgagagttcagagttcagcagcagcagcccgagcccatgattcccatatgccctgtagtttctttcacctatgtgcccagccggctgggggaagatgccaaaatggcgaccggcaactactttggattcacccacagcggggcggcggcggcggcggctgcggcccaatatagccagcagccagcttcgggtgtagcctattctcatccaactacagttgctagctacactgtccatcaggctccagtagctgctcacacagttactgctgcctatgcaccagcagccgccacagttgcagttgccaggcctgctccagtagctgttgcagctgctgcaacagctgctgcttatggaggctaccccactgcacacacagcaactgactatggttatactcagaggcaacaagaagcaccaccaccaccacccccagctactacacaaaactaccaggattcatactcatatgtaaggtccacagctcctgctgtagcttatgatagtaagcaatactaccaacaaccaacagcaactgctgctgctgtagctgccgctgcccaacctcagccttctgttgctgaaacttactatcagacagcccccaaagcaggttacagccaaggtgcaactcagtatactcaagcccagcaaactcgacaagtgacagccataaaaccagccacaccaagtccagctaccactactttctccatctatcctgtatcctccaccgtacagccagtagcagctgcggctactgtggtgccatcctatactcagagtgctacttacagtaccacagcagttacatattctggtacgtcttattcaggttatgaagcagcagtgtattcagctgcatcttcctactatcaacagcagcagcagcaacagaagcaggcagcagcagcagctgctgctgctgctgcaacagctgcctggacagggaccacctttactaaaaaagcaccattccaaaataaacaactgaaaccaaaacagcctcccaaaccaccacagattcactattgtgatgtttgtaagatcagctgtgctggaccacagacttataaagaacatttagaaggacagaaacataaaaaaaaagaagctgcattgaaagcctcacaaaataccagcagcagcaacagttctactcgtgggactcaaaatcagctacgttgtgagctctgcgatgtgtcttgtacaggagcagatgcgtatgctgcccacattcgtggtgctaagcatcagaaagtggttaagttacacacaaaacttggtaaacccattccatcaacagaaccaaatgttgttagccaagctacttcttcaacagctgtatctgcttcaaagccgactgcctctccttcaagcattgcagcaaacaattgtactgtgaatacgtcatcaattgcaacgtcttcaatgaagggtcttacgactacaggaaactcgtctcttaatagcacatctaacactaaagtatcagcagtgcctacaaatatggctgccaagaaaacatctacccccaaaataaattttgttggtggtaataagctgcagtcaacaggaaataaagcagaagacataaaaggaaccgaatgtgttaaaagtactcctgtcacttctgctgtgcagattcctgaagtaaagcaagacacagtgtcagaaccagtcacacctgcatctcttgctgctttacagagtgatgtgcagccagtgggccatgattatgtggaagaggtacgaaatgatgaaggaaaagtaattcggttccattgtaaattatgcgagtgcagctttaatgatcccaatgctaaggagatgcacttaaaagggcgaagacacagacttcaatataaaaaaaaagtaaatccagatttgcaagtagaagtaaagcctagtattcgagcaagaaagattcaagaagagaaaatgaggaagcaaatgcagaaggaggagtactggcgaagacgagaagaagaggagcgttggagaatggaaatgagacgttatgaagaggacatgtactggaggagaatggaggaagaacaacatcattgggatgatcgccgccgaatgccagatggaggttatcctcatggtcctccaggcccattaggccttctgggagtccgaccaggcatgcctcctcagcctcaggggcctgcacccttacgtcgtcctgactcatctgatgaccgttatgtaatgacaaaacatgccaccatttatccaactgaagaggagttacaggcagttcagaaaattgtttctattactgaacgtgctttaaaactcgtttcagacagtttgtctgaacatgagaagaacaagaacaaagagggagatgataagaaagagggaggtaaagacagagctttgaaaggagttttgcgagtgggagtattggcaaaaggattacttctccgaggagatagaaatgtcaaccttgttttgctgtgctcagagaaaccttcaaagacattattaagccgtattgcagaaaacctacccaaacagcttgctgttataagccctgagaagtatgacataaaatgtgctgtatctgaagcggcaataattttgaattcatgtgtggaacccaaaatgcaagtcactatcacactgacatctccaattattcgagaagagaacatgagggaaggagatgtaacctcgggtatggtgaaagacccaccggacgtcttggacaggcaaaaatgccttgacgctctggctgctctacgccacgctaagtggttccaggctagagctaatggtctgcagtcctgtgtgattatcatacgcattcttcgagacctctgtcagcgagttccaacttggtctgattttccaagctgggctatggagttactagtagagaaagcaatcagcagtgcttctagccctcagagccctggggatgcactgagaagagtttttgaatgcatttcttcagggattattcttaaaggtagtcctggacttctggatccttgtgaaaaggatccctttgataccttggcaacaatgactgaccagcagcgtgaagacatcacatccagtgcacagtttgcattgagactccttgcattccgccagatacacaaagttctaggcatggatccattaccgcaaatgagccaacgttttaacatccacaacaacaggaaacgaagaagagatagtgatggagttgatggatttgaagctgaggggaaaaaagacaaaaaagattatgataacttttaaaaagtgtctgtaaatcttcagtgttaaaaaaacagatgcccatttgttggctgtttttcattcataataatgtctacattgaaaaatttatcaagaatttaaaggatttcatggaagaaccaagtttttctatgatattaaaaaatgtacagtgttaggtattatttgaatggaaagacacccaaaaaaaaaaatgtgctccgactagggggaacttccccccctatttttgtgtcttttattaactagtgcattgtcttattaaatcttcactgtatttaatgcaggatgtgtgcttcagttgctctgtgtattttgatattttaatttagaggttttgtttgctttttgacactagttgtaagttactttgttatagatggtatcctttaccccttcttaatattttacagcagtacgtttttttgtaacgtgagactgcagagtttgtttttctatatgtgaaggattacaacacaaaaagttatcctgccattcgagtgctcagaactgaatgtttctgcagatcttgtggcatttgtctctagtgtgatatataaaggtgtaattaagacagagttctgttaatctaatcaagtttgctgttagttgtgcattagcagtataaaagctaatatatactatatggtcttgcaacagttttaaagcctctgcataattgataataaaaatgcatgacattcttgtttttaatagacttttaaaatcataattttaggtttaacacgtagatctttgtacagttgactttttgacatagcaaggccaaaaataactttctgaatatttttttcttgtgtataagtggaaagggcatttttcacatataagtgggctaaccaatattttcaaaagaacttcatcattgtacaactaacaacagtaactagcccttaattatggtgacagttccttattggtgtgtgtgagattactctagcaactattacagtataacacagatgatcttctccacacaccccatcacccagataatttacagttctgttaacagtgaggttgataaagtattactgataaaaaattatctaaggaaaaaaacagaaaattatttggtgtggccatcttacctgcttatgtctcctacacaaagctaaatattctagcagtgatgtaatgaaaaattacatcttactgttgatatatgtatgctctggtacacagatgtcattttgttgtcacagcactacagtgaaatacacaaaaaatgaaattcatataatgacttaaatgtattatatgttagaattgacaacataaactacttttgctttgaaatgatgtatgcttcagtaaaatcatattcaaattta

SEQ ID NO: 343199 - DNA, 1789 bp, Homo sapiens
ctcacattttacatgtaatttattcacagagagttaatgtagcatgcgggtccctttatcagttgtgaaagtaattcctttaaatgtttctttcattacacatgcttttttaggttgcatttggagggaggtaaatgtagtaagtattactacttggggtttttcaattaactcaaaattctgactctctttgttgcagtttgcattgagactccttgcattccgccagatacacaaagttctaggcatggatccattaccgcaaatgagccaacgttttaacatccacaacaacaggaaacgaagaagagatagtgatggagttgatggatttgaagctgaggggaaaaaagacaaaaaagattatgataacttttaaaaagtgtctgtaaatcttcagtgttaaaaaaacagatgcccatttgttggctgtttttcattcataataatgtctacattgaaaaatttatcaagaatttaaaggatttcatggaagaaccaagtttttctatgatattaaaaaatgtacagtgttaggtattatttgaatggaaagacacccaaaaaaaaaaatgtgctccgactagggggaaaacagtagttccgattttttcccattatttttattttattttctggttgccctagcttccccccctatttttgtgtcttttattaactagtgcattgtcttattaaatcttcactgtatttaatgcaggatgtgtgcttcagttgctctgtgtattttgatattttaatttagaggttttgtttgctttttgacactagttgtaagttactttgttatagatggtatcctttaccccttcttaatattttacagcagtacgtttttttgtaacgtgagactgcagagtttgtttttctatatgtgaaggattacaacacaaaaagttatcctgccattcgagtgctcagaactgaatgtttctgcagatcttgtggcatttgtctctagtgtgatatataaaggtgtaattaagacagagttctgttaatctaatcaagtttgctgttagttgtgcattagcagtataaaagctaatatatactatatggtcttgcaacagttttaaagcctctgcataattgataataaaaatgcatgacattcttgtttttaatagacttttaaaatcataattttaggtttaacacgtagatctttgtacagttgactttttgacatagcaaggccaaaaataactttctgaatatttttttcttgtgtataagtggaaagggcatttttcacatataagtgggctaaccaatattttcaaaagaacttcatcattgtacaactaacaacagtaactagcccttaattatggtgacagttccttattggtgtgtgtgagattactctagcaactattacagtataacacagatgatcttctccacacaccccatcacccagataatttacagttctgttaacagtgaggttgataaagtattactgataaaaaattatctaaggaaaaaaacagaaaattatttggtgtggccatcttacctgcttatgtctcctacacaaagctaaatattctagcagtgatgtaatgaaaaattacatcttactgttgatatatgtatgctctggtacacagatgtcattttgttgtcacagcactacagtgaaatacacaaaaaatgaaattcatataatgacttaaatgtattatatgttagaattgacaacataaactacttttgctttgaaatgatgtatgcttcagtaaaatcatattcaaattta

SEQ ID NO: 343200 - DNA, 1613 bp, Homo sapiens
cctcagcttcaaatccatcaactccatcactatctcttcttcgtttcctgttgttgtggatgttaaaacgcatggatccattaccgcaaatgagccaacgttttaacatccacaacaacaggaaacgaagaagagatagtgatggagttgatggatttgaagctgaggggaaaaaagacaaaaaagattatgataacttttaaaaagtgtctgtaaatcttcagtgttaaaaaaacagatgcccatttgttggctgtttttcattcataataatgtctacattgaaaaatttatcaagaatttaaaggatttcatggaagaaccaagtttttctatgatattaaaaaatgtacagtgttaggtattatttgaatggaaagacacccaaaaaaaaaaatgtgctccgactagggggaaaacagtagttccgattttttcccattatttttattttattttctggttgccctagcttccccccctatttttgtgtcttttattaactagtgcattgtcttattaaatcttcactgtatttaatgcaggatgtgtgcttcagttgctctgtgtattttgatattttaatttagaggttttgtttgctttttgacactagttgtaagttactttgttatagatggtatcctttaccccttcttaatattttacagcagtacgtttttttgtaacgtgagactgcagagtttgtttttctatatgtgaaggattacaacacaaaaagttatcctgccattcgagtgctcagaactgaatgtttctgcagatcttgtggcatttgtctctagtgtgatatataaaggtgtaattaagacagagttctgttaatctaatcaagtttgctgttagttgtgcattagcagtataaaagctaatatatactatatggtcttgcaacagttttaaagcctctgcataattgataataaaaatgcatgacattcttgtttttaatagacttttaaaatcataattttaggtttaacacgtagatctttgtacagttgactttttgacatagcaaggccaaaaataactttctgaatatttttttcttgtgtataagtggaaagggcatttttcacatataagtgggctaaccaatattttcaaaagaacttcatcattgtacaactaacaacagtaactagcccttaattatggtgacagttccttattggtgtgtgtgagattactctagcaactattacagtataacacagatgatcttctccacacaccccatcacccagataatttacagttctgttaacagtgaggttgataaagtattactgataaaaaattatctaaggaaaaaaacagaaaattatttggtgtggccatcttacctgcttatgtctcctacacaaagctaaatattctagcagtgatgtaatgaaaaattacatcttactgttgatatatgtatgctctggtacacagatgtcattttgttgtcacagcactacagtgaaatacacaaaaaatgaaattcatataatgacttaaatgtattatatgttagaattgacaacataaactacttttgctttgaaatgatgtatgcttcagtaaaatcatattcaaattta

SEQ ID NO: 343201 - DNA, 812 bp, Homo sapiens
gatcggctcggtcctccctatagacatcagacagagttctgttaatctaatcaagtttgctgttagttgtgcattagcagtataaaagctaatatatactatatggtcttgcaacagttttaaagcctctgcataattgataataaaaatgcatgacattcttgtttttaatagacttttaaaatcataattttaggtttaacacgtagatctttgtacagttgactttttgacatagcaaggccaaaaataactttctgaatatttttttcttgtgtataagtggaaagggcatttttcacatataagtgggctaaccaatattttcaaaagaacttcatcattgtacaactaacaacagtaactagcccttaattatggtgacagttccttattggtgtgtgtgagattactctagcaactattacagtataacacagatgatcttctccacacaccccatcacccagataatttacagttctgttaacagtgaggttgataaagtattactgataaaaaattatctaaggaaaaaaacagaaaattatttggtgtggccatcttacctgcttatgtctcctacacaaagctaaatattctagcagtgatgtaatgaaaaattacatcttactgttgatatatgtatgctctggtacacagatgtcattttgttgtcacagcactacagtgaaatacacaaaaaatgaaattcatataatgacttaaatgtattatatgttagaattgacaacataaactacttttgctttgaaatgatgtatgcttcagtaaaatcatattcaaattta

SEQ ID NO: 343202 - DNA, 2095 bp, Homo sapiens
tgttctccgctgaggaggagcggggcagaggagggaggcagcgggtgagagttcagagttcagcagcagcagcccgagcccatgattcccatatgccctgtagtttctttcacctatgtgcccagccggctgggggaagatgccaaaatggcgaccggcaactactttggattcacccacagcggggcggcggcggcggcggctgcggcccaatatagccagcagccagcttcgggtgtagcctattctcatccaactacagttgctagctacactgtccatcaggctccagtagctgctcacacagttactgctgcctatgcaccagcagccgccacagttgcagttgccaggcctgctccagtagctgttgcagctgctgcaacagctgctgcttatggaggctaccccactgcacacacagcaactgactatggttatactcagaggcaacaagaagcaccaccaccaccacccccagctactacacaaaactaccaggattcatactcatatgtaaggtccacagctcctgctgtagcttatgatagtaagcaatactaccaacaaccaacagcaactgctgctgctgtagctgccgctgcccaacctcagccttctgttgctgaaacttactatcagacagcccccaaagcaggttacagccaaggtgcaactcagtatactcaagcccagcaaactcgacaagtgacagccataaaaccagccacaccaagtccagctaccactactttctccatctatcctgtatcctccaccgtacagccagtagcagctgcggctactgtggtgccatcctatactcagagtgctacttacagtaccacagcagttacatattctggtacgtcttattcaggttatgaagcagcagtgtattcagctgcatcttcctactatcaacagcagcagcagcaacagaagcaggcagcagcagcagctgctgctgctgctgcaacagctgcctggacagggaccacctttactaaaaaagcaccattccaaaataaacaactgaaaccaaaacagcctcccaaaccaccacagattcactattgtgatgtttgtaagatcagctgtgctggaccacagacttataaagaacatttagaaggacagaaacataaaaaaaaagaagctgcattgaaagcctcacaaaataccagcagcagcaacagttctactcgtgggactcaaaatcagctacgttgtgagctctgcgatgtgtcttgtacaggagcagatgcgtatgctgcccacattcgtggtgctaagcatcagaaagtggttaagttacacacaaaacttggtaaacccattccatcaacagaaccaaatgttgttagccaagctacttcttcaacagctgtatctgcttcaaagccgactgcctctccttcaagcattgcagcaaacaattgtactgtgaatacgtcatcaattgcaacgtcttcaatgaagggtcttacgactacaggaaactcgtctcttaatagcacatctaacactaaagtatcagcagtgcctacaaatatggctgccaagaaaacatctacccccaaaataaattttgttggtggtaataagctgcagtcaacaggaaataaagcagaagacataaaaggaaccgaatgtgttaaaagtactcctgtcacttctgctgtgcagattcctgaagtaaagcaagacacagtgtcagaaccagtcacacctgcatctcttgctgctttacagagtgatgtgcagccagtgggccatgattatgtggaagaggtacgaaatgatgaaggaaaagtaattcggttccattgtaaattatgcgagtgcagtactggagcaggcctgcaactcaactgtggcggctgctggttgcataggcagcagtaactgtgtgaggcagctactggagcctgatggacagtgtagctagctgtagttggtgagaataggctacacccgaagctgctgctggctatattggccagccgccgccgccgcgcccgctgtgggtgaatccaaagtagttgccggtcgcattttggcatcttcccagccggctgggctcataggtgaa

SEQ ID NO: 343203 - DNA, 525 bp, Homo sapiens
tgttctccgctgaggaggagcggggcagaggagggaggcagcgggtgagagttcagagttcagcagcagcagcccgagcccatgattcccatatgccctgtagtttctttcacctatgtgcccagccggctgggggaagatgccaaaatggcgaccggcaactactttggattcacccacagcggggcggcggcggcggcggctgcggcccaatatagccagcagccagcttcgggtgtagcctattctcatccaactacagttgctagctacactgtccatcaggctccagtagctgctcacacagttactgctgcctatgcaccagcagccgccacagttgcagttgccaggcctgctccagtagctgttgcagctgctgcaacagctgctgcttatggaggctaccccactgcacacacagcaactgactatggttatactcagaggcaacaagaagcaccaccactcctgcctgccccccccccccctcccccccggtaataaaaagcccccccccaaaca

SEQ ID NO: 343204 - DNA, 412 bp, Homo sapiens
cctcaggctgaaattttctgcttttcatgctcttttctctttcatttacttcgcaatgaaagcaaacatggaaaatcagatacatttgggaagaaattttagctaggctgatgttggtggggttttttattgctttttatgtcactattgatgcaagttcttgggctgtatttttcctcatatgcttataatgtcattctttatgtttcagacgttatgaagaggacatgtactggaggagaatggaggaagaacaacatcattgggatgatcgccgccgaatgccagatggaggttatcctcatggtcctccaggcccattaggccttctgggagtccgaccaggcatgcctcctcagcctcaggggcctgcagtgagtgtccacgttggtgatacaaggggtgaaagttt

SEQ ID NO: 343205 - DNA, 4716 bp, Homo sapiens
tgttctccgctgaggaggagcggggcagaggagggaggcagcgggtgagagttcagagttcagcagcagcagcccgagcccatgattcccatatgccctgtagtttctttcacctatgtgcccagccggctgggggaagatgccaaaatggcgaccggcaactactttggattcacccacagcggggcggcggcggcggcggctgcggcccaatatagccagcagccagcttcgggtgtagcctattctcatccaactacagttgctagctacactgtccatcaggctccagtagctgctcacacagttactgctgcctatgcaccagcagccgccacagttgcagttgccaggcctgctccagtagctgttgcagctgctgcaacagctgctgcttatggaggctaccccactgcacacacagcaactgactatggttatactcagaggcaacaagaagcaccaccaccaccacccccagctactacacaaaactaccaggattcatactcatatgtaaggtccacagctcctgctgtagcttatgatagtaagcaatactaccaacaaccaacagcaactgctgctgctgtagctgccgctgcccaacctcagccttctgttgctgaaacttactatcagacagcccccaaagcaggttacagccaaggtgcaactcagtatactcaagcccagcaaactcgacaagtgacagccataaaaccagccacaccaagtccagctaccactactttctccatctatcctgtatcctccaccgtacagccagtagcagctgcggctactgtggtgccatcctatactcagagtgctacttacagtaccacagcagttacatattctggtacgtcttattcaggttatgaagcagcagtgtattcagctgcatcttcctactatcaacagcagcagcagcaacagaagcaggcagcagcagcagctgctgctgctgctgcaacagctgcctggacagggaccacctttactaaaaaagcaccattccaaaataaacaactgaaaccaaaacagcctcccaaaccaccacagattcactattgtgatgtttgtaagatcagctgtgctggaccacagacttataaagaacatttagaaggacagaaacataaaaaaaaagaagctgcattgaaagcctcacaaaataccagcagcagcaacagttctactcgtgggactcaaaatcagctacgttgtgagctctgcgatgtgtcttgtacaggagcagatgcgtatgctgcccacattcgtggtgctaagcatcagaaagtggttaagttacacacaaaacttggtaaacccattccatcaacagaaccaaatgttgttagccaagctacttcttcaacagctgtatctgcttcaaagccgactgcctctccttcaagcattgcagcaaacaattgtactgtgaatacgtcatcaattgcaacgtcttcaatgaagggtcttacgactacaggaaactcgtctcttaatagcacatctaacactaaagtatcagcagtgcctacaaatatggctgccaagaaaacatctacccccaaaataaattttgttggtggtaataagctgcagtcaacaggaaataaagcagaagacataaaaggaaccgaatgtgttaaaagtactcctgtcacttctgctgtgcagattcctgaagtaaagcaagacacagtgtcagaaccagtcacacctgcatctcttgctgctttacagagtgatgtgcagccagtgggccatgattatgtggaagaggtacgaaatgatgaaggaaaagtaattcggttccattgtaaattatgcgagtgcagctttaatgatcccaatgctaaggagatgcacttaaaagggcgaagacacagacttcaatataaaaaaaaagtaaatccagatttgcaagtagaagtaaagcctagtattcgagcaagaaagattcaagaagagaaaatgaggaagcaaatgcagaaggaggagtactggcgaagacgagaagaagaggagcgttggagaatggaaatgagacgttatgaagaggacatgtactggaggagaatggaggaagaacaacatcattgggatgatcgccgccgaatgccagatggaggttatcctcatggtcctccaggcccattaggccttctgggagtccgaccaggcatgcctcctcagcctcaggggcctgcacccttacgtcgtcctgactcatctgatgaccgttatgtaatgacaaaacatgccaccatttatccaactgaagaggagttacaggcagttcagaaaattgtttctattactgaacgtgctttaaaactcgtttcagacagtttgtctgaacatgagaagaacaagaacaaagagggagatgataagaaagagggaggtaaagacagagctttgaaaggagttttgcgagtgggagtattggcaaaaggattacttctccgaggagatagaaatgtcaaccttgttttgctgtgctcagagaaaccttcaaagacattattaagccgtattgcagaaaacctacccaaacagcttgctgttataagccctgagaagtatgacataaaatgtgctgtatctgaagcggcaataattttgaattcatgtgtggaacccaaaatgcaagtcactatcacactgacatctccaattattcgagaagagaacatgagggaaggagatgtaacctcgggtatggtgaaagacccaccggacgtcttggacaggcaaaaatgccttgacgctctggctgctctacgccacgctaagtggttccaggctagagctaatggtctgcagtcctgtgtgattatcatacgcattcttcgagacctctgtcagcgagttccaacttggtctgattttccaagctgggctatggagttactagtagagaaagcaatcagcagtgcttctagccctcagagccctggggatgcactgagaagagtttttgaatgcatttcttcagggattattcttaaaggtagtcctggacttctggatccttgtgaaaaggatccctttgataccttggcaacaatgactgaccagcagcgtgaagacatcacatccagtgcacagtttgcattgagactccttgcattccgccagatacacaaagttctaggcatggatccattaccgcaaatgagccaacgttttaacatccacaacaacaggaaacgaagaagagatagtgatggagttgatggatttgaagctgaggggaaaaaagacaaaaaagattatgataacttttaaaaagtgtctgtaaatcttcagtgttaaaaaaacagatgcccatttgttggctgtttttcattcataataatgtctacattgaaaaatttatcaagaatttaaaggatttcatggaagaaccaagtttttctatgatattaaaaaatgtacagtgttaggtattatttgaatggaaagacacccaaaaaaaaaaatgtgctccgactagggggaaaacagtagttccgattttttcccattatttttattttattttctggttgccctagcttccccccctatttttgtgtcttttattaactagtgcattgtcttattaaatcttcactgtatttaatgcaggatgtgtgcttcagttgctctgtgtattttgatattttaatttagaggttttgtttgctttttgacactagttgtaagttactttgttatagatggtatcctttaccccttcttaatattttacagcagtacgtttttttgtaacgtgagactgcagagtttgtttttctatatgtgaaggattacaacacaaaaagttatcctgccattcgagtgctcagaactgaatgtttctgcagatcttgtggcatttgtctctagtgtgatatataaaggtgtaattaagacagagttctgttaatctaatcaagtttgctgttagttgtgcattagcagtataaaagctaatatatactatatggtcttgcaacagttttaaagcctctgcataattgataataaaaatgcatgacattcttgtttttaatagacttttaaaatcataattttaggtttaacacgtagatctttgtacagttgactttttgacatagcaaggccaaaaataactttctgaatatttttttcttgtgtataagtggaaagggcatttttcacatataagtgggctaaccaatattttcaaaagaacttcatcattgtacaactaacaacagtaactagcccttaattatggtgacagttccttattggtgtgtgtgagattactctagcaactattacagtataacacagatgatcttctccacacaccccatcacccagataatttacagttctgttaacagtgaggttgataaagtattactgataaaaaattatctaaggaaaaaaacagaaaattatttggtgtggccatcttacctgcttatgtctcctacacaaagctaaatattctagcagtgatgtaatgaaaaattacatcttactgttgatatatgtatgctctggtacacagatgtcattttgttgtcacagcactacagtgaaatacacaaaaaatgaaattcatataatgacttaaatgtattatatgttagaattgacaacataaactacttttgctttgaaatgatgtatgcttcagtaaaatcatattcaaattta

SEQ ID NO: 343206 - DNA, 3558 bp, Homo sapiens
ggcacgagggccggaggaggaaggcggcggcgacgacgaggaagacgccgaggcctgggccatggaactggcggacgtgggggcggcagccagctcgcagggagttcatgatcaagtgttgcccacaccaaatgcttcatccagagtcatagtacatgtggatctggattgcttttatgcacaagtagaaatgatctcaaatccagagctaaaagacaaacctttaggggttcaacagaaatatttggtggttacctgcaactatgaagctaggaaacttggagttaagaaacttatgaatgtcagagatgcaaaagaaaagtgtccacagttggtattagttaatggagaagacctgacccgctacagagaaatgtcttataaggttacagaattactggaagaatttagtccagttgttgagagacttggatttgatgaaaattttgtggatctaacagaaatggttgagaagagactacagcagctgcaaagtgatgaactttctgcggtgactgtgtcgggtcatgtatacaataatcagtctataaacctgcttgacgtcttgcacatcagactacttgttggatctcagattgcagcagagatgcgggaagccatgattatgtggaagaggtacgaaatgatgaaggaaaagtaattcggttccattgtaaattatgcgagtgcagctttaatgatcccaatgctaaggagatgcacttaaaagggcgaagacacagacttcaatataaaaaaaaagtaaatccagatttgcaagtagaagtaaagcctagtattcgagcaagaaagattcaagaagagaaaatgaggaagcaaatgcagaaggaggagtactggcgaagacgagaagaagaggagcgttggagaatggaaatgagacgttatgaagaggacatgtactggaggagaatggaggaagaacaacatcattgggatgatcgccgccgaatgccagatggaggttatcctcatggtcctccaggcccattaggccttctgggagtccgaccaggcatgcctcctcagcctcaggggcctgcacccttacgtcgtcctgactcatctgatgaccgttatgtaatgacaaaacatgccaccatttatccaactgaagaggagttacaggcagttcagaaaattgtttctattactgaacgtgctttaaaactcgtttcagacagtttgtctgaacatgagaagaacaagaacaaagagggagatgataagaaagagggaggtaaagacagagctttgaaaggagttttgcgagtgggagtattggcaaaaggattacttctccgaggagatagaaatgtcaaccttgttttgctgtgctcagagaaaccttcaaagacattattaagccgtattgcagaaaacctacccaaacagcttgctgttataagccctgagaagtatgacataaaatgtgctgtatctgaagcggcaataattttgaattcatgtgtggaacccaaaatgcaagtcactatcacactgacatctccaattattcgagaagagaacatgagggaaggagatgtaacctcgggtatggtgaaagacccaccggacgtcttggacaggcaaaaatgccttgacgctctggctgctctacgccacgctaagtggttccaggctagagctaatggtctgcagtcctgtgtgattatcatacgcattcttcgagacctctgtcagcgagttccaacttggtctgattttccaagctgggctatggagttactagtagagaaagcaatcagcagtgcttctagccctcagagccctggggatgcactgagaagagtttttgaatgcatttcttcagggattattcttaaaggtagtcctggacttctggatccttgtgaaaaggatccctttgataccttggcaacaatgactgaccagcagcgtgaagacatcacatccagtgcacagtttgcattgagactccttgcattccgccagatacacaaagttctaggcatggatccattaccgcaaatgagccaacgttttaacatccacaacaacaggaaacgaagaagagatagtgatggagttgatggatttgaagctgaggggaaaaaagacaaaaaagattatgataacttttaaaaagtgtctgtaaatcttcagtgttaaaaaaacagatgcccatttgttggctgtttttcattcataataatgtctacattgaaaaatttatcaagaatttaaaggatttcatggaagaaccaagtttttctatgatattaaaaaatgtacagtgttaggtattatttgaatggaaagacacccaaaaaaaaaaatgtgctccgactagggggaaaacagtagttccgattttttcccattatttttattttattttctggttgccctagcttccccccctatttttgtgtcttttattaactagtgcattgtcttattaaatcttcactgtatttaatgcaggatgtgtgcttcagttgctctgtgtattttgatattttaatttagaggttttgtttgctttttgacactagttgtaagttactttgttatagatggtatcctttaccccttcttaatattttacagcagtacgtttttttgtaacgtgagactgcagagtttgtttttctatatgtgaaggattacaacacaaaaagttatcctgccattcgagtgctcagaactgaatgtttctgcagatcttgtggcatttgtctctagtgtgatatataaaggtgtaattaagacagagttctgttaatctaatcaagtttgctgttagttgtgcattagcagtataaaagctaatatatactatatggtcttgcaacagttttaaagcctctgcataattgataataaaaatgcatgacattcttgtttttaatagacttttaaaatcataattttaggtttaacacgtagatctttgtacagttgactttttgacatagcaaggccaaaaataactttctgaatatttttttcttgtgtataagtggaaagggcatttttcacatataagtgggctaaccaatattttcaaaagaacttcatcattgtacaactaacaacagtaactagcccttaattatggtgacagttccttattggtgtgtgtgagattactctagcaactattacagtataacacagatgatcttctccacacaccccatcacccagataatttacagttctgttaacagtgaggttgataaagtattactgataaaaaattatctaaggaaaaaaacagaaaattatttggtgtggccatcttacctgcttatgtctcctacacaaagctaaatattctagcagtgatgtaatgaaaaattacatcttactgttgatatatgtatgctctggtacacagatgtcattttgttgtcacagcactacagtgaaatacacaaaaaatgaaattcatataatgacttaaatgtattatatgttagaattgacaacataaactacttttgctttgaaatgatgtatgcttcagtaaaatcatattcaaattta

SEQ ID NO: 343207 - DNA, 3401 bp, Homo sapiens
gcatgctaaaattccaacttttcattcccatttctacagtttctatccttttaaaaagtaataggccaggcgcagtggctcatgcctgtaatcccagcactttgggaggccaaggtgggcggatcacaaggagtttgagaccagcctggccaacatggtgaaaccctgtctctactaaaaatacaaaaaacaaattagccggtcgtggtggtgttacatacctttaatcccagctacttgggtggctgaggcgggagaatcgcttgaacccaggaggctgaggttgtagtgagctgagttcaaaccactgcactccagcatgggcgacagagcaagactctgtcctggggaaaaaaaaaatgtaatagacattgccacttctttctaactgtgtacaacttcatcaaataatatgtgggggtttatgaatgatataatcttcaactatgatgattcttgaattttttttccacaccaaggtacgaaatgatgaaggaaaagtaattcggttccattgtaaattatgcgagtgcagctttaatgatcccaatgctaaggagatgcacttaaaagggcgaagacacagacttcaatataaaaaaaaagtaaatccagatttgcaagtagaagtaaagcctagtattcgagcaagaaagattcaagaagagaaaatgaggaagcaaatgcagaaggaggagtactggcgaagacgagaagaagaggagcgttggagaatggaaatgagacgttatgaagaggacatgtactggaggagaatggaggaagaacaacatcattgggatgatcgccgccgaatgccagatggaggttatcctcatggtcctccaggcccattaggccttctgggagtccgaccaggcatgcctcctcagcctcaggggcctgcacccttacgtcgtcctgactcatctgatgaccgttatgtaatgacaaaacatgccaccatttatccaactgaagaggagttacaggcagttcagaaaattgtttctattactgaacgtgctttaaaactcgtttcagacagtttgtctgaacatgagaagaacaagaacaaagagggagatgataagaaagagggaggtaaagacagagctttgaaaggagttttgcgagtgggagtattggcaaaaggattacttctccgaggagatagaaatgtcaaccttgttttgctgtgctcagagaaaccttcaaagacattattaagccgtattgcagaaaacctacccaaacagcttgctgttataagccctgagaagtatgacataaaatgtgctgtatctgaagcggcaataattttgaattcatgtgtggaacccaaaatgcaagtcactatcacactgacatctccaattattcgagaagagaacatgagggaaggagatgtaacctcgggtatggtgaaagacccaccggacgtcttggacaggcaaaaatgccttgacgctctggctgctctacgccacgctaagtggttccaggctagagctaatggtctgcagtcctgtgtgattatcatacgcattcttcgagacctctgtcagcgagttccaacttggtctgattttccaagctgggctatggagttactagtagagaaagcaatcagcagtgcttctagccctcagagccctggggatgcactgagaagagtttttgaatgcatttcttcagggattattcttaaaggtagtcctggacttctggatccttgtgaaaaggatccctttgataccttggcaacaatgactgaccagcagcgtgaagacatcacatccagtgcacagtttgcattgagactccttgcattccgccagatacacaaagttctaggcatggatccattaccgcaaatgagccaacgttttaacatccacaacaacaggaaacgaagaagagatagtgatggagttgatggatttgaagctgaggggaaaaaagacaaaaaagattatgataacttttaaaaagtgtctgtaaatcttcagtgttaaaaaaacagatgcccatttgttggctgtttttcattcataataatgtctacattgaaaaatttatcaagaatttaaaggatttcatggaagaaccaagtttttctatgatattaaaaaatgtacagtgttaggtattatttgaatggaaagacacccaaaaaaaaaaatgtgctccgactagggggaaaacagtagttccgattttttcccattatttttattttattttctggttgccctagcttccccccctatttttgtgtcttttattaactagtgcattgtcttattaaatcttcactgtatttaatgcaggatgtgtgcttcagttgctctgtgtattttgatattttaatttagaggttttgtttgctttttgacactagttgtaagttactttgttatagatggtatcctttaccccttcttaatattttacagcagtacgtttttttgtaacgtgagactgcagagtttgtttttctatatgtgaaggattacaacacaaaaagttatcctgccattcgagtgctcagaactgaatgtttctgcagatcttgtggcatttgtctctagtgtgatatataaaggtgtaattaagacagagttctgttaatctaatcaagtttgctgttagttgtgcattagcagtataaaagctaatatatactatatggtcttgcaacagttttaaagcctctgcataattgataataaaaatgcatgacattcttgtttttaatagacttttaaaatcataattttaggtttaacacgtagatctttgtacagttgactttttgacatagcaaggccaaaaataactttctgaatatttttttcttgtgtataagtggaaagggcatttttcacatataagtgggctaaccaatattttcaaaagaacttcatcattgtacaactaacaacagtaactagcccttaattatggtgacagttccttattggtgtgtgtgagattactctagcaactattacagtataacacagatgatcttctccacacaccccatcacccagataatttacagttctgttaacagtgaggttgataaagtattactgataaaaaattatctaaggaaaaaaacagaaaattatttggtgtggccatcttacctgcttatgtctcctacacaaagctaaatattctagcagtgatgtaatgaaaaattacatcttactgttgatatatgtatgctctggtacacagatgtcattttgttgtcacagcactacagtgaaatacacaaaaaatgaaattcatataatgacttaaatgtattatatgttagaattgacaacataaactacttttgctttgaaatgatgtatgcttcagtaaaatcatattcaaattta

SEQ ID NO: 343208 - DNA, 4618 bp, Homo sapiens
tgttctccgctgaggaggagcggggcagaggagggaggcagcgggtgagagttcagagttcagcagcagcagcccgagcccatgattcccatatgccctgtagtttctttcacctatgtgcccagccggctgggggaagatgccaaaatggcgaccggcaactactttggattcacccacagcggggcggcggcggcggcggctgcggcccaatatagccagcagccagcttcgggtgtagcctattctcatccaactacagttgctagctacactgtccatcaggctccagtagctgctcacacagttactgctgcctatgcaccagcagccgccacagttgcagttgccaggcctgctccagtagctgttgcagctgctgcaacagctgctgcttatggaggctaccccactgcacacacagcaactgactatggttatactcagaggcaacaagaagcaccaccaccaccacccccagctactacacaaaactaccaggattcatactcatatgtaaggtccacagctcctgctgtagcttatgatagtaagcaatactaccaacaaccaacagcaactgctgctgctgtagctgccgctgcccaacctcagccttctgttgctgaaacttactatcagacagcccccaaagcaggttacagccaaggtgcaactcagtatactcaagcccagcaaactcgacaagtgacagccataaaaccagccacaccaagtccagctaccactactttctccatctatcctgtatcctccaccgtacagccagtagcagctgcggctactgtggtgccatcctatactcagagtgctacttacagtaccacagcagttacatattctggtacgtcttattcaggttatgaagcagcagtgtattcagctgcatcttcctactatcaacagcagcagcagcaacagaagcaggcagcagcagcagctgctgctgctgctgcaacagctgcctggacagggaccacctttactaaaaaagcaccattccaaaataaacaactgaaaccaaaacagcctcccaaaccaccacagattcactattgtgatgtttgtaagatcagctgtgctggaccacagacttataaagaacatttagaaggacagaaacataaaaaaaaagaagctgcattgaaagcctcacaaaataccagcagcagcaacagttctactcgtgggactcaaaatcagctacgttgtgagctctgcgatgtgtcttgtacaggagcagatgcgtatgctgcccacattcgtggtgctaagcatcagaaagtggttaagttacacacaaaacttggtaaacccattccatcaacagaaccaaatgttgttagccaagctacttcttcaacagctgtatctgcttcaaagccgactgcctctccttcaagcattgcagcaaacaattgtactgtgaatacgtcatcaattgcaacgtcttcaatgaagggtcttacgactacaggaaactcgtctcttaatagcacatctaacactaaagtatcagcagtgcctacaaatatggctgccaagaaaacatctacccccaaaataaattttgttggtggtaataagctgcagtcaacaggaaataaagcagaagacataaaaggaaccgaatgtgttaaaagtactcctgtcacttctgctgtgcagattcctgaagtaaagcaagacacagtgtcagaaccagtcacacctgcatctcttgctgctttacagagtgatgtgcagccagtgggccatgattatgtggaagaggtacgaaatgatgaaggaaaagtaattcggttccattgtaaattatgcgagtgcagctttaatgatcccaatgctaaggagatgcacttaaaagggcgaagacacagacttcaatataaaaaaaaagtaaatccagatttgcaagtagaagtaaagcctagtattcgagcaagaaagattcaagaagagaaaatgaggaagcaaatgcagaaggaggagtactggcgaagacgagaagaagaggagcgttggagaatggaaatgagacgttatgaagaggacatgtactggaggagaatggaggaagaacaacatcattgggatgatcgccgccgaatgccagatggaggttatcctcatggtcctccaggcccattaggccttctgggagtccgaccaggcatgcctcctcagcctcaggggcctgcacccttacgtcgtcctgactcatctgatgaccgttatgtaatgacaaaacatgccaccatttatccaactgaagaggagttacaggcagttcagaaaattgtttctattactgaacgtgctttaaaactcgtttcagacagtttgtctgaacatgagaagaacaagaacaaagagggagatgataagaaagagggaggtaaagacagagctttgaaaggagttttgcgagtgggagtattggcaaaaggattacttctccgaggagatagaaatgtcaaccttgttttgctgtgctcagagaaaccttcaaagacattattaagccgtattgcagaaaacctacccaaacagcttgctgttataagccctgagaagtatgacataaaatgtgctgtatctgaagcggcaataattttgaattcatgtgtggaacccaaaatgcaagtcactatcacactgacatctccaattattcgagaagagaacatgagggaaggaggctagagctaatggtctgcagtcctgtgtgattatcatacgcattcttcgagacctctgtcagcgagttccaacttggtctgattttccaagctgggctatggagttactagtagagaaagcaatcagcagtgcttctagccctcagagccctggggatgcactgagaagagtttttgaatgcatttcttcagggattattcttaaaggtagtcctggacttctggatccttgtgaaaaggatccctttgataccttggcaacaatgactgaccagcagcgtgaagacatcacatccagtgcacagtttgcattgagactccttgcattccgccagatacacaaagttctaggcatggatccattaccgcaaatgagccaacgttttaacatccacaacaacaggaaacgaagaagagatagtgatggagttgatggatttgaagctgaggggaaaaaagacaaaaaagattatgataacttttaaaaagtgtctgtaaatcttcagtgttaaaaaaacagatgcccatttgttggctgtttttcattcataataatgtctacattgaaaaatttatcaagaatttaaaggatttcatggaagaaccaagtttttctatgatattaaaaaatgtacagtgttaggtattatttgaatggaaagacacccaaaaaaaaaaatgtgctccgactagggggaaaacagtagttccgattttttcccattatttttattttattttctggttgccctagcttccccccctatttttgtgtcttttattaactagtgcattgtcttattaaatcttcactgtatttaatgcaggatgtgtgcttcagttgctctgtgtattttgatattttaatttagaggttttgtttgctttttgacactagttgtaagttactttgttatagatggtatcctttaccccttcttaatattttacagcagtacgtttttttgtaacgtgagactgcagagtttgtttttctatatgtgaaggattacaacacaaaaagttatcctgccattcgagtgctcagaactgaatgtttctgcagatcttgtggcatttgtctctagtgtgatatataaaggtgtaattaagacagagttctgttaatctaatcaagtttgctgttagttgtgcattagcagtataaaagctaatatatactatatggtcttgcaacagttttaaagcctctgcataattgataataaaaatgcatgacattcttgtttttaatagacttttaaaatcataattttaggtttaacacgtagatctttgtacagttgactttttgacatagcaaggccaaaaataactttctgaatatttttttcttgtgtataagtggaaagggcatttttcacatataagtgggctaaccaatattttcaaaagaacttcatcattgtacaactaacaacagtaactagcccttaattatggtgacagttccttattggtgtgtgtgagattactctagcaactattacagtataacacagatgatcttctccacacaccccatcacccagataatttacagttctgttaacagtgaggttgataaagtattactgataaaaaattatctaaggaaaaaaacagaaaattatttggtgtggccatcttacctgcttatgtctcctacacaaagctaaatattctagcagtgatgtaatgaaaaattacatcttactgttgatatatgtatgctctggtacacagatgtcattttgttgtcacagcactacagtgaaatacacaaaaaatgaaattcatataatgacttaaatgtattatatgttagaattgacaacataaactacttttgctttgaaatgatgtatgcttcagtaaaatcatattcaaattta

SEQ ID NO: 343209 - DNA, 4264 bp, Homo sapiens
tgttctccgctgaggaggagcggggcagaggagggaggcagcgggtgagagttcagagttcagcagcagcagcccgagcccatgattcccatatgccctgtagtttctttcacctatgtgcccagccggctgggggaagatgccaaaatggcgaccggcaactactttggattcacccacagcggggcggcggcggcggcggctgcggcccaatatagccagcagccagcttcgggtgtagcctattctcatccaactacagttgctagctacactgtccatcaggctccagtagctgctcacacagttactgctgcctatgcaccagcagccgccacagttgcagttgccaggcctgctccagtagctgttgcagctgctgcaacagctgctgcttatggaggctaccccactgcacacacagcaactgactatggttatactcagaggcaacaagaagcaccaccaccaccacccccagctactacacaaaactaccaggattcatactcatatgtaaggtccacagctcctgctgtagcttatgatagtaagcaatactaccaacaaccaacagcaactgctgctgctgtagctgccgctgcccaacctcagccttctgttgctgaaacttactatcagacagcccccaaagcaggttacagccaaggtgcaactcagtatactcaagcccagcaaactcgacaagtgacagccataaaaccagccacaccaagtccagctaccactactttctccatctatcctgtatcctccaccgtacagccagtagcagctgcggctactgtggtgccatcctatactcagagtgctacttacagtaccacagcagttacatattctggtacgtcttattcaggttatgaagcagcagtgtattcagctgcatcttcctactatcaacagcagcagcagcaacagaagcaggcagcagcagcagctgctgctgctgctgcaacagctgcctggacagggaccacctttactaaaaaagcaccattccaaaataaacaactgaaaccaaaacagcctcccaaaccaccacagattcactattgtgatgtttgtaagatcagctgtgctggaccacagacttataaagaacatttagaaggacagaaacataaaaaaaaagaagctgcattgaaagcctcacaaaataccagcagcagcaacagttctactcgtgggactcaaaatcagctacgttgtgagctctgcgatgtgtcttgtacaggagcagatgcgtatgctgcccacattcgtggtgctaagcatcagaaagtggttaagttacacacaaaacttggtaaacccattccatcaacagaaccaaatgttgttagccaagctacttcttcaacagctgtatctgcttcaaagccgactgcctctccttcaagcattgcagcaaacaattgtactgtgaatacgtcatcaattgcaacgtcttcaatgaagggtcttacgactacaggaaactcgtctcttaatagcacatctaacactaaagtatcagcagtgcctacaaatatggctgccaagaaaacatctacccccaaaataaattttgttggtggtaataagctgcagtcaacaggaaataaagcagaagacataaaaggaaccgaatgtgttaaaagtactcctgtcacttctgctgtgcagattcctgaagtaaagcaagacacagtgtcagaaccagtcacacctgcatctcttgctgctttacagagtgatgtgcagccagtgggccatgattatgtggaagaggtacgaaatgatgaaggaaaagtaattcggttccattgtaaattatgcgagtgcagctttaatgatcccaatgctaaggagatgcacttaaaagggcgaagacacagacttcaatataaaaaaaaagtaaatccagatttgcaagtagaagtaaagcctagtattcgagcaagaaagattcaagaagagaaaatgaggaagcaaatgcagaaggaggagtactggcgaagacgagaagaagaggagcgttggagaatggaaatgagacgttatgaagaggacatgtactggaggagaatggaggaagaacaacatcattgggatgatcgccgccgaatgccagatggaggttatcctcatggtcctccaggcccattaggccttctgggagtccgaccaggcatgcctcctcagcctcaggggcctgcacccttacgtcgtcctgactcatctgatgaccgttatgtaatgacaaaacatgccaccatttatccaactgaagaggagttacaggcagttcagaaaattgtttctattactgaacgtgctttaaaactcgtttcagacagtttgtctgaacatgagaagaacaagaacaaagagggagatgataagaaagagggaggtaaagacagagctttgaaaggagttttgcgagtgggagtattggcaaaaggattacttctccgaggagatagaaatgtcaaccttgttttgctgtgctcagagaaaccttcaaagacattattaagccgtattgcagaaaacctacccaaacagcttgctgttataagccctgagaagtatgacataaaatgtgctgtatctgaagcggcaataattttgaattcatgtgtggaacccaaaatgcaagtcactatcacactgacatctccaattattcgagaagagaacatgagggaaggagatgtaacctcgggtatggtgaaagacccaccggacgtcttggacaggcaaaaatgccttgacgctctggctgctctacgccacgctaagtggttccaggctagagctaatggtctgcagtcctgtgtgattatcatacgcattcttcgagacctctgtcagcgagttccaacttggtctgattttccaagctgggctatggagttactagtagagaaagcaatcagcagtgcttctagccctcagagccctggggatgcactgagaagagtttttgaatgcatttcttcagggattattcttaaaggtagtcctggacttctggatccttgtgaaaaggatccctttgataccttggcaacaatgactgaccagcagcgtgaagacatcacatccagtgcacagtttgcattgagactccttgcattccgccagatacacaaagttctaggcatggatccattaccgcaaatgagccaacgttttaacatccacaacaacaggaaacgaagaagagatagtgatggagttgatggatttgaagctgaggggaaaaaagacaaaaaagattatgataacttttaaaaagtgtctgtaaatcttcagtgttaaaaaaacagatgcccatttgttggctgtttttcattcataataatgtctacattgaaaaatttatcaagaatttaaaggatttcatggaagaaccaagtttttctatgatattaaaaaatgtacagtgttaggtattatttgaatggaaagacacccaaaaaaaaaaatgtgctccgactagggggaaaacagtagttccgattttttcccattatttttattttattttctggttgccctagcttccccccctatttttgtgtcttttattaactagtgcattgtcttattaaatcttcactgtatttaatgcaggatgtgtgcttcagttgctctgtgtattttgatattttaatttagaggttttgtttgctttttgacactagttgtaagttactttgttatagatggtatcctttaccccttcttaatattttacagcagtacgtttttttgtaacgtgagactgcagagtttgtttttctatatgtgaaggattacaacacaaaaagttatcctgccattcgagtgctcagaactgaatgtttctgcagatcttgtggcatttgtctctagtgtgatatataaaggtgtaattaagacagagttctgttaatctaatcaagtttgctgttagttgtgcattagcagtataaaagctaatatatactatatggtcttgcaacagttttaaagcctctgcataattgataataaaaatgcatgacattcttgtttttaatagacttttaaaatcataattttaggtttcacgaagggtgatctgtgtcacccaggctggagtgcagtggcccggtcgcgggttactgcagccttagcctcctgggttcgggtgattctcctgcctcagcctcctgagtagctgtgactacggacacatgccactacacctggcccatcattttattga

SEQ ID NO: 343210 - DNA, 1305 bp, Homo sapiens
tgttctccgctgaggaggagcggggcagaggagggaggcagcgggtgagagttcagagttcagcagcagcagcccgagcccatgattcccatatgccctgtagtttctttcacctatgtgcccagccggctgggggaagatgccaaaatggcgaccggcaactactttggattcacccacagcggggcggcggcggcggcggctgcggcccaatatagccagcagccagcttcgggtgtagcctattctcatccaactacagttgctagctacactgtccatcaggctccagtagctgctcacacagttactgctgcctatgcaccagcagccgccacagttgcagttgccaggcctgctccagtagctgttgcagctgctgcaacagctgctgcttatggaggctaccccactgcacacacagcaactgactatggttatactcagaggcaacaagaagcaccaccaccaccacccccagctactacacaaaactaccaggattcatactcatatgtaaggtccacagctcctgctgtagcttatgatagtaagcaatactaccaacaaccaacagcaactgctgctgctgtagctgccgctgcccaacctcagccttctgttgctgaaacttactatcagacagcccccaaagcaggttacagccaaggtgcaactcagtatactcaagcccagcaaactcgacaagtgacagccataaaaccagccacaccaagtccagctaccactactttctccatctatcctgtatcctccaccgtacagccagtagcagctgcggctactgtggtgccatcctatactcagagtgctacttacagtaccacagcagttacatattctggtacgtcttattcaggttatgaagcagcagtgtattcagctgcatcttcctactatcaacagcagcagcagcaacagaagcaggcagcagcagcagctgctgctgctgctgcaacagctgcctggacagggaccacctttactaaaaaagcaccattccaaaataaacaactgaaaccaaaacagcctcccaaaccaccacagattcactattgtgatgtttgtaagatcagctgtgctggaccacaggtacttacgttgtatgttttaccttgagtcttcagtggttattaagtgtagttggtattctaactcctgagcctactaaaagaggtttacattttttcctgttagcttttagccagtgcattttttaagttacttgtattgtggcatgagaattttcagggaaaaaaaaactgtaaagatgattgtgactgt

SEQ ID NO: 343211 - DNA, 769 bp, Homo sapiens
agcggggtttcgtggttgtatagacatttacccgtggccgtgtacctggagctggcatctgactcaacatttggaggaggcctgtagagctctttacctgtgccgctcgtttaaccatctgttaccaccttgactgttcaaaccccccccttcaagtgtggcttgcctttctgaggtaattttccagagccgttgctttccaagaatctttcatctatttcaaatcctgtccttcctccaaaaaaaatacctaaggaatttataatgaaatacaaacgtggagagataaatcctgtgtcagccttgcaccagtttgcacaaatgcagcgagttcagcttgaccttaaggaaactgtgacaacaggtaatgttatgggaccatattttgccttttgtgctgtggtggatggtattcagtacaagactggactgggacaaaataaaaaggagtctagatccaatgcagcaaaattagctcttgatgagcttctacaactggatgaacctgaaccacgaattttagaaacatcaggtcctcctcctttccctgcagaacctgttgttttatctgaactagcatatgtttcaaaagtacattatgaagggagacatattcaatatgcaaagatttcacagatcgttaaagaaagatttaatcaactaatttctaatcgttcagaatacctgaaatatagcagttcattggctgcttttataattgaaagagctggacaacatgaggttgtagctataggcacaggtgaataca

SEQ ID NO: 343212 - DNA, 856 bp, Homo sapiens
ggccaagccttccccatgggcaccttctcagattgcgattgtggatgaaatgagggattttcttgaaacaaccctcacgcaggtgagaaaatggctagcaacaatcattggtttcagagttcgcaggtccccagctttgcccagatgctgaaaaagaacctgccagttcaaccagcgacaaagacgataactacacccacaggatggtcctcagaaagttacggcctgtccaagatggcatccaaggttacgcaagtaacgggtaattttccagagccgttgctttccaagaatctttcatctatttcaaatcctgtccttcctccaaaaaaaatacctaaggaatttataatgaaatacaaacgtggagagataaatcctgtgtcagccttgcaccagtttgcacaaatgcagcgagttcagcttgaccttaaggaaactgtgacaacaggtaatgttatgggaccatattttgccttttgtgctgtggtggatggtattcagtacaagactggactgggacaaaataaaaaggagtctagatccaatgcagcaaaattagctcttgatgagcttctacaactggatgaacctgaaccacgaattttagaaacatcaggtcctcctcctttccctgcagaacctgttgttttatctgaactagcatatgtttcaaaagtacattatgaagggagacatattcaatatgcaaagatttcacagatcgttaaagaaagatttaatcaactaatttctaatcgttcagaatacctgaaatatagcagttcattggctgcttttataattgaaagagctggacaacatgaggttgtagctataggcacaggtgaataca

SEQ ID NO: 343213 - DNA, 911 bp, Homo sapiens
agtgattggacgaagcagggcgcgggggcgcaagcccgggtcctgcaggggcgacgcgaggcctcttttgaaagatgcggccctgaccctgtgaacctcgcgcagagcggcctgaagcgagaggttgaggctgggaggtgagaaaatggctagcaacaatcattggtttcagagttcgcaggtccccagctttgcccagatgctgaaaaagaacctgccagttcaaccagcgacaaagacgataactacacccacaggatggtcctcagaaagttacggcctgtccaagatggcatccaaggttacgcaagtaacgggtaattttccagagccgttgctttccaagaatctttcatctatttcaaatcctgtccttcctccaaaaaaaatacctaaggaatttataatgaaatacaaacgtggagagataaatcctgtgtcagccttgcaccagtttgcacaaatgcagcgagttcagcttgaccttaaggaaactgtgacaacaggtaatgttatgggaccatattttgccttttgtgctgtggtggatggtattcagtacaagactggactgggacaaaataaaaaggagtctagatccaatgcagcaaaattagctcttgatgagcttctacaactggatgaacctgaaccacgaattttagaaacatcaggtcctcctcctttccctgcagaacctgttgttttatctgaactagcatatgtttcaaaagtacattatgaagggagacatattcaatatgcaaagatttcacagatcgttaaagaaagatttaatcaactaatttctaatcgttcagaatacctgaaatatagcagttcattggctgcttttataattgaaagagctggacaacatgaggttgtagctataggcacaggtgaataca

SEQ ID NO: 343214 - DNA, 840 bp, Homo sapiens
agacgcggagctcggctgcacgacgctggcgcaagcgcgggggcaagagcgccggcctccgagacggtgagaaaatggctagcaacaatcattggtttcagagttcgcaggtccccagctttgcccagatgctgaaaaagaacctgccagttcaaccagcgacaaagacgataactacacccacaggatggtcctcagaaagttacggcctgtccaagatggcatccaaggttacgcaagtaacgggtaattttccagagccgttgctttccaagaatctttcatctatttcaaatcctgtccttcctccaaaaaaaatacctaaggaatttataatgaaatacaaacgtggagagataaatcctgtgtcagccttgcaccagtttgcacaaatgcagcgagttcagcttgaccttaaggaaactgtgacaacaggtaatgttatgggaccatattttgccttttgtgctgtggtggatggtattcagtacaagactggactgggacaaaataaaaaggagtctagatccaatgcagcaaaattagctcttgatgagcttctacaactggatgaacctgaaccacgaattttagaaacatcaggtcctcctcctttccctgcagaacctgttgttttatctgaactagcatatgtttcaaaagtacattatgaagggagacatattcaatatgcaaagatttcacagatcgttaaagaaagatttaatcaactaatttctaatcgttcagaatacctgaaatatagcagttcattggctgcttttataattgaaagagctggacaacatgaggttgtagctataggcacaggtgaataca

SEQ ID NO: 343215 - DNA, 1010 bp, Homo sapiens
agtgattggacgaagcagggcgcgggggcgcaagcccgggtcctgcaggggcgacgcgaggcctcttttgaaagatgcggccctgaccctgtgaacctcgcgcagagcggcctgaagcgagaggttgaggctgggaggtgggagcaacggcggcggcggccgcctgcgagcccccggcctgaggcgcagcagcagctgcccgtcttcccacatagagggcaggaaggacaactttggtgagaaaatggctagcaacaatcattggtttcagagttcgcaggtccccagctttgcccagatgctgaaaaagaacctgccagttcaaccagcgacaaagacgataactacacccacaggatggtcctcagaaagttacggcctgtccaagatggcatccaaggttacgcaagtaacgggtaattttccagagccgttgctttccaagaatctttcatctatttcaaatcctgtccttcctccaaaaaaaatacctaaggaatttataatgaaatacaaacgtggagagataaatcctgtgtcagccttgcaccagtttgcacaaatgcagcgagttcagcttgaccttaaggaaactgtgacaacaggtaatgttatgggaccatattttgccttttgtgctgtggtggatggtattcagtacaagactggactgggacaaaataaaaaggagtctagatccaatgcagcaaaattagctcttgatgagcttctacaactggatgaacctgaaccacgaattttagaaacatcaggtcctcctcctttccctgcagaacctgttgttttatctgaactagcatatgtttcaaaagtacattatgaagggagacatattcaatatgcaaagatttcacagatcgttaaagaaagatttaatcaactaatttctaatcgttcagaatacctgaaatatagcagttcattggctgcttttataattgaaagagctggacaacatgaggttgtagctataggcacaggtgaataca

SEQ ID NO: 343216 - DNA, 269 bp, Homo sapiens
ctgcttcttggtcttttcagttaactttaccacatatcgtctcatgaccggaggaatttacaagagggtataacttagatttatccacatttctcatgaccttccctgtgccacctggagggctgtaagcagggtttgcttagtgtagcaagtcggcaaccttgctgtggcacctagataagggttcaggaatgcagctgcagagtattcggggtaagggtcagctgcactgcgggggcggttcctggggcagctcgtccctaacagta

SEQ ID NO: 343217 - DNA, 595 bp, Homo sapiens
cacacacacacacacacacacacacacacacacacacagagacagagagagacagagagagagttctgcttattctaagtctacatatgtcctctgaacaaacgtggcctcaaatgcaaaactcgcccgtctcgatatccacatttttctccattttgcccacgaatttctctctatcttgtgtgtgctcttaaaaacttgttctgcatattttggtccatgtctgcagctaccattactggaggcagaagtcagatgtatttgttctatattctctcaataaactaaaccatattacatgcatccaacgcaatgccattagccaaaccaaattatataggaagagactgcacaagagacttagcgaattgtctgtagacatgaggttttcctcaatcatatttttggcttgttgtacatgattaaaatgaaactatcttactgctgtttcagaaggagtctgatgagatatacctgctaatatgcctggaatgttattaagatttcagaaataactgcacctgcaaatcaattagcagtggcagagtaattatcagaaacagaatttcatgtacgacaaagaatgcatctgtac

SEQ ID NO: 343218 - DNA, 221 bp, Homo sapiens
tttacatctccgccttactctatcactggggttatagcctcctatgagtatttaggaaaaaaaaaattttaaaaaaaggccttccctacaccaactagaaatctcagaaggagcaactataaacaatacaatagttgtttctttggttagaaatgaagtataaaattccttagttttccaaacttaaacaataaaaaggagcaacaacatcaaagaacaag

SEQ ID NO: 343219 - DNA, 557 bp, Homo sapiens
ttctgatacaggagtgttaaagtgtccaattataatagtacattcatatatttctcattgtagttctatcagtttttgcctcacatattctgatgctttgttgttaggcatatagatattaagaattgttgtatcttcttcgattacttaccctttgtcattacgtcctatttatccctgataacgtacagtgctctgaagtctactattaatatagctaccctcagtttattttggttaatgttagcatgatatatctttctccattcctttacttttaatctttgtgtctttaaacttaaagtgggtttctagttgataacatatagttgggtcttgctttttaattcactctactaatctctgtcttttaattggtatatttaaccacagtgattattgatatagtctggactagtatctatcatatttattacaggtttctgtgtgtggcccctgttctttgttcctatttccgtcttttacactttttctgccttttgtggttttaactgagcacattatatgatttcattttctcccttttcttggcatat

SEQ ID NO: 343220 - DNA, 351 bp, Homo sapiens
ggtatataacagaatacaaatagctaaaaacaaaaatgatgatatggaagataagactgaatacatgtcctgaacatataataaaatgacaaggagggtcaggcgtggtgtctcacacctataatcccaacactttgggaggacaaggcaggtgaatcacctgaggtcaggagttggagaccagcctagccaacatggtgaaaccccgtctctaccaaaaatacaaaaattagccgggcatggtggcaggcgcctgtaatcccagctactcaggaggctgagacaggagaatcacttgaacctggaagaaagaggttgcagtgagccgagatcacgccactgcactccagc

SEQ ID NO: 343221 - DNA, 643 bp, Homo sapiens
tgctgggattacaggcatgagtcactgtgtctggccttaaaaaagcttatactatctggaaagttagatagtagggcttgtctccttatagtgatgctattagttgattaattaactcattagacgatttttgaaaagcagggagaagtggcacagtgtgggtaagtcttaagtggggtgctttgaaaagtaagaaatgtagaatgaggagtggctaaagatggagggatcaggctcaggtgagaggggagccaggggaacactgaggaactaagttaatagacggttttaagactccaaaaataaactttattgttttgcttgtggctctcaactgagagcacaagagatgggaacataataaagcacaaagaaattcagacaaggttcagagctcattcagggatggccaacaacttgatagtgtctctaaaatattacaagaccctggccttaatttgcttggtcaagtcccagatgtgttgccaagacatccagcgagggaggcaagactttgtgttgaatgtggtttccaaaccaaactgccacctgctagaaagaacatgtttttcagaccatttcagttcacatgtttgaatactgcacaatctggtgtgtgtgaatttagtaggaatgctagccc

SEQ ID NO: 343222 - DNA, 1002 bp, Homo sapiens
aaagaacatacacagggataagaaaagtgagagcaaaggcacaaaaggcagcataacatgggaacattaattagactatagcggaaaaagcagtctgactggctcacagggcacaaaggaataggaaaataaaaatagcagtaatcttcagttaagattaaggagatctctgagtatcagtgaagagctctgactcatttaataagcaacaacaatagacattttgaagataaacatgaatactgagaaaactaaagatacttttaaattaacgaaagaagttctaacagtagaaggctgaacaatacatctaggcatggtaagcatttcattaaaatatgagtaatatgtggtaattttttggcgaaaaacaaaaaatgaggtcagaaatagcataccaaatggaagaaactgcaagaaagtgacataaggatagttaagaaactggtaatttcagctttattcaatattatatggatattaagtatctgctatgtgcagccagggtaggtatcatatgcaaacatttttgcttccctattttttataacaggatattaattttgataccatggcatctaatatctaaggcacattgaagttacatttagttataccactatcacagaacatagcacttagggtatttgcctacaacctcacatgtattaacaaataaagcagatgtatggggcagactcccatttttccctcaaaaaagtacttcgaatctgccaaagtacatgaaaaaaaaaacaaattcaggctggatgcggtggttgacacctgtaatccttgggcaacaaggcgaaaccccacccctacaaaaaaatacacaaaattagccaggcgtggtggcctgcgcctgtagttccacctacccgggaggatgggaggtgaaaggatcacctgagcctggggaggttgaggttgcagtgagctgtgacagcgccacttcactctagcctgggtgacagagtgagaacctgccttgaaaaaaac

SEQ ID NO: 343223 - DNA, 1402 bp, Homo sapiens
cagactccatagccagactgcctgggcttgcatcccagcttcacgacttacaagctgtgtgaccatagataagttaccttgcctctctgttgctcagttttatcttctgaaacacagagatgttcagagtgcaacttttcaggatagtggtggagactaagtgagtttacacatataaagtacttagaacagtgcctggcacaaaataaggactacgtaagtgttagttattagtataagcttgcagagcttacattccagtaggtgaggaaataacctaaacaaacaaacaaaaaatattaggcaggtgataagtgccatgaagaaaataaaagagaaaagtgggagagagcgctgctgaggatctgtctcataccaggtggaaagagaatagcttgtgagagtgtatgagtggaatgaagtggtcagatgagagagcgcggcggagatggagagaagcggagaacttgatgcatattttggaggcaaaatcaacaagattggctgatggattaaaagcagaagattttgccatagagaaatctcttgcttttcaatctctccaatttgggaaccaaccaaccaaccagtctaccaaccagccaacgaaccaactactcaaccggtcaactgactcctcccggagacaaagattggagaattgcttgaatctggtacaaagactaaagcaaagtaatactgtatcatgcacagacctcaactctgtgaagacagtccctcatgctgtaggaagtcagccttgaatatctaggcttaggggaggctgagaaaggtcaccactggagaagtaagcggttggggcaggtcaggatccagggctctcaattcttatggagagattttgcttttttaaaacatcagacctgctggtgtttgcactcagttttctttcttataaaaatcaactctattgagatgtactgcccaatcaagatatagaacatttgcatcaccctagaaaacttccttgtgccccaaatcacatcactgatgtgatttctatcactatagctgagttttgtctatcctagaactttgtgtaaattgtccttttcttttgactttatgtagtttttttctcatgtggaagaaaaagaattattgtagttttatggtttttaaaaaatattcaaatcggattcatctgacatttattttggtgtagtgtgtgaaaggcacagatctaatctcatttattttctcccagagagctacctggttgtttcaacatcatttattgacaaatgtatcttttttctcactggtttaaatgccacctttatcatacattaaattcccaagtgtgctcaggtatatttctggaacgtccgttcttttcctttgatgtgttattcatgtctcaatacaatactcttttaat

SEQ ID NO: 343224 - DNA, 976 bp, Homo sapiens
gttctgcagaaacagtggtgagcaacgcagacaagatatctgttgctttagagctgtcattgtggtttgggaagtcagacaagaaatgattttataggttgttgaataggacttttcctctgctcttggaatatctgctgaagccacaaagatagaacaatgagggctaaatattcttgcattctgaagagaagtactagacaccttactaaaggcagaacaggttcaacagcaatcaaactacatccctcaattccagtctacaaatgaaagggattgaagaaagtcactgaagcataacactgctgcatttgtgggcagggctgagatttcccctgagggaactccccaactcaaaccaaatgaagggagctcccagagagaaccagtcatctgcaagaagaggaggctctgtccctataactgtccccccactgatgctgactatgttgctggatgttacaggcacctcggtgcattaaactacagcaagacagttcatgggagaacccaacatatgtctttaggaattgaggacgtacataaatgaagagacttgtgtgcacttcctgtctggagaattctgatcgtggagcctcgctggagtggcctgtgtggcaaggtgagaagtgggcagggtgaggagcggccaacccaccattgttttgcctggcataggtgggacagtcctatgagagacagaggatgcaggggtctccgagaggttggccagagagtaatttgctatggcaactcagggtggaggtcctgtagagaacctcccaaaaacccacatatgtgcccatgaaaaagccagcgcttggcacctgccaaccaagggtacctgtcacataagactttgctacttttcctctaacacctctctcccagccttgacaaagaggagccacagcagaaaagggaggtcaggaaaacagaccacaccccactctcaccactgcaggatctctagcaa

SEQ ID NO: 343225 - DNA, 663 bp, Homo sapiens
ccaagttcaattcttaagacattcctgtcttatttcttctaaaatttcacctttaaaatgatgttttcaaagtatggttgaatgtttaatgtgctcaaacactttttctgcaactagggatgaaataatataatttctttctttaaactctgaatgtgatgaatcatattaattcatgtgattagtattttagtataaaccatctcaggcatataaaatagtataaaagaataccttgtacccactacttagcttaagtgaacatccatgtaccctgtacttaagaaatagaacattacagacctgtctgaagacctcacccctgcatagtcttccctgaatgaattccccattaccattatcctaaattttgttttaacttttctcatttttttcttacaatatacattgatgcattctctagtgatagattactttgaattcccaaaataaacccaactagttcatgatagtacatgtcatattaataatcttcctatcataatgcaaaattcctaaaagaaaaaaattagcaggcttgatccagctttcatcctttctggaatatttggtagtactcaaaacttgaaagaaaaacaccataggatctggtctgtccttccttcctttcttcctcttagtagctttactttcttttttttt

SEQ ID NO: 343226 - DNA, 440 bp, Homo sapiens
ggacaaatgaatctcttcccacgccatgggatttcccttgatttttatattgggagtgaaaagatgaagcatgagactcttcagctgcatctcgaactgcatctaatcccagcacatctctctcaatctttgattaagtctgttcatctaaaagagagacacaggggaaaaatggaaatgggactttggaagaatgaccatccacattcccatcacagcctgagatttcctacctgattgagattttcagtagatggccctaggtctagtttcccactttggacctgctgcccttggctccaatagaggacttccaagtaactaggaagatttcacctctcttttgaaacataatggacaaatgtgtttctttaggatgagaggtgcacctggctagtcaatctttattttcctaaaataaacaggatgaaaactcaaaa

SEQ ID NO: 343227 - DNA, 786 bp, Homo sapiens
gtgatgctgctaaacactgtcagtagttgtctatccccataccttcactcctatttttaaaaagaccatgaaaaaaataccagatccattgattggtttggtctaattatacagatatcggcatatactatctcaagacagctgtgttctttttgtaggaagaatcctggcctagatttgtatcatagctctaccactcattagctccctgaccttggggaagtctcttcatttttctgaatttcatctatgtagataatccttcagaaggttataatgaaaattaaatgaaattctatgagattagggaggggggagggatagcattaggagatatacttaatgtgaatgatgagttaatggatgtagcacaccaacatggcacatgtatacatatgtaacaaacctgcacgttgtgcacatgcaccctagaacttaaagtataatttaaaaaagaaaagaaattctatgagattaataagctatatgatgtaatacatggctcttgtatattcatgaactcttcacttagctctttggcttgtgaatattatgtacatcaaaatttaatttttcatttgatctattttactagactcctgccccatctagtctacctgtccacattattaccacattctagtccatcttgcccattactaccaggctaagctttctagtgtggatatgtcatcatcttattttccttagaattttagcgatctttttatcatttccaagataaacacttgcctaggtgtacagcatccttgtttaccatcatac

SEQ ID NO: 343228 - DNA, 351 bp, Homo sapiens
aagaaatgacactctttttctgagaaactataatgtgtggacataggaactgtctttgtgaagttaagatgaggcccctaatccgttgtgactggtgtccttctaagaagatggccgcataaaggcagagaaacacagggaaaataccatgtgacggtctctgaggacgatgttaaagtgccgcatctacaagacaagaaatgccaaagactgccagcaactaccagggtctaggaagaggcaagaaggactctttctctacaagtttcagagggagtgcagtgctgccaataccttgatttcaagcttgtagctgcccaaactgtaaaacaatacatttctgttgtttta

SEQ ID NO: 343229 - DNA, 299 bp, Homo sapiens
caatcatcattaaacccattttctgaaatgaccacctcatagattcttgggtatgattacactctccattacctacttagggacagcaaataggttttgcattcacttgtactttttcattacaagaaatggagattccaaccccgaatggcctaagcaaaaaggaaatgtattcactcatgtcacacacaccaacaaatgtctagaacaagactatcttcagctatagcttgatttaaagactctgccagccatatacctgtctgtcctgtcacagaaatggctgccacaggtcctgg

SEQ ID NO: 343230 - DNA, 116 bp, Homo sapiens
tgacaattcagaccatattcttagtcttccatgactctgttctttatctcataccccaaatccagtcagatagaaaatctttttgttctgtcttcaaaatatatcctgaatcagac

SEQ ID NO: 343231 - DNA, 482 bp, Homo sapiens
atctagtggtggtggaagggggtggatatattttgcatatgagggggatgtaaattgttgagagcaaagggcagaatgtggtggactgtttgcacagacggtcaccaattcctctcaccctgtattcacatgccattcctccaggatggagtctattttatacaaatgtttataacagccattattcattattcctaatagccataaagtagaaacaacctaaatgcccatcaaccaatgaaaggataactaaaacgtggtatatccacaatggaatattatttggcaataggaaggaataaagtattgatacatgctacaacatagatgaaccctggaaatatcaagctaagtgaaagaagcatgtaacaaaagaccaaatattgtatggttccatttatacaaaatgtccagaacagacaaatctatagagacagagtagattaatggtggggaagaggccgggcgcgatggctcacgcc

SEQ ID NO: 343232 - DNA, 366 bp, Homo sapiens
cctttcataaacggcttatcctgtccaactggtagtttctactgagtagaaatctttaagtgggattacttaaccctagagtatgaatattttaaactttactacaataaatattgcatcatatggctgaatcatcttaacaatcttatcagcaatgtttgagttcctattgtccccaaatggtcaccaaaagttatcatcagacttcatatttgtccaacacatgaatacaaaattatcattttaatttgcagttctctattactgagtttcagtatattttaaatattctactttcagatttccttcagccagacacggtggctcacgactgtaatcccagcactttgggaggctgaggtgggc

SEQ ID NO: 343233 - DNA, 166 bp, Homo sapiens
ggaacccacagggatccacataaatgacaaatccataacattgaaacatgctgtcatcatctctatagatgcctggaactttgacactgaacagtaatgaaagcagagtatttggtaaaatatctggacatagaccaaactgtaatcctgatgctatgtaaaacag

SEQ ID NO: 343234 - DNA, 618 bp, Homo sapiens
gtcaggagttcaagaccagcctggccaatatggcaaaaccccgtttctactaaaaatacgaaaatattagctgagcatggtggcgtgtgcctgtaatcccagctacttaggaggctgaggcatgagaatcgcttgaacctgggaggcagaggttgcagtgagctgagatcacaccactgtactccagcctgggtgacagagcgagagtccacctcaaaaaaaaaaagaaggttaatactcctatatgtaactttttaaaattaactaataaaatgacaaaaagcccaaaggaaaaatacactgaggtaatgacaggcaactcatgaaaaaaaaaaaaaaaaaactcgagttttttttttttttttttcttttaactcatctgtatttgttacaactttaagcagaatgtgactcgagcactacatttccatccacaagactgggtctgagttatttttgaacagctttacgatatgcttaggtaggcttttaactttgctccttcaaacaatacttttctttggaaaacaagccctgtggagagatccttcatcaagtgcttcagttaacctattctagagactagtcatgcagaatggcactacgggaatgaaagtc

SEQ ID NO: 343235 - DNA, 205 bp, Homo sapiens
tatgttgtctatgtctgcaaaaaaatctttccagaattttgatgggaattacattaatggcatttagaaagaattgacatttttactatattgagtcttctaatccatgaacatggaatgtctcttcatttatttagatctatgttttctttcaccatgttagccagggtggtctcaaactcctgacctcgtgattccccctgcg

SEQ ID NO: 343236 - DNA, 647 bp, Homo sapiens
atgggaaaagttgatagtgctgactgtactactctgcctgggtacacacctcttgaaccttcctttgttcaaaatgagtgtggtgtctaataaggagaatgggttttgaagtcagacaaacttaaaatcatgtctgtgatctgagcctttctggctgtgtgaccttcagtttttttacctctctgttagttttcctgtctgtacattgagatttataatagtgaatacatggcagagttgtgttaacttaaataaagtaaattaaactgcctggtttaatagctggcacattttgtgagctccataaatagtagctgtttattgactttatttcttttaaagaccagatgatgactctctccagaacctcttgtgcagctttcaccactaaccccaggtagattgcaccttcatgcctctcctaatggttatacaacttgcccttgcacattgttgtgtactgatttatttaacatctctcttgtacttcctatgagctctttgagtttagtgactgtcttatttatctttgcaacccaagcaattcccacagagcctggcaataacattcaccaacaaatgcttgctggtggattcaatgtgtcgatgggtttgaagactgtgacaaggctacgggaggactctat

SEQ ID NO: 343237 - DNA, 754 bp, Homo sapiens
tgtgaaaaagtcttcagccagagttcatcccttactcttcatcaaagaattcatactggagagaaaccctataaatgtatagagtgtggaaaagccttcagccagagatcaaatcttgttcaacatcagaggattcatactggagaaaaaccctatgaatgtaaggaatgtaggaaagccttcagtcagaatgcacacctagttcaacatctgcgagttcatactggagaaaaaccttacgaatgtaaggtatgtcgaaaagccttcagccagtttgcctaccttgctcaacatcagagagttcacacgggagagaaaccctatgaatgtatcgaatgtgggaaagcatttagcaacagatcatccattgctcaacaccagagagttcatacaggagagaaaccctatgaatgtaatgtctgtgggaaagcatttagccttcgtgcataccttactgtacatcagagaatacatactggagagagaccctatgaatgtaaggaatgtgggaaggcctttagccagaattcacaccttgctcaacatcagagaattcatactggagaaaaaccttataagtgtcaggaatgtaggaaagcattcagccagattgcctaccttgctcagcatcaaagagttcatactggagagaaaccctatgaatgtattgaatgtgggaaggcttttagcaatgactcgtcccttactcaacatcagcgagttcatactggagagaaaccttatgaatgtactg

SEQ ID NO: 343238 - DNA, 254 bp, Homo sapiens
tagctttgcagggtatagtattcttggttgccattttatgtcaatatttggaacatattatcccattctttcctggcctacaaaatttttgtggagaaatctgctgatagtctcatagggattcccttgaatgacaagttgcttttttcttgcatctttcaaaagtttttgactttgacagtttcattgtgatgtgtcttgttgtagacttgtgttcaacctatttgggatcctatgggcttcttcagtctgga

SEQ ID NO: 343239 - DNA, 518 bp, Homo sapiens
aatggagaccctgagaagtcacctttggtgtcacgagcaccttcaggtgaaaggaagtagccttaggctgggaatcccacctctgcacatggcttcctgtgtcacaagggcagacaccctgctgtggacctcaggtgcatgtctgtctaggtgaatatctatctaaataaagctctatgtaaaatgaaggcattcgatttcatggcctctcgggccccttttagttcgaatgatctggtaaatccacctttttttgacagtaacattttctgactctttaaccctgcaaacaatattaaccagccaaggaactggctacccattacatatctcgcccataagcaataacaatcagtattaataataattattagatattcaattgtagctcttaaatgtattccagccccctgatcgttgtaaattagtatgtaattttggagagatgggggtctgtctttgttgcccaggttggtatcaaactcctaggttcaagcgatccacctgcctcagccatc

SEQ ID NO: 343240 - DNA, 376 bp, Homo sapiens
gctgcagtgagctgagattgtgccactgcaccacagcctgggtgacagagcaagattccatctcaggaaaaaaaaaaaaaagtattttcaaatcatctgactcctcctctctcccagtgcaatgactttaggcagcagtccccaacctttttggtaccagggactggtttgtggaagacagtttttccactgacccgggggaaatgattttgagatgattcaaacattacatttattgtgtactttattactatttttaaaaattattattattatttttagagacagagttttgctcttgttgcccaggctggagtgagctgagattgtgccactgcaccacagcctgggtgacagagcaagattccatctcagg

SEQ ID NO: 343241 - DNA, 180 bp, Homo sapiens
aattcctgcttgatgagatggaaggtccaagtcaatagcctcatggtcctcccaagtctgacagtctgctattctacacacctgtccacaggctgcagacatataaaggtaaatgttcaggtattagaaaatattcaaagaattctcaatgttcaaaattctgaaaagcaaatctatgct

SEQ ID NO: 343242 - DNA, 424 bp, Homo sapiens
tgcaggttaaatctggtcatgaggtcttggcttctgaacaagcaactaagaacgaaaacaaataataagagtctttatttaaagtccaatctgtgactccttgtgaaaacttccagcaaagcaaacttaagacagcctatatgcttcacagatgtaatcaggtcaaattaatgacctcattcttattttatgacgaagaatattatcctttttttgacaagaatattcttttgagattatttttggtcaaaagagggtaagtctgtaagaaaataattttgtttcaaatgaaaactatgcatcgtctaaatacagcatatgcttctgggatatcaggttctagccttttattatctttgagttattttacagttttttgtaaattaataggcatgcaaattctatcttgtccagtacagtttca

SEQ ID NO: 343243 - DNA, 1493 bp, Homo sapiens
  misc_feature (1066)..(1066): n is a, c, g, or t
  misc_feature (1093)..(1093): n is a, c, g, or t
  misc_feature (1253)..(1253): n is a, c, g, or t
cgcggttcggcggcggcatccggcctcgcacttccggtggggagattccggcctggagctcccagggccgaggtcactttggtggcagttcatggagaatagcttgaggtgacaagacagcagacacgacgtgggtctctgggactgcctgtgccgttgtgggcagcccctccagagccctgagtcacgcagccttcagaggcacccatggctacgagaagcacagtctctgcctgaggctccagagcggccctttttccccagcagcagaccttgggacctgtgagcgctgcatccaattaaccatgggaagggtcagcaccagccaccagccccttaggtgaggactctgcctggggctctgctgatggttccgaatcatggagctgcagagagctcctccagcctggagacgttcttggtgaaagctgtggtctaactccaccggctcttcctgcacattgtattcaagaggggtgcctgcccccgctgactcaggagctccggtgctgcagccgccacgaatggggaggtgggccctcgatgtggcctttttgtggaaggcggtgttgaccctggggctggtgcttctctactactgcttctccatcggcatcaccttctacaacaagtggctgacaaagagcttccatttccccctcttcatgacgatgctgcacctggccgtgatcttcctcttctccgccctgtccagggcgctggttcagtgctccagccacagggcccgtgtggtgctgagctgggccgactacctcagaagagtggctcccacagctctggcgacggcgcttgacgtgggcttgtccaactggagcttcctgtatgtcaccgtctcgctgtacacaatgaccaaatcctcagctgtcctcttcatcttgatcttctctctgatcttcaagctggaggagctgcgcgcggcactggtcctggtggtcctcctcatcgccgggggtctcttcatgttcacctacaagtccacacagttccacgtggagggcttcgccttggtgctgggggcctcgttcatcggtggcattcgctggancctcacccagatgctcctgcagaaggntgaactcggcctccagaatcccatcgacaccatgttccacctgcagccactcatgttcctggggctcttccctctctttgctgtcttttgaaggtctccattgtccacatctgagaacatcttccgttcccaggaaccggcctgctctgcgggtacttgngagctcttctggggggatgctgctttggttggggctctcgggctccccggtctccagaactcagctcatctttcatgccgggctttaggagctgcttggtcggcgctcgggggcacaatcgctctcgaggtggttcccttgctcgggaatccccagtgccaacgtcagttggccgcttggttcccctgccttcgcgggagatagttgccacgaccccccacctgtgctgcttggtccgtg

SEQ ID NO: 343244 - DNA, 1298 bp, Homo sapiens
  misc_feature (871)..(871): n is a, c, g, or t
  misc_feature (898)..(898): n is a, c, g, or t
  misc_feature (1058)..(1058): n is a, c, g, or t
cgcggttcggcggcggcatccggcctcgcacttccggtggggagattccggcctggagctcccagggccgagcagaccttgggacctgtgagcgctgcatccaattaaccatgggaagggtcagcaccagccaccagccccttaggtgaggactctgcctggggctctgctgatggttccgaatcatggagctgcagagagctcctccagcctggagacgttcttggtgaaagctgtggtctaactccaccggctcttcctgcacattgtattcaagaggggtgcctgcccccgctgactcaggagctccggtgctgcagccgccacgaatggggaggtgggccctcgatgtggcctttttgtggaaggcggtgttgaccctggggctggtgcttctctactactgcttctccatcggcatcaccttctacaacaagtggctgacaaagagcttccatttccccctcttcatgacgatgctgcacctggccgtgatcttcctcttctccgccctgtccagggcgctggttcagtgctccagccacagggcccgtgtggtgctgagctgggccgactacctcagaagagtggctcccacagctctggcgacggcgcttgacgtgggcttgtccaactggagcttcctgtatgtcaccgtctcgctgtacacaatgaccaaatcctcagctgtcctcttcatcttgatcttctctctgatcttcaagctggaggagctgcgcgcggcactggtcctggtggtcctcctcatcgccgggggtctcttcatgttcacctacaagtccacacagttccacgtggagggcttcgccttggtgctgggggcctcgttcatcggtggcattcgctggancctcacccagatgctcctgcagaaggntgaactcggcctccagaatcccatcgacaccatgttccacctgcagccactcatgttcctggggctcttccctctctttgctgtcttttgaaggtctccattgtccacatctgagaacatcttccgttcccaggaaccggcctgctctgcgggtacttgngagctcttctggggggatgctgctttggttggggctctcgggctccccggtctccagaactcagctcatctttcatgccgggctttaggagctgcttggtcggcgctcgggggcacaatcgctctcgaggtggttcccttgctcgggaatccccagtgccaacgtcagttggccgcttggttcccctgccttcgcgggagatagttgccacgaccccccacctgtgctgcttggtccgtg

SEQ ID NO: 343245 - DNA, 221 bp, Homo sapiens
cttggtgtgttggctggttgtctgaaactccattttcatttcactaataacttaaggaatgtactgacgctaataacgtcttgcagccctgttcttttcaaaggtgccaaaatattagtgcttaagtacactgatggtgtgctaaaggcagaatattcacctccctttattccaaggattcatgagaagatagcctaagagttctgtccacatgatgaaac

SEQ ID NO: 343246 - DNA, 5398 bp, Homo sapiens
agcgaaggaggcgggctttggccttttgccctagggagcgagtgcggagcgagtgggagcgagacggccctgagtggaagtgtctggctccccgtagaggcccttctgtacgccccgccgcccatgagctcgttctcacgcgaacagcgccgtcgttaggctggctctgtagcctcggcttaccccgggacaggcccacgcctcgccagggagggggcagcccgtcgaggcgcctccctagtcagcgtcggcgtcgcgctgcgaccctggaagcgggagccgccgcgagcgagaggaggagctccagtggcggcggcggcggcggcagcggcagcgggcagcagctccagcagcgccagcaggcgggatcgaggccgtcaacatggcgagcgcctcgtaccacatttccaatttgctggaaaaaatgacatccagcgacaaggactttaggtttatggctacaaatgatttgatgacggaactgcagaaagattccatcaagttggatgatgatagtgaaaggaaagtagtgaaaatgattttgaagttattggaagataaaaatggagaggtacagaatttagctgtcaaatgtcttggtcctttagtgagtaaagtgaaagaataccaagtagagacaattgtagataccctctgcactaacatgctttctgataaagaacaacttcgagacatttcaagtattggtcttaaaacagtaattggagaacttcctccagcttccagtggctctgcattagctgctaatgtatgtaaaaagattactggacgtcttacaagtgcaatagcaaaacaggaagatgtctctgttcagctagaagccttggatattatggctgatatgttgagcaggcaaggaggacttcttgttaatttccatccttcaattctgacctgtctacttccccagttgaccagccctagacttgcagtgaggaaaagaaccattatcgctcttggccatctggttatgagctgtggaaatatagtttttgtagatcttattgaacatctgttgtcagagttgtccaaaaatgattctatgtcaacaacaagaacctacatacaatgtattgctgctattagtaggcaagctggtcatagaataggtgaataccttgagaagataattcctttggtggtaaaattttgcaatgtagatgatgatgaattaagagagtactgtattcaagcctttgaatcatttgtaagaagatgtcctaaggaagtatatcctcatgtttctaccattataaatatttgtcttaaatatcttacctatgatccaaattataattacgatgatgaagatgaagatgaaaatgcaatggatgctgatggtggtgatgatgatgatcaagggagtgatgatgaatacagtgatgatgatgacatgagttggaaagtgagacgtgcagctgcgaagtgcttggatgctgtagttagcacaaggcatgaaatgcttccagaattctacaagaccgtctctcctgcactaatatccagatttaaagagcgtgaagagaatgtaaaggcagatgtttttcacgcatacctttctcttttgaagcaaactcgtcctgtacaaagttggctatgtgaccctgatgcaatggagcagggagaaacacctttaacaatgcttcagagtcaggttcccaacattgttaaagctcttcacaaacagatgaaagaaaaaagtgtgaagacccgacagtgttgttttaacatgttaactgagctggtaaatgtattacctggggccctaactcaacacattcctgtacttgtaccaggaatcattttctcactgaatgataaatcaagctcatcgaatttgaagatcgatgctttgtcatgtctatacgtaatcctctgtaaccattctcctcaagtcttccatcctcacgttcaggctttggttcctccagtggtggcttgtgttggagacccattttacaaaattacatctgaagcacttcttgttactcaacagcttgtcaaagtaattcgtcctttagatcagccttcctcgtttgatgcaactccttatatcaaagatctatttacctgtaccattaagagattaaaagcagctgacattgatcaggaagtcaaggaaagggctatttcctgtatgggacaaattatttgcaaccttggagacaatttgggttctgacttgcctaatacacttcagattttcttggagagactaaagaatgaaattaccaggttaactacagtaaaggcattgacactgattgctgggtcacctttgaagatagatttgaggcctgttctgggagaaggggttcctatccttgcttcatttcttagaaaaaaccagagagctttgaaactgggtactctttctgcccttgatattctaataaaaaactatagtgacagcttgacagctgccatgattgatgcagttctagatgagctcccacctcttatcagcgaaagtgatatgcatgtttcacaaatggccatcagttttcttaccactttggcaaaagtatatccctcctccctttcaaagataagtggatccattctcaatgaacttattggacttgtgagatcacccttattgcaggggggagctcttagtgccatgctagactttttccaagctctggttgtcactggaacaaataatttaggatacatggatttgttgcgcatgctgactggtccagtttactctcagagcacagctcttactcataagcagtcttattattccattgccaaatgtgtagctgcccttactcgagcatgccctaaagagggaccagctgtagtaggtcagtttattcaagatgtcaagaactcaaggtctacagattccattcgtctcttagctctactttctcttggagaagttgggcatcatattgacttaagtggacagttggaactaaaatctgtaatactagaagctttctcatctcctagtgaagaagtcaaatcagctgcatcctatgcattaggcagcattagtgtgggcaaccttcctgaatatctgccgtttgtcctgcaagaaataactagtcaacccaaaaggcagtatcttttacttcattccttgaaggaaattattagctctgcatcagtggtgggccttaaaccatatgttgaaaacatctgggccttattactaaagcactgtgagtgtgcagaggaaggaaccagaaatgttgttgctgaatgtctaggaaaactcactctaattgatccagaaactctccttccacggcttaaggggtacttgatatcaggctcatcatatgcccgaagctcagtggttacggctgtgaaatttacaatttctgaccatccacaacctattgatccactgttaaagaactgcataggtgatttcctaaaaactttggaagacccagatttgaatgtgagaagagtagccttggtcacatttaattcagcagcacataacaagccatcattaataagggatctattggatactgttcttccacatctttacaatgaaacaaaagttagaaaggagcttataagagaggtagaaatgggtccatttaaacatacggttgatgatggtctggatattagaaaggcagcatttgagtgtatgtacacacttctagacagttgtcttgatagacttgatatctttgaatttctaaatcatgttgaagatggtttgaaggaccattatgatattaagatgctgacatttttaatgttggtgagactgtctaccctttgtccaagtgcagtactgcagaggttggaccgacttgttgagccattacgtgcaacatgtacaactaaggtaaaggcaaactcagtaaagcaggagtttgaaaaacaagatgaattaaagcgatctgccatgagagcagtagcagcactgctaaccattccagaagcagagaagagtccactgatgagtgaattccagtcacagatcagttctaaccctgagctggcggctatctttgaaagtatccagaaagattcatcatctactaacttggaatcaatggacactagttagatgtttgttcaccatggggaccattacatatgaccatacaatgcactgaattgacaggttaatcataagacatggaaagagaagtgtctaaaagcttcaaaatgttccacttttttttccttcatggagactgtttgtttggctttcttccattgttgtttttgtagcatttatttcagaaatgtgtatttccataatccagaggttgtaaaaccactagtgttttagtggttacagcaacatttgaaatggaaactaaaagttaggattttatggagtatggagatagggtccagtatctatttaccctgtaatgtttaggattaaaatgttaaaattttgtgaccatgaatttctttcttttataaattttctcatttaaaaatcaaaaatcttgcaaaacaaaaaccatgtttctttttcttgtataactttttgttttcagcaacataaattgatttttagctggcagacaagaatatccatataagatttgttaaccatttcagagagtttggcaatttttaaaagataataaggtatcatttttaagtatgaaaattaacaatatccctgttgcgcacactaattttgcatgagtaagtttacaaatatgtatcgtctgtaaagcagcatgtgcagattattcataatatagaagttaaaataagtattagtgcaattttcagatatttatttttgcacagaaaacacattatctggagagaaagaaaggagaatttttgagacttgggttttcttaatgccagtgtgaatttgcagatgttttcagaaaatcaagtcacagtaacaatttgccacttttttctattataaatcttcttacttaaattttgaatatttagtttttctcagttacccatttgtgtgtgtgtgattccacttagaaattcttaaaaccagatttttctttcattccgtttggatgtctacattccttatcaaaggatataaatactgtgtatgcttttgaattttatttttaggaaaattctgaagccagctatcacaggtttgttagctaataatagtattttcttttagttgagttaggtttttccccatctcctgtagagcgaatttacatattgtattgggtaagtgttcactacttttcctgattaagggatctgtgctggggaacaaagcttttgcagtaccttatattgtagttaaaattttatttaacatatccttcagtgagctcatttcacactgtagcctcttccttaaaatttgtggtgctcctgtaacagtaagaactaattctgaaataaaagacatctcctaatgctgtgcaaa

SEQ ID NO: 343247 - DNA, 5865 bp, Homo sapiens
agcgaaggaggcgggctttggccttttgccctagggagcgagtgcggagcgagtgggagcgagacggccctgagtggaagtgtctggctccccgtagaggcccttctgtacgccccgccgcccatgagctcgttctcacgcgaacagcgccgtcgttaggctggctctgtagcctcggcttaccccgggacaggcccacgcctcgccagggagggggcagcccgtcgaggcgcctccctagtcagcgtcggcgtcgcgctgcgaccctggaagcgggagccgccgcgagcgagaggaggagctccagtggcggcggcggcggcggcagcggcagcgggcagcagctccagcagcgccagcaggcgggatcgaggccgtcaacatggcgagcgcctcgtaccacatttccaatttgctggaaaaaatgacatccagcgacaaggactttaggtttatggctacaaatgatttgatgacggaactgcagaaagattccatcaagttggatgatgatagtgaaaggaaagtagtgaaaatgattttgaagttattggaagataaaaatggagaggtacagaatttagctgtcaaatgtcttggtcctttagtgagtaaagtgaaagaataccaagtagagacaattgtagataccctctgcactaacatgctttctgataaagaacaacttcgagacatttcaagtattggtcttaaaacagtaattggagaacttcctccagcttccagtggctctgcattagctgctaatgtatgtaaaaagattactggacgtcttacaagtgcaatagcaaaacaggaagatgtctctgttcagctagaagccttggatattatggctgatatgttgagcaggcaaggaggacttcttgttaatttccatccttcaattctgacctgtctacttccccagttgaccagccctagacttgcagtgaggaaaagaaccattatcgctcttggccatctggttatgagctgtggaaatatagtttttgtagatcttattgaacatctgttgtcagagttgtccaaaaatgattctatgtcaacaacaagaacctacatacaatgtattgctgctattagtaggcaagctggtcatagaataggtgaataccttgagaagataattcctttggtggtaaaattttgcaatgtagatgatgatgaattaagagagtactgtattcaagcctttgaatcatttgtaagaagatgtcctaaggaagtatatcctcatgtttctaccattataaatatttgtcttaaatatcttacctatgatccaaattataattacgatgatgaagatgaagatgaaaatgcaatggatgctgatggtggtgatgatgatgatcaagggagtgatgatgaatacagtgatgatgatgacatgagttggaaagtgagacgtgcagctgcgaagtgcttggatgctgtagttagcacaaggcatgaaatgcttccagaattctacaagaccgtctctcctgcactaatatccagatttaaagagcgtgaagagaatgtaaaggcagatgtttttcacgcatacctttctcttttgaagcaaactcgtcctgtacaaagttggctatgtgaccctgatgcaatggagcagggagaaacacctttaacaatgcttcagagtcaggttcccaacattgttaaagctcttcacaaacagatgaaagaaaaaagtgtgaagacccgacagtgttgttttaacatgttaactgagctggtaaatgtattacctggggccctaactcaacacattcctgtacttgtaccaggaatcattttctcactgaatgataaatcaagctcatcgaatttgaagatcgatgctttgtcatgtctatacgtaatcctctgtaaccattctcctcaagtcttccatcctcacgttcaggctttggttcctccagtggtggcttgtgttggagacccattttacaaaattacatctgaagcacttcttgttactcaacagcttgtcaaagtaattcgtcctttagatcagccttcctcgtttgatgcaactccttatatcaaagatctatttacctgtaccattaagagattaaaagcagctgacattgatcaggaagtcaaggaaagggctatttcctgtatgggacaaattatttgcaaccttggagacaatttgggttctgacttgcctaatacacttcagattttcttggagagactaaagaatgaaattaccaggttaactacagtaaaggcattgacactgattgctgggtcacctttgaagatagatttgaggcctgttctgggagaaggggttcctatccttgcttcatttcttagaaaaaaccagagagctttgaaactgggtactctttctgcccttgatattctaataaaaaactatagtgacagcttgacagctgccatgattgatgcagttctagatgagctcccacctcttatcagcgaaagtgatatgcatgtttcacaaatggccatcagttttcttaccactttggcaaaagtatatccctcctccctttcaaagataagtggatccattctcaatgaacttattggacttgtgagatcacccttattgcaggggggagctcttagtgccatgctagactttttccaagctctggttgtcactggaacaaataatttaggatacatggatttgttgcgcatgctgactggtccagtttactctcagagcacagctcttactcataagcagtcttattattccattgccaaatgtgtagctgcccttactcgagcatgccctaaagagggaccagctgtagtaggtcagtttattcaagatgtcaagaactcaaggtctacagattccattcgtctcttagctctactttctcttggagaagttgggcatcatattgacttaagtggacagttggaactaaaatctgtaatactagaagctttctcatctcctagtgaagaagtcaaatcagctgcatcctatgcattaggcagcattagtgtgggcaaccttcctgaatatctgccgtttgtcctgcaagaaataactagtcaacccaaaaggcagtatcttttacttcattccttgaaggaaattattagctctgcatcagtggtgggccttaaaccatatgttgaaaacatctgggccttattactaaagcactgtgagtgtgcagaggaaggaaccagaaatgttgttgctgaatgtctaggaaaactcactctaattgatccagaaactctccttccacggcttaaggggtacttgatatcaggctcatcatatgcccgaagctcagtggttacggctgtgaaatttacaatttctgaccatccacaacctattgatccactgttaaagaactgcataggtgatttcctaaaaactttggaagacccagatttgaatgtgagaagagtagccttggtcacatttaattcagcagcacataacaagccatcattaataagggatctattggatactgttcttccacatctttacaatgaaacaaaagttagaaaggagcttataagagaggtagaaatgggtccatttaaacatacggttgatgatggtctggatattagaaaggcagcatttgagtgtatgtacacacttctagacagttgtcttgatagacttgatatctttgaatttctaaatcatgttgaagatggtttgaaggaccattatgatattaagatgctgacatttttaatgttggtgagactgtctaccctttgtccaagtgcagtactgcagaggttggaccgacttgttgagccattacgtgcaacatgtacaactaaggtaaaggcaaactcagtaaagcaggagtttgaaaaacaagatgaattaaagcgatctgccatgagagcagtagcagcactgctaaccattccagaagcagagaagagtccactgatgagtgaattccagtcacagatcagttctaaccctgagctggcggctatctttgaaagtatccagaaagattcatcatctactaacttggaatcaatggacactagttagatgtttgttcaccatggggaccattacatatgaccatacaatgcactgaattgacaggttaatcataagacatggaaagagaagtgtctaaaagcttcaaaatgttccacttttttttccttcatggagactgtttgtttggctttcttccattgttgtttttgtagcatttatttcagaaatgtgtatttccataatccagaggttgtaaaaccactagtgttttagtggttacagcaacatttgaaatggaaactaaaagttaggattttatggagtatggagatagggtccagtatctatttaccctgtaatgtttaggattaaaatgttaaaattttgtgaccatgaatttctttcttttataaattttctcatttaaaaatcaaaaatcttgcaaaacaaaaaccatgtttctttttcttgtataactttttgttttcagcaacataaattgatttttagctggcagacaagaatatccatataagatttgttaaccatttcagagagtttggcaatttttaaaagataataaggtatcatttttaagtatgaaaattaacaatatccctgttgcgcacactaattttgcatgagtaagtttacaaatatgtatcgtctgtaaagcagcatgtgcagattattcataatatagaagttaaaataagtattagtgcaattttcagatatttatttttgcacagaaaacacattatctggagagaaagaaaggagaatttttgagacttgggttttcttaatgccagtgtgaatttgcagatgttttcagaaaatcaagtcacagtaacaatttgccacttttttctattataaatcttcttacttaaattttgaatatttagtttttctcagttacccatttgtgtgtgtgtgattccacttagaaattcttaaaaccagatttttctttcattccgtttggatgtctacattccttatcaaaggatataaatactgtgtatgcttttgaattttatttttaggaaaattctgaagccagctatcacaggtttgttagctaataatagtattttcttttagttgagttaggtttttccccatctcctgtagagcgaatttacatattgtattgggtaagtgttcactacttttcctgattaagggatctgtgctggggaacaaagcttttgcagtaccttatattgtagttaaaattttatttaacatatccttcagtgagctcatttcacactgtagcctcttccttaaaatttgtggtgctcctgtaacagtaagaactaattctgaaataaaagacatctcctaatgctgtgcaaacatagtttacatgtattgaaggaggcagttgttaaattgagtgaccaatttaagcaatcagatatttgaaaactgcaccctttagttttgaaactgtgaattagaaacacttttcctgctgtattactacctgctttaacatccaaatatacagtgattttaaatgataacatactgtggttattagattaacagcttgattttgaatgttcagatgataatgcagaagacatcacttctagtaaggattttgactagtgcattgatgttgaagttggtgccatttcaaaatgtggcaggtgataatcttttaccataatttgcataaaactgtaatagaagtttattttgagatgttagtatattatgtactatgcatttctgtggtatagatgttgtggatatatttaagtatttggttacatggttttacaataaattacaatactgcaggctctaggactgaa

SEQ ID NO: 343248 - DNA, 3425 bp, Homo sapiens
agtagctgtcttgagtacctataaatccggcaatcgcagtcagccgtagtagatactgatgtgcaacaagcaatgaacctacatacaatgtattgctgctattagtaggcaagctggtcatagaataggtgaataccttgagaagataattcctttggtggtaaaattttgcaatgtagatgatgatgaattaagagagtactgtattcaagcctttgaatcatttgtaagaagatgtcctaaggaagtatatcctcatgtttctaccattataaatatttgtcttaaatatcttacctatgatccaaattataattacgatgatgaagatgaagatgaaaatgcaatggatgctgatggtggtgatgatgatgatcaagggagtgatgatgaatacagtgatgatgatgacatgagttggaaagtgagacgtgcagctgcgaagtgcttggatgctgtagttagcacaaggcatgaaatgcttccagaattctacaagaccgtctctcctgcactaatatccagatttaaagagcgtgaagagaatgtaaaggcagatgtttttcacgcatacctttctcttttgaagcaaactcgtcctgtacaaagttggctatgtgaccctgatgcaatggagcagggagaaacacctttaacaatgcttcagagtcaggttcccaacattgttaaagctcttcacaaacagatgaaagaaaaaagtgtgaagacccgacagtgttgttttaacatgttaactgagctggtaaatgtattacctggggccctaactcaacacattcctgtacttgtaccaggaatcattttctcactgaatgataaatcaagctcatcgaatttgaagatcgatgctttgtcatgtctatacgtaatcctctgtaaccattctcctcaagtcttccatcctcacgttcaggctttggttcctccagtggtggcttgtgttggagacccattttacaaaattacatctgaagcacttcttgttactcaacagcttgtcaaagtaattcgtcctttagatcagccttcctcgtttgatgcaactccttatatcaaagatctatttacctgtaccattaagagattaaaagcagctgacattgatcaggaagtcaaggaaagggctatttcctgtatgggacaaattatttgcaaccttggagacaatttgggttctgacttgcctaatacacttcagattttcttggagagactaaagaatgaaattaccaggttaactacagtaaaggcattgacactgattgctgggtcacctttgaagatagatttgaggcctgttctgggagaaggggttcctatccttgcttcatttcttagaaaaaaccagagagctttgaaactgggtactctttctgcccttgatattctaataaaaaactatagtgacagcttgacagctgccatgattgatgcagttctagatgagctcccacctcttatcagcgaaagtgatatgcatgtttcacaaatggccatcagttttcttaccactttggcaaaagtatatccctcctccctttcaaagataagtggatccattctcaatgaacttattggacttgtgagatcacccttattgcaggggggagctcttagtgccatgctagactttttccaagctctggttgtcactggaacaaataatttaggatacatggatttgttgcgcatgctgactggtccagtttactctcagagcacagctcttactcataagcagtcttattattccattgccaaatgtgtagctgcccttactcgagcatgccctaaagagggaccagctgtagtaggtcagtttattcaagatgtcaagaactcaaggtctacagattccattcgtctcttagctctactttctcttggagaagttgggcatcatattgacttaagtggacagttggaactaaaatctgtaatactagaagctttctcatctcctagtgaagaagtcaaatcagctgcatcctatgcattaggcagcattagtgtgggcaaccttcctgaatatctgccgtttgtcctgcaagaaataactagtcaacccaaaaggcagtatcttttacttcattccttgaaggaaattattagctctgcatcagtggtgggccttaaaccatatgttgaaaacatctgggccttattactaaagcactgtgagtgtgcagaggaaggaaccagaaatgttgttgctgaatgtctaggaaaactcactctaattgatccagaaactctccttccacggcttaaggggtacttgatatcaggctcatcatatgcccgaagctcagtggttacggctgtgaaatttacaatttctgaccatccacaacctattgatccactgttaaagaactgcataggtgatttcctaaaaactttggaagacccagatttgaatgtgagaagagtagccttggtcacatttaattcagcagcacataacaagccatcattaataagggatctattggatactgttcttccacatctttacaatgaaacaaaagttagaaaggagcttataagagaggtagaaatgggtccatttaaacatacggttgatgatggtctggatattagaaaggcagcatttgagtgtatgtacacacttctagacagttgtcttgatagacttgatatctttgaatttctaaatcatgttgaagatggtttgaaggaccattatgatattaagatgctgacatttttaatgttggtgagactgtctaccctttgtccaagtgcagtactgcagaggttggaccgacttgttgagccattacgtgcaacatgtacaactaaggtaaaggcaaactcagtaaagcaggagtttgaaaaacaagatgaattaaagcgatctgccatgagagcagtagcagcactgctaaccattccagaagcagagaagagtccactgatgagtgaattccagtcacagatcagttctaaccctgagctggcggctatctttgaaagtatccagaaagattcatcatctactaacttggaatcaatggacactagttagatgtttgttcaccatggggaccattacatatgaccatacaatgcactgaattgacaggttaatcataagacatggaaagagaagtgtctaaaagcttcaaaatgttccacttttttttccttcatggagactgtttgtttggctttcttccattgttgtttttgtagcatttatttcagaaatgtgtatttccataatccagaggttgtaaaaccactagtgttttagtggttacagcaacatttgaaatggaaactaaaagttaggattttatggagtatggagatagggtccagtatctatttaccctgtaatgtttaggattaaaatgttaaaattttgtgaccatgaa

SEQ ID NO: 343249 - DNA, 6702 bp, Homo sapiens
agcgaaggaggcgggctttggccttttgccctagggagcgagtgcggagcgagtgggagcgagacggccctgagtggaagtgtctggctccccgtagaggcccttctgtacgccccgccgcccatgagctcgttctcacgcgaacagcgccgtcgttaggctggctctgtagcctcggcttaccccgggacaggcccacgcctcgccagggagggggcagcccgtcgaggcgcctccctagtcagcgtcggcgtcgcgctgcgaccctggaagcgggagccgccgcgagcgagaggaggagctccagtggcggcggcggcggcggcagcggcagcgggcagcagctccagcagcgccagcaggcgggatcgaggccgtcaacatggcgagcgcctcgtaccacatttccaatttgctggaaaaaatgacatccagcgacaaggactttaggtttatggctacaaatgatttgatgacggaactgcagaaagattccatcaagttggatgatgatagtgaaaggaaagtagtgaaaatgattttgaagttattggaagataaaaatggagaggtacagaatttagctgtcaaatgtcttggtcctttagtgagtaaagtgaaagaataccaagtagagacaattgtagataccctctgcactaacatgctttctgataaagaacaacttcgagacatttcaagtattggtcttaaaacagtaattggagaacttcctccagcttccagtggctctgcattagctgctaatgtatgtaaaaagattactggacgtcttacaagtgcaatagcaaaacaggaagatgtctctgttcagctagaagccttggatattatggctgatatgttgagcaggcaaggaggacttcttgttaatttccatccttcaattctgacctgtctacttccccagttgaccagccctagacttgcagtgaggaaaagaaccattatcgctcttggccatctggttatgagctgtggaaatatagtttttgtagatcttattgaacatctgttgtcagagttgtccaaaaatgattctatgtcaacaacaagaacctacatacaatgtattgctgctattagtaggcaagctggtcatagaataggtgaataccttgagaagataattcctttggtggtaaaattttgcaatgtagatgatgatgaattaagagagtactgtattcaagcctttgaatcatttgtaagaagatgtcctaaggaagtatatcctcatgtttctaccattataaatatttgtcttaaatatcttacctatgatccaaattataattacgatgatgaagatgaagatgaaaatgcaatggatgctgatggtggtgatgatgatgatcaagggagtgatgatgaatacagtgatgatgatgacatgagttggaaagtgagacgtgcagctgcgaagtgcttggatgctgtagttagcacaaggcatgaaatgcttccagaattctacaagaccgtctctcctgcactaatatccagatttaaagagcgtgaagagaatgtaaaggcagatgtttttcacgcatacctttctcttttgaagcaaactcgtcctgtacaaagttggctatgtgaccctgatgcaatggagcagggagaaacacctttaacaatgcttcagagtcaggttcccaacattgttaaagctcttcacaaacagatgaaagaaaaaagtgtgaagacccgacagtgttgttttaacatgttaactgagctggtaaatgtattacctggggccctaactcaacacattcctgtacttgtaccaggaatcattttctcactgaatgataaatcaagctcatcgaatttgaagatcgatgctttgtcatgtctatacgtaatcctctgtaaccattctcctcaagtcttccatcctcacgttcaggctttggttcctccagtggtggcttgtgttggagacccattttacaaaattacatctgaagcacttcttgttactcaacagcttgtcaaagtaattcgtcctttagatcagccttcctcgtttgatgcaactccttatatcaaagatctatttacctgtaccattaagagattaaaagcagctgacattgatcaggaagtcaaggaaagggctatttcctgtatgggacaaattatttgcaaccttggagacaatttgggttctgacttgcctaatacacttcagattttcttggagagactaaagaatgaaattaccaggttaactacagtaaaggcattgacactgattgctgggtcacctttgaagatagatttgaggcctgttctgggagaaggggttcctatccttgcttcatttcttagaaaaaaccagagagctttgaaactgggtactctttctgcccttgatattctaataaaaaactatagtgacagcttgacagctgccatgattgatgcagttctagatgagctcccacctcttatcagcgaaagtgatatgcatgtttcacaaatggccatcagttttcttaccactttggcaaaagtatatccctcctccctttcaaagataagtggatccattctcaatgaacttattggacttgtgagatcacccttattgcaggggggagctcttagtgccatgctagactttttccaagctctggttgtcactggaacaaataatttaggatacatggatttgttgcgcatgctgactggtccagtttactctcagagcacagctcttactcataagcagtcttattattccattgccaaatgtgtagctgcccttactcgagcatgccctaaagagggaccagctgtagtaggtcagtttattcaagatgtcaagaactcaaggtctacagattccattcgtctcttagctctactttctcttggagaagttgggcatcatattgacttaagtggacagttggaactaaaatctgtaatactagaagctttctcatctcctagtgaagaagtcaaatcagctgcatcctatgcattaggcagcattagtgtgggcaaccttcctgaatatctgccgtttgtcctgcaagaaataactagtcaacccaaaaggcagtatcttttacttcattccttgaaggaaattattagctctgcatcagtggtgggccttaaaccatatgttgaaaacatctgggccttattactaaagcactgtgagtgtgcagaggaaggaaccagaaatgttgttgctgaatgtctaggaaaactcactctaattgatccagaaactctccttccacggcttaaggggtacttgatatcaggctcatcatatgcccgaagctcagtggttacggctgtgaaatttacaatttctgaccatccacaacctattgatccactgttaaagaactgcataggtgatttcctaaaaactttggaagacccagatttgaatgtgagaagagtagccttggtcacatttaattcagcagcacataacaagccatcattaataagggatctattggatactgttcttccacatctttacaatgaaacaaaagttagaaaggagcttataagagaggtagaaatgggtccatttaaacatacggttgatgatggtctggatattagaaaggcagcatttgagtgtatgtacacacttctagacagttgtcttgatagacttgatatctttgaatttctaaatcatgttgaagatggtttgaaggaccattatgatattaagatgctgacatttttaatgttggtgagactgtctaccctttgtccaagtgcagtactgcagaggttggaccgacttgttgagccattacgtgcaacatgtacaactaaggtaaaggcaaactcagtaaagcaggagtttgaaaaacaagatgaattaaagcgatctgccatgagagcagtagcagcactgctaaccattccagaagcagagaagagtccactgatgagtgaattccagtcacagatcagttctaaccctgagctggcggctatctttgaaagtatccagaaagattcatcatctactaacttggaatcaatggacactagttagatgtttgttcaccatggggaccattacatatgaccatacaatgcactgaattgacaggttaatcataagacatggaaagagaagtgtctaaaagcttcaaaatgttccacttttttttccttcatggagactgtttgtttggctttcttccattgttgtttttgtagcatttatttcagaaatgtgtatttccataatccagaggttgtaaaaccactagtgttttagtggttacagcaacatttgaaatggaaactaaaagttaggattttatggagtatggagatagggtccagtatctatttaccctgtaatgtttaggattaaaatgttaaaattttgtgaccatgaatttctttcttttataaattttctcatttaaaaatcaaaaatcttgcaaaacaaaaaccatgtttctttttcttgtataactttttgttttcagcaacataaattgatttttagctggcagacaagaatatccatataagatttgttaaccatttcagagagtttggcaatttttaaaagataataaggtatcatttttaagtatgaaaattaacaatatccctgttgcgcacactaattttgcatgagtaagtttacaaatatgtatcgtctgtaaagcagcatgtgcagattattcataatatagaagttaaaataagtattagtgcaattttcagatatttatttttgcacagaaaacacattatctggagagaaagaaaggagaatttttgagacttgggttttcttaatgccagtgtgaatttgcagatgttttcagaaaatcaagtcacagtaacaatttgccacttttttctattataaatcttcttacttaaattttgaatatttagtttttctcagttacccatttgtgtgtgtgtgattccacttagaaattcttaaaaccagatttttctttcattccgtttggatgtctacattccttatcaaaggatataaatactgtgtatgcttttgaattttatttttaggaaaattctgaagccagctatcacaggtttgttagctaataatagtattttcttttagttgagttaggtttttccccatctcctgtagagcgaatttacatattgtattgggtaagtgttcactacttttcctgattaagggatctgtgctggggaacaaagcttttgcagtaccttatattgtagttaaaattttatttaacatatccttcagtgagctcatttcacactgtagcctcttccttaaaatttgtggtgctcctgtaacagtaagaactaattctgaaataaaagacatctcctaatgctgtgcaaacatagtttacatgtattgaaggaggcagttgttaaattgagtgaccaatttaagcaatcagatatttgaaaactgcaccctttagttttgaaactgtgaattagaaacacttttcctgctgtattactacctgctttaacatccaaatatacagtgattttaaatgataacatactgtggttattagattaacagcttgattttgaatgttcagatgataatgcagaagacatcacttctagtaaggattttgactagtgcattgatgttgaagttggtgccatttcaaaatgtggcaggtgataatcttttaccataatttgcataaaactgtaatagaagtttattttgagatgttagtatattatgtactatgcatttctgtggtatagatgttgtggatatatttaagtatttggttacatggttttacaataaattacaatactgcaggctctaggactgaacaggagactgacatgcatatgttgtgtgaatgtcttagttgggtaaagttaaatccaaatacttcaactggctttttcttcagtttgtttgtttttaactttcaagatgcatgttttgttttgttttgctttgtttttgtctcttaagccaattcatttttctaacagttgaaattcttttagtactaaagaaatagatactgctcttttatggctttagtgtttatatacctgtttatatgcatacattaacaaaattagtaacagcagtgcttagaatttcaatgctgtgtcatactgatgattaactccatactcctagtggtgatgtggtccagatactggaatggaagtggcaggatgtggagtccagacatagtctaccactcatgctacttactagtaatattaaggtgttaaacttaggaatttgtcacatgtaggttcctgaggagatctaaaagttaatacaaaaccaagctgtttactgattttcatgagaacatttaagttagtttaggtctacctgatttattttaaaagaaggcagagggctggacgcagtggcttacgcctgtaatcccagcactttgggaggccgaggcgggcggatcacgaggtcaggagatcgagactatcctggctaacactgtgaaaacccatctctactgaaaatacaaaaaattagctgggcgtggtggcagacgcctgtagtcctagctgctacagctgaggcaggagaatggcgtgaacccaggaggcggagctggcagtgagccgagatcacgccactgcactctggcctgggcaacagagcgagagtctgtctcaaaaaaa

SEQ ID NO: 343250 - DNA, 5453 bp, Homo sapiens
  misc_feature (5428)..(5430): n is a, c, g, or t
agcgaaggaggcgggctttggccttttgccctagggagcgagtgcggagcgagtgggagcgagacggccctgagtggaagtgtctggctccccgtagaggcccttctgtacgccccgccgcccatgagctcgttctcacgcgaacagcgccgtcgttaggctggctctgtagcctcggcttaccccgggacaggcccacgcctcgccagggagggggcagcccgtcgaggcgcctccctagtcagcgtcggcgtcgcgctgcgaccctggaagcgggagccgccgcgagcgagaggaggagctccagtggcggcggcggcggcggcagcggcagcgggcagcagctccagcagcgccagcaggcgggatcgaggccgtcaacatggcgagcgcctcgtaccacatttccaatttgctggaaaaaatgacatccagcgacaaggactttaggtttatggctacaaatgatttgatgacggaactgcagaaagattccatcaagttggatgatgatagtgaaaggaaagtagtgaaaatgattttgaagttattggaagataaaaatggagaggtacagaatttagctgtcaaatgtcttggtcctttagtgagtaaagtgaaagaataccaagtagagacaattgtagataccctctgcactaacatgctttctgataaagaacaacttcgagacatttcaagtattggtcttaaaacagtaattggagaacttcctccagcttccagtggctctgcattagctgctaatgtatgtaaaaagattactggacgtcttacaagtgcaatagcaaaacaggaagatgtctctgttcagctagaagccttggatattatggctgatatgttgagcaggcaaggaggacttcttgttaatttccatccttcaattctgacctgtctacttccccagttgaccagccctagacttgcagtgaggaaaagaaccattatcgctcttggccatctggttatgagctgtggaaatatagtttttgtagatcttattgaacatctgttgtcagagttgtccaaaaatgattctatgtcaacaacaagaacctacatacaatgtattgctgctattagtaggcaagctggtcatagaataggtgaataccttgagaagataattcctttggtggtaaaattttgcaatgtagatgatgatgaattaagagagtactgtattcaagcctttgaatcatttgtaagaagatgtcctaaggaagtatatcctcatgtttctaccattataaatatttgtcttaaatatcttacctatgatccaaattataattacgatgatgaagatgaagatgaaaatgcaatggatgctgatggtggtgatgatgatgatcaagggagtgatgatgaatacagtgatgatgatgacatgagttggaaagtgagacgtgcagctgcgaagtgcttggatgctgtagttagcacaaggcatgaaatgcttccagaattctacaagaccgtctctcctgcactaatatccagatttaaagagcgtgaagagaatgtaaaggcagatgtttttcacgcatacctttctcttttgaagcaaactcgtcctgtacaaagttggctatgtgaccctgatgcaatggagcagggagaaacacctttaacaatgcttcagagtcaggttcccaacattgttaaagctcttcacaaacagatgaaagaaaaaagtgtgaagacccgacagtgttgttttaacatgttaactgagctggtaaatgtattacctggggccctaactcaacacattcctgtacttgtaccaggaatcattttctcactgaatgataaatcaagctcatcgaatttgaagatcgatgctttgtcatgtctatacgtaatcctctgtaaccattctcctcaagtcttccatcctcacgttcaggctttggttcctccagtggtggcttgtgttggagacccattttacaaaattacatctgaagcacttcttgttactcaacagcttgtcaaagtaattcgtcctttagatcagccttcctcgtttgatgcaactccttatatcaaagatctatttacctgtaccattaagagattaaaagcagctgacattgatcaggaagtcaaggaaagggctatttcctgtatgggacaaattatttgcaaccttggagacaatttgggttctgacttgcctaatacacttcagattttcttggagagactaaagaatgaaattaccaggttaactacagtaaaggcattgacactgattgctgggtcacctttgaagatagatttgaggcctgttctgggagaaggggttcctatccttgcttcatttcttagaaaaaaccagagagctttgaaactgggtactctttctgcccttgatattctaataaaaaactatagtgacagcttgacagctgccatgattgatgcagttctagatgagctcccacctcttatcagcgaaagtgatatgcatgtttcacaaatggccatcagttttcttaccactttggcaaaagtatatccctcctccctttcaaagataagtggatccattctcaatgaacttattggacttgtgagatcacccttattgcaggggggagctcttagtgccatgctagactttttccaagctctggttgtcactggaacaaataatttaggatacatggatttgttgcgcatgctgactggtccagtttactctcagagcacagctcttactcataagcagtcttattattccattgccaaatgtgtagctgcccttactcgagcatgccctaaagagggaccagctgtagtaggtcagtttattcaagatgtcaagaactcaaggtctacagattccattcgtctcttagctctactttctcttggagaagttgggcatcatattgacttaagtggacagttggaactaaaatctgtaatactagaagctttctcatctcctagtgaagaagtcaaatcagctgcatcctatgcattaggcagcattagtgtgggcaaccttcctgaatatctgccgtttgtcctgcaagaaataactagtcaacccaaaaggcagtatcttttacttcattccttgaaggaaattattagctctgcatcagtggtgggccttaaaccatatgttgaaaacatctgggccttattactaaagcactgtgagtgtgcagaggaaggaaccagaaatgttgttgctgaatgtctaggaaaactcactctaattgatccagaaactctccttccacggcttaaggggtacttgatatcaggctcatcatatgcccgaagctcagtggttacggctgtgaaatttacaatttctgaccatccacaacctattgatccactgttaaagaactgcataggtgatttcctaaaaactttggaagacccagatttgaatgtgagaagagtagccttggtcacatttaattcagcagcacataacaagccatcattaataagggatctattggatactgttcttccacatctttacaatgaaacaaaagttagaaaggagcttataagagaggtagaaatgggtccatttaaacatacggttgatgatggtctggatattagaaaggcagcatttgagtgtatgtacacacttctagacagttgtcttgatagacttgatatctttgaatttctaaatcatgttgaagatggtttgaaggaccattatgatattaagatgctgacatttttaatgttggtgagactgtctaccctttgtccaagtgcagtactgcagaggttggaccgacttgttgagccattacgtgcaacatgtacaactaaggtaaaggcaaactcagtaaagcaggagtttgaaaaacaagatgaattaaagcgatctgccatgagagcagtagcagcactgctaaccattccagaagcagagaagagtccactgatgagtgaattccagtcacagatcagttctaaccctgagctggcggctatctttgaaagtatccagaaagattcatcatctactaacttggaatcaatggacactagttagatgtttgttcaccatggggaccattacatatgaccatacaatgcactgaattgacaggttaatcataagacatggaaagagaagtgtctaaaagcttcaaaatgttccacttttttttccttcatggagactgtttgtttggctttcttccattgttgtttttgtagcatttatttcagaaatgtgtatttccataatccagaggttgtaaaaccactagtgttttagtggttacagcaacatttgaaatggaaactaaaagttaggattttatggagtatggagatagggtccagtatctatttaccctgtaatgtttaggattaaaatgttaaaattttgtgaccatgaatttctttcttttataaattttctcatttaaaaatcaaaaatcttgcaaaacaaaaaccatgtttctttttcttgtataactttttgttttcagcaacataaattgatttttagctggcagacaagaatatccatataagatttgttaaccatttcagagagtttggcaatttttaaaagataataaggtatcatttttaagtatgaaaattaacaatatccctgttgcgcacactaattttgcatgagtaagtttacaaatatgtatcgtctgtaaagcagcatgtgcagattattcataatatagaagttaaaataagtattagtgcaattttcagatatttatttttgcacagaaaacacattatctggagagaaagaaaggagaatttttgagacttgggttttcttaatgccagtgtgaatttgcagatgttttcagaaaatcaagtcacagtaacaatttgccacttttttctattataaatcttcttacttaaattttgaatatttagtttttctcagttacccatttgtgtgtgtgtgattccacttagaaattcttaaaaccagatttttctttcattccgtttggatgtctacattccttatcaaaggatataaatactgtgtatgcttttgaattttatttttaggaaaattctgaagccagctatcacaggtttgttagctaataatagtattttcttttagttgagttaggtttttccccatctcctgtagagcgaatttacatattgtattgggtaagtgttcactacttttcctgattaagggatctgtgctggggaacaaagcttttgcagtaccttatattgtagttaaaattttatttaacatatccttcagtgagctcatttcacactgtagcctcttccttaaaatttgtggtgctcctgtaacagtaagaactaattctgaaataaaagacatctcctaatgctgtgcaaaaaaaaaaaaaaaaaaaaaaaaaaaaaaaannnaaaaaaaaaaaaaaaaaaaaaaa

SEQ ID NO: 343251 - DNA, 6603 bp, Homo sapiens
agcgaaggaggcgggctttggccttttgccctagggagcgagtgcggagcgagtgggagcgagacggccctgagtggaagtgtctggctccccgtagaggcccttctgtacgccccgccgcccatgagctcgttctcacgcgaacagcgccgtcgttaggctggctctgtagcctcggcttaccccgggacaggcccacgcctcgccagggagggggcagcccgtcgaggcgcctccctagtcagcgtcggcgtcgcgctgcgaccctggaagcgggagccgccgcgagcgagaggaggagctccagtggcggcggcggcggcggcagcggcagcgggcagcagctccagcagcgccagcaggcgggatcgaggccgtcaacatggcgagcgcctcgtaccacatttccaatttgctggaaaaaatgacatccagcgacaaggactttaggtttatggctacaaatgatttgatgacggaactgcagaaagattccatcaagttggatgatgatagtgaaaggaaagtagtgaaaatgattttgaagttattggaagataaaaatggagaggtacagaatttagctgtcaaatgtcttggtcctttagtgagtaaagtgaaagaataccaagtagagacaattgtagataccctctgcactaacatgctttctgataaagaacaacttcgagacatttcaagtattggtcttaaaacagtaattggagaacttcctccagcttccagtggctctgcattagctgctaatgtatgtaaaaagattactggacgtcttacaagtgcaatagcaaaacaggaagatgtctctgttcagctagaagccttggatattatggctgatatgttgagcaggcaaggaggacttcttgttaatttccatccttcaattctgacctgtctacttccccagttgaccagccctagacttgcagtgaggaaaagaaccattatcgctcttggccatctggttatgagctgtggaaatatagtttttgtagatcttattgaacatctgttgtcagagttgtccaaaaatgattctatgtcaacaacaagaacctacatacaatgtattgctgctattagtaggcaagctggtcatagaataggtgaataccttgagaagataattcctttggtggtaaaattttgcaatgtagatgatgatgaattaagagagtactgtattcaagcctttgaatcatttgtaagaagatgtcctaaggaagtatatcctcatgtttctaccattataaatatttgtcttaaatatcttacctatgatccaaattataattacgatgatgaagatgaagatgaaaatgcaatggatgctgatggtggtgatgatgatgatcaagggagtgatgatgaatacagtgatgatgatgacatgagttggaaagtgagacgtgcagctgcgaagtgcttggatgctgtagttagcacaaggcatgaaatgcttccagaattctacaagaccgtctctcctgcactaatatccagatttaaagagcgtgaagagaatgtaaaggcagatgtttttcacgcatacctttctcttttgaagcaaactcgtcctgtacaaagttggctatgtgaccctgatgcaatggagcagggagaaacacctttaacaatgcttcagagtcaggttcccaacattgttaaagctcttcacaaacagatgaaagaaaaaagtgtgaagacccgacagtgttgttttaacatgttaactgagctggtaaatgtattacctggggccctaactcaacacattcctgtacttgtaccaggaatcattttctcactgaatgataaatcaagctcatcgaatttgaagatcgatgctttgtcatgtctatacgtaatcctctgtaaccattctcctcaagtcttccatcctcacgttcaggctttggttcctccagtggtggcttgtgttggagacccattttacaaaattacatctgaagcacttcttgttactcaacagcttgtcaaagtaattcgtcctttagatcagccttcctcgtttgatgcaactccttatatcaaagatctatttacctgtaccattaagagattaaaagcagctgacattgatcaggaagtcaaggaaagggctatttcctgtatgggacaaattatttgcaaccttggagacaatttgggttctgacttgcctaatacacttcagattttcttggagagactaaagaatgaaattaccaggttaactacagtaaaggcattgacactgattgctgggtcacctttgaagatagatttgaggcctgttctgggagaaggggttcctatccttgcttcatttcttagaaaaaaccagagagctttgaaactgggtactctttctgcccttgatattctaataaaaaactatagtgacagcttgacagctgccatgattgatgcagttctagatgagctcccacctcttatcagcgaaagtgatatgcatgtttcacaaatggccatcagttttcttaccactttggcaaaagtatatccctcctccctttcaaagataagtggatccattctcaatgaacttattggacttgtgagatcacccttattgcaggggggagctcttagtgccatgctagactttttccaagctctggttgtcactggaacaaataatttaggatacatggatttgttgcgcatgctgactggtccagtttactctcagagcacagctcttactcataagcagtcttattattccattgccaaatgtgtagctgcccttactcgagcatgccctaaagagggaccagctgtagtaggtcagtttattcaagatgtcaagaactcaaggtctacagattccattcgtctcttagctctactttctcttggagaagttgggcatcatattgacttaagtggacagttggaactaaaatctgtaatactagaagctttctcatctcctagtgaagaagtcaaatcagctgcatcctatgcattaggcagcattagtgtgggcaaccttcctgaatatctgccgtttgtcctgcaagaaataactagtcaacccaaaaggcagtatcttttacttcattccttgaaggaaattattagctctgcatcagtggtgggccttaaaccatatgttgaaaacatctgggccttattactaaagcactgtgagtgtgcagaggaaggaaccagaaatgttgttgctgaatgtctaggaaaactcactctaattgatccagaaactctccttccacggcttaaggggtacttgatatcaggctcatcatatgcccgaagctcagtggttacggctgtgaaatttacaatttctgaccatccacaacctattgatccactgttaaagaactgcataggtgatttcctaaaaactttggaagacccagatttgaatgtgagaagagtagccttggtcacatttaattcagcagcacataacaagccatcattaataagggatctattggatactgttcttccacatctttacaatgaaacaaaagttagaaaggagcttataagagaggtagaaatgggtccatttaaacatacggttgatgatggtctggatattagaaaggcagcatttgagatgctgacatttttaatgttggtgagactgtctaccctttgtccaagtgcagtactgcagaggttggaccgacttgttgagccattacgtgcaacatgtacaactaaggtaaaggcaaactcagtaaagcaggagtttgaaaaacaagatgaattaaagcgatctgccatgagagcagtagcagcactgctaaccattccagaagcagagaagagtccactgatgagtgaattccagtcacagatcagttctaaccctgagctggcggctatctttgaaagtatccagaaagattcatcatctactaacttggaatcaatggacactagttagatgtttgttcaccatggggaccattacatatgaccatacaatgcactgaattgacaggttaatcataagacatggaaagagaagtgtctaaaagcttcaaaatgttccacttttttttccttcatggagactgtttgtttggctttcttccattgttgtttttgtagcatttatttcagaaatgtgtatttccataatccagaggttgtaaaaccactagtgttttagtggttacagcaacatttgaaatggaaactaaaagttaggattttatggagtatggagatagggtccagtatctatttaccctgtaatgtttaggattaaaatgttaaaattttgtgaccatgaatttctttcttttataaattttctcatttaaaaatcaaaaatcttgcaaaacaaaaaccatgtttctttttcttgtataactttttgttttcagcaacataaattgatttttagctggcagacaagaatatccatataagatttgttaaccatttcagagagtttggcaatttttaaaagataataaggtatcatttttaagtatgaaaattaacaatatccctgttgcgcacactaattttgcatgagtaagtttacaaatatgtatcgtctgtaaagcagcatgtgcagattattcataatatagaagttaaaataagtattagtgcaattttcagatatttatttttgcacagaaaacacattatctggagagaaagaaaggagaatttttgagacttgggttttcttaatgccagtgtgaatttgcagatgttttcagaaaatcaagtcacagtaacaatttgccacttttttctattataaatcttcttacttaaattttgaatatttagtttttctcagttacccatttgtgtgtgtgtgattccacttagaaattcttaaaaccagatttttctttcattccgtttggatgtctacattccttatcaaaggatataaatactgtgtatgcttttgaattttatttttaggaaaattctgaagccagctatcacaggtttgttagctaataatagtattttcttttagttgagttaggtttttccccatctcctgtagagcgaatttacatattgtattgggtaagtgttcactacttttcctgattaagggatctgtgctggggaacaaagcttttgcagtaccttatattgtagttaaaattttatttaacatatccttcagtgagctcatttcacactgtagcctcttccttaaaatttgtggtgctcctgtaacagtaagaactaattctgaaataaaagacatctcctaatgctgtgcaaacatagtttacatgtattgaaggaggcagttgttaaattgagtgaccaatttaagcaatcagatatttgaaaactgcaccctttagttttgaaactgtgaattagaaacacttttcctgctgtattactacctgctttaacatccaaatatacagtgattttaaatgataacatactgtggttattagattaacagcttgattttgaatgttcagatgataatgcagaagacatcacttctagtaaggattttgactagtgcattgatgttgaagttggtgccatttcaaaatgtggcaggtgataatcttttaccataatttgcataaaactgtaatagaagtttattttgagatgttagtatattatgtactatgcatttctgtggtatagatgttgtggatatatttaagtatttggttacatggttttacaataaattacaatactgcaggctctaggactgaacaggagactgacatgcatatgttgtgtgaatgtcttagttgggtaaagttaaatccaaatacttcaactggctttttcttcagtttgtttgtttttaactttcaagatgcatgttttgttttgttttgctttgtttttgtctcttaagccaattcatttttctaacagttgaaattcttttagtactaaagaaatagatactgctcttttatggctttagtgtttatatacctgtttatatgcatacattaacaaaattagtaacagcagtgcttagaatttcaatgctgtgtcatactgatgattaactccatactcctagtggtgatgtggtccagatactggaatggaagtggcaggatgtggagtccagacatagtctaccactcatgctacttactagtaatattaaggtgttaaacttaggaatttgtcacatgtaggttcctgaggagatctaaaagttaatacaaaaccaagctgtttactgattttcatgagaacatttaagttagtttaggtctacctgatttattttaaaagaaggcagagggctggacgcagtggcttacgcctgtaatcccagcactttgggaggccgaggcgggcggatcacgaggtcaggagatcgagactatcctggctaacactgtgaaaacccatctctactgaaaatacaaaaaattagctgggcgtggtggcagacgcctgtagtcctagctgctacagctgaggcaggagaatggcgtgaacccaggaggcggagctggcagtgagccgagatcacgccactgcactctggcctgggcaacagagcgagagtctgtctcaaaaaaa

SEQ ID NO: 343252 - DNA, 6802 bp, Homo sapiens
agcgaaggaggcgggctttggccttttgccctagggagcgagtgcggagcgagtgggagcgagacggccctgagtggaagtgtctggctccccgtagaggcccttctgtacgccccgccgcccatgagctcgttctcacgcgaacagcgccgtcgttaggctggctctgtagcctcggcttaccccgggacaggcccacgcctcgccagggagggggcagcccgtcgaggcgcctccctagtcagcgtcggcgtcgcgctgcgaccctggaagcgggagccgccgcgagcgagaggaggagctccagtggcggcggcggcggcggcagcggcagcgggcagcagctccagcagcgccagcaggcgggatcgaggccgtcaacatggcgagcgcctcgtaccacatttccaatttgctggaaaaaatgacatccagcgacaaggactttaggtttatggctacaaatgatttgatgacggaactgcagaaagattccatcaagttggatgatgatagtgaaaggaaagtagtgaaaatgattttgaagttattggaagataaaaatggagaggtacagaatttagctgtcaaatgtcttggtcctttagtgagtaaagtgaaagaataccaagtagagacaattgtagataccctctgcactaacatgctttctgataaagaacaacttcgagacatttcaagtattggtcttaaaacagtaattggagaacttcctccagcttccagtggctctgcattagctgctaatgtatgtaaaaagattactggacgtcttacaagtgcaatagcaaaacaggaagatgtctctgttcagctagaagccttggatattatggctgatatgttgagcaggcaaggaggacttcttgttaatttccatccttcaattctgacctgtctacttccccagttgaccagccctagacttgcagtgaggaaaagaaccattatcgctcttggccatctggttatgagctgtggaaatatagtttttgtagatcttattgaacatctgttgtcagagttgtccaaaaatgattctatgtcaacaacaagaacctacatacaatgtattgctgctattagtaggcaagctggtcatagaataggtgaataccttgagaagataattcctttggtggtaaaattttgcaatgtagatgatgatgaattaagagagtactgtattcaagcctttgaatcatttgtaagaagatgtcctaaggaagtatatcctcatgtttctaccattataaatatttgtcttaaatatcttacctatgatccaaattataattacgatgatgaagatgaagatgaaaatgcaatggatgctgatggtggtgatgatgatgatcaagggagtgatgatgaatacagtgatgatgatgacatgagttggaaagtgagacgtgcagctgcgaagtgcttggatgctgtagttagcacaaggcatgaaatgcttccagaattctacaagaccgtctctcctgcactaatatccagatttaaagagcgtgaagagaatgtaaaggcagatgtttttcacgcatacctttctcttttgaagcaaactcgtcctgtacaaagttggctatgtgaccctgatgcaatggagcagggagaaacacctttaacaatgcttcagagtcaggttcccaacattgttaaagctcttcacaaacagatgaaagaaaaaagtgtgaagacccgacagtgttgttttaacatgttaactgagctggtaaatgtattacctggggccctaactcaacacattcctgtacttgtaccaggaatcattttctcactgaatgataaatcaagctcatcgaatttgaagatcgatgctttgtcatgtctatacgtaatcctctgtaaccattctcctcaagtcttccatcctcacgttcaggctttggttcctccagtggtggcttgtgttggagacccattttacaaaattacatctgaagcacttcttgttactcaacagcttgtcaaagctcatcatatgcccgaagctcagtggttacggctgtgaaatttacaatttctgaccatccacaacctattgatccactgttaaagaactgcataggtgatttcctaaaaactttggaagacccagatttgaatgtgagaagagtagccttggtcacatttaattcagcagcacataacaagccatcattaataagggatctattggatactgttcttccacatctttacaatgaaacaaaagttagaaaggagcttataagagaggtagaaatgggtccatttaaacatacggttgatgatggtctggatattagaaaggcagcatttgagtgtatgtacacacttctagacagttgtcttgatagacttgatatctttgaatttctaaatcatgttgaagatggtttgaaggaccattatgatattaaggtaagatgtttgtgcctatttatacaatgttttagaagaagactttgctagagcaactttcacccttgtaatttactcatgtgtctgagaaaaatcaggttgtctgtgaagattttgataagcatattgtaaactataaagtgcaaaagtaataggcagtgtaacaccagttgacgtgtaagaaagatccagagccctttttattggaggaggaagtggcagtggatgcaaaatgctgtgtgcccacttgcttagtgaatagtccctagatcctttccctcaaaaaagtcccgacagattttgctgtttaaagtataaatctgtaactttttggcctgtcttaacattggaccatagttgctacccatggagggttttcttagcattgtcttgattaagtctcctgagctacctttggggctagtctgaattgtaactgtatcatttacctgaatgaggaatttttgtttttcaatataatatactgtgtttaatatcaagaattttgttataggacatggaacttttcagatatacaaaacaatctgtagaagctacttgagagaaatcatactgcgtcttatgtttggataatgaattttgcatataagtgttctttgttttcctgtgtgttcgtctccatttaaaatgtgaacagtaaaagggtgatttgaaaaatgaaaaatatatgcattgtgtctttttcatctactcttccatttagggcttttggccaagcaggacaaaagtggtaactcagcagtaattgagccatactacccgaactcctactcttaggtttccatgtgtggtagtgacctgagcctctcaaagttcaatgaagagggcctccccaccaagaagtaaaaggatgtgcttgtttaattctatgagtttatagtccaagagaaaaaggtttatggggtttatgggttatcaggttttacatggattaatctgaataactggtcaactctgttatgatagtggaaacttattatgaaattgtgttccagttcagtaattttctagttctatgattctcaattctggtgcacatgagctttaaaaaataaaaataaaaaaaataatgtgtgccatattctgacaggttcagtaaaactctctggggatggggcttgaagaatgggtatgtttctaaagctctctggatgattctaatgtgcaaccaagattgaaaaccactttctagtccttatatgctgttgagacaaatctgtctgattctgattgggcagattacattaaaaggaaggtttactttgcatgctagttattttcctttaaaggatttgtcagaatttagtattttgtttttagaaaatgatgtcaaatctaaattctgtcttttttattcctaatagatgctgacatttttaatgttggtgagactgtctaccctttgtccaagtgcagtactgcagaggttggaccgacttgttgagccattacgtgcaacatgtacaactaaggtaaaggcaaactcagtaaagcaggagtttgaaaaacaagatgaattaaagcgatctgccatgagagcagtagcagcactgctaaccattccagaagcagagaagagtccactgatgagtgaattccagtcacagatcagttctaaccctgagctggcggctatctttgaaagtatccagaaagattcatcatctactaacttggaatcaatggacactagttagatgtttgttcaccatggggaccattacatatgaccatacaatgcactgaattgacaggttaatcataagacatggaaagagaagtgtctaaaagcttcaaaatgttccacttttttttccttcatggagactgtttgtttggctttcttccattgttgtttttgtagcatttatttcagaaatgtgtatttccataatccagaggttgtaaaaccactagtgttttagtggttacagcaacatttgaaatggaaactaaaagttaggattttatggagtatggagatagggtccagtatctatttaccctgtaatgtttaggattaaaatgttaaaattttgtgaccatgaatttctttcttttataaattttctcatttaaaaatcaaaaatcttgcaaaacaaaaaccatgtttctttttcttgtataactttttgttttcagcaacataaattgatttttagctggcagacaagaatatccatataagatttgttaaccatttcagagagtttggcaatttttaaaagataataaggtatcatttttaagtatgaaaattaacaatatccctgttgcgcacactaattttgcatgagtaagtttacaaatatgtatcgtctgtaaagcagcatgtgcagattattcataatatagaagttaaaataagtattagtgcaattttcagatatttatttttgcacagaaaacacattatctggagagaaagaaaggagaatttttgagacttgggttttcttaatgccagtgtgaatttgcagatgttttcagaaaatcaagtcacagtaacaatttgccacttttttctattataaatcttcttacttaaattttgaatatttagtttttctcagttacccatttgtgtgtgtgtgattccacttagaaattcttaaaaccagatttttctttcattccgtttggatgtctacattccttatcaaaggatataaatactgtgtatgcttttgaattttatttttaggaaaattctgaagccagctatcacaggtttgttagctaataatagtattttcttttagttgagttaggtttttccccatctcctgtagagcgaatttacatattgtattgggtaagtgttcactacttttcctgattaagggatctgtgctggggaacaaagcttttgcagtaccttatattgtagttaaaattttatttaacatatccttcagtgagctcatttcacactgtagcctcttccttaaaatttgtggtgctcctgtaacagtaagaactaattctgaaataaaagacatctcctaatgctgtgcaaacatagtttacatgtattgaaggaggcagttgttaaattgagtgaccaatttaagcaatcagatatttgaaaactgcaccctttagttttgaaactgtgaattagaaacacttttcctgctgtattactacctgctttaacatccaaatatacagtgattttaaatgataacatactgtggttattagattaacagcttgattttgaatgttcagatgataatgcagaagacatcacttctagtaaggattttgactagtgcattgatgttgaagttggtgccatttcaaaatgtggcaggtgataatcttttaccataatttgcataaaactgtaatagaagtttattttgagatgttagtatattatgtactatgcatttctgtggtatagatgttgtggatatatttaagtatttggttacatggttttacaataaattacaatactgcaggctctaggactgaacaggagactgacatgcatatgttgtgtgaatgtcttagttgggtaaagttaaatccaaatacttcaactggctttttcttcagtttgtttgtttttaactttcaagatgcatgttttgttttgttttgctttgtttttgtctcttaagccaattcatttttctaacagttgaaattcttttagtactaaagaaatagatactgctcttttatggctttagtgtttatatacctgtttatatgcatacattaacaaaattagtaacagcagtgcttagaatttcaatgctgtgtcatactgatgattaactccatactcctagtggtgatgtggtccagatactggaatggaagtggcaggatgtggagtccagacatagtctaccactcatgctacttactagtaatattaaggtgttaaacttaggaatttgtcacatgtaggttcctgaggagatctaaaagttaatacaaaaccaagctgtttactgattttcatgagaacatttaagttagtttaggtctacctgatttattttaaaagaaggcagagggctggacgcagtggcttacgcctgtaatcccagcactttgggaggccgaggcgggcggatcacgaggtcaggagatcgagactatcctggctaacactgtgaaaacccatctctactgaaaatacaaaaaattagctgggcgtggtggcagacgcctgtagtcctagctgctacagctgaggcaggagaatggcgtgaacccaggaggcggagctggcagtgagccgagatcacgccactgcactctggcctgggcaacagagcgagagtctgtctcaaaaaaa

SEQ ID NO: 343253 - DNA, 4426 bp, Homo sapiens
agcgaaggaggcgggctttggccttttgccctagggagcgagtgcggagcgagtgggagcgagacggccctgagtggaagtgtctggctccccgtagaggcccttctgtacgccccgccgcccatgagctcgttctcacgcgaacagcgccgtcgttaggctggctctgtagcctcggcttaccccgggacaggcccacgcctcgccagggagggggcagcccgtcgaggcgcctccctagtcagcgtcggcgtcgcgctgcgaccctggaagcgggagccgccgcgagcgagaggaggagctccagtggcggcggcggcggcggcagcggcagcgggcagcagctccagcagcgccagcaggcgggatcgaggccgtcaacatggcgagcgcctcgtaccacatttccaatttgctggaaaaaatgacatccagcgacaaggactttaggtttatggctacaaatgatttgatgacggaactgcagaaagattccatcaagttggatgatgatagtgaaaggaaagtagtgaaaatgattttgaagttattggaagataaaaatggagaggtacagaatttagctgtcaaatgtcttggtcctttagtgagtaaagtgaaagaataccaagtagagacaattgtagataccctctgcactaacatgctttctgataaagaacaacttcgagacatttcaagtattggtcttaaaacagtaattggagaacttcctccagcttccagtggctctgcattagctgctaatgtatgtaaaaagattactggacgtcttacaagtgcaatagcaaaacaggaagatgtctctgttcagctagaagccttggatattatggctgatatgttgagcaggcaaggaggacttcttgttaatttccatccttcaattctgacctgtctacttccccagttgaccagccctagacttgcagtgaggaaaagaaccattatcgctcttggccatctggttatgagctgtggaaatatagtttttgtagatcttattgaacatctgttgtcagagttgtccaaaaatgattctatgtcaacaacaagaacctacatacaatgtattgctgctattagtaggcaagctggtcatagaataggtgaataccttgagaagataattcctttggtggtaaaattttgcaatgtagatgatgatgaattaagagagtactgtattcaagcctttgaatcatttgtaagaagatgtcctaaggaagtatatcctcatgtttctaccattataaatatttgtcttaaatatcttacctatgatccaaattataattacgatgatgaagatgaagatgaaaatgcaatggatgctgatggtggtgatgatgatgatcaagggagtgatgatgaatacagtgatgatgatgacatgagttggaaagtgagacgtgcagctgcgaagtgcttggatgctgtagttagcacaaggcatgaaatgcttccagaattctacaagaccgtctctcctgcactaatatccagatttaaagagcgtgaagagaatgtaaaggcagatgtttttcacgcatacctttctcttttgaagcaaactcgtcctgtacaaagttggctatgtgaccctgatgcaatggagcagggagaaacacctttaacaatgcttcagagtcaggttcccaacattgttaaagctcttcacaaacagatgaaagaaaaaagtgtgaagacccgacagtgttgttttaacatgttaactgagctggtaaatgtattacctggggccctaactcaacacattcctgtacttgtaccaggaatcattttctcactgaatgataaatcaagctcatcgaatttgaagatcgatgctttgtcatgtctatacgtaatcctctgtaaccattctcctcaagtcttccatcctcacgttcaggctttggttcctccagtggtggcttgtgttggagacccattttacaaaattacatctgaagcacttcttgttactcaacagcttgtcaaagtaattcgtcctttagatcagccttcctcgtttgatgcaactccttatatcaaagatctatttacctgtaccattaagagattaaaagcagctgacattgatcaggaagtcaaggaaagggctatttcctgtatgggacaaattatttgcaaccttggagacaatttgggttctgacttgcctaatacacttcagattttcttggagagactaaagaatgaaattaccaggttaactacagtaaaggcattgacactgattgctgggtcacctttgaagatagatttgaggcctgttctgggagaaggggttcctatccttgcttcatttcttagaaaaaaccagagagctttgaaactgggtactctttctgcccttgatattctaataaaaaactatagtgacagcttgacagctgccatgattgatgcagttctagatgagctcccacctcttatcagcgaaagtgatatgcatgtttcacaaatggccatcagttttcttaccactttggcaaaagtatatccctcctccctttcaaagataagtggatccattctcaatgaacttattggacttgtgagatcacccttattgcaggggggagctcttagtgccatgctagactttttccaagctctggttgtcactggaacaaataatttaggatacatggatttgttgcgcatgctgactggtccagtttactctcagagcacagctcttactcataagcagtcttattattccattgccaaatgtgtagctgcccttactcgagcatgccctaaagagggaccagctgtagtaggtcagtttattcaagatgtcaagaactcaaggtctacagattccattcgtctcttagctctactttctcttggagaagttgggcatcatattgacttaagtggacagttggaactaaaatctgtaatactagaagctttctcatctcctagtgaagaagtcaaatcagctgcatcctatgcattaggcagcattagtgtgggcaaccttcctgaatatctgccgtttgtcctgcaagaaataactagtcaacccaaaaggcagtatcttttacttcattccttgaaggaaattattagctctgcatcagtggtgggccttaaaccatatgttgaaaacatctgggccttattactaaagcactgtgagtgtgcagaggaaggaaccagaaatgttgttgctgaatgtctaggaaaactcactctaattgatccagaaactctccttccacggcttaaggggtacttgatatcaggctcatcatatgcccgaagctcagtggttacggctgtgaaatttacaatttctgaccatccacaacctattgatccactgttaaagaactgcataggtgatttcctaaaaactttggaagacccagatttgaatgtgagaagagtagccttggtcacatttaattcagcagcacataacaagccatcattaataagggatctattggatactgttcttccacatctttacaatgaaacaaaagttagaaaggagcttataagagaggtagaaatgggtccatttaaacatacggttgatgatggtctggatattagaaaggcagcatttgagtgtatgtacacacttctagacagttgtcttgatagacttgatatctttgaatttctaaatcatgttgaagatggtttgaaggaccattatgatattaagatgctgacatttttaatgttggtgagactgtctaccctttgtccaagtgcagtactgcagaggttggaccgacttgttgagccattacgtgcaacatgtacaactaaggtaaaggcaaactcagtaaagcaggagtttgaaaaacaagatgaattaaagcgatctgccatgagagcagtagcagcactgctaaccattccagaagcagagaagagtccactgatgagtgaattccagtcacagatcagttctaaccctgagctggcggctatctttgaaagtatccagaaagattcatcatctactaacttggaatcaatggacactagttagatgtttgttcaccatggggaccattacatatgaccatacaatgcactgaattgacaggttaatcataagacatggaaagagaagtgtctaaaagcttcaaaatgttccacttttttttccttcatggagactgtttgtttggctttcttccattgttgtttttgtagcatttatttcagaaatgtgtatttccataatccagaggttgtaaaaccactagtgttttagtggttctagtcacctttgcaatgctaactctactgactgtcctagaaatccgtgtcgccttaatccaagcctacgttttcacacttctagtaagcctctacctgcacgacaacacataaaaaa

SEQ ID NO: 343254 - DNA, 3122 bp, Homo sapiens
tagatacacacaaccagacacgaatcccactaacctacggctaggtacgaggcccgggtcgagtgtatgtacacacttctagacagttgtcttgatagacttgatatctttgaatttctaaatcatgttgaagatggtttgaaggaccattatgatattaagatgctgacatttttaatgttggtgagactgtctaccctttgtccaagtgcagtactgcagaggttggaccgacttgttgagccattacgtgcaacatgtacaactaaggtaaaggcaaactcagtaaagcaggagtttgaaaaacaagatgaattaaagcgatctgccatgagagcagtagcagcactgctaaccattccagaagcagagaagagtccactgatgagtgaattccagtcacagatcagttctaaccctgagctggcggctatctttgaaagtatccagaaagattcatcatctactaacttggaatcaatggacactagttagatgtttgttcaccatggggaccattacatatgaccatacaatgcactgaattgacaggttaatcataagacatggaaagagaagtgtctaaaagcttcaaaatgttccacttttttttccttcatggagactgtttgtttggctttcttccattgttgtttttgtagcatttatttcagaaatgtgtatttccataatccagaggttgtaaaaccactagtgttttagtggttacagcaacatttgaaatggaaactaaaagttaggattttatggagtatggagatagggtccagtatctatttaccctgtaatgtttaggattaaaatgttaaaattttgtgaccatgaatttctttcttttataaattttctcatttaaaaatcaaaaatcttgcaaaacaaaaaccatgtttctttttcttgtataactttttgttttcagcaacataaattgatttttagctggcagacaagaatatccatataagatttgttaaccatttcagagagtttggcaatttttaaaagataataaggtatcatttttaagtatgaaaattaacaatatccctgttgcgcacactaattttgcatgagtaagtttacaaatatgtatcgtctgtaaagcagcatgtgcagattattcataatatagaagttaaaataagtattagtgcaattttcagatatttatttttgcacagaaaacacattatctggagagaaagaaaggagaatttttgagacttgggttttcttaatgccagtgtgaatttgcagatgttttcagaaaatcaagtcacagtaacaatttgccacttttttctattataaatcttcttacttaaattttgaatatttagtttttctcagttacccatttgtgtgtgtgtgattccacttagaaattcttaaaaccagatttttctttcattccgtttggatgtctacattccttatcaaaggatataaatactgtgtatgcttttgaattttatttttaggaaaattctgaagccagctatcacaggtttgttagctaataatagtattttcttttagttgagttaggtttttccccatctcctgtagagcgaatttacatattgtattgggtaagtgttcactacttttcctgattaagggatctgtgctggggaacaaagcttttgcagtaccttatattgtagttaaaattttatttaacatatccttcagtgagctcatttcacactgtagcctcttccttaaaatttgtggtgctcctgtaacagtaagaactaattctgaaataaaagacatctcctaatgctgtgcaaacatagtttacatgtattgaaggaggcagttgttaaattgagtgaccaatttaagcaatcagatatttgaaaactgcaccctttagttttgaaactgtgaattagaaacacttttcctgctgtattactacctgctttaacatccaaatatacagtgattttaaatgataacatactgtggttattagattaacagcttgattttgaatgttcagatgataatgcagaagacatcacttctagtaaggattttgactagtgcattgatgttgaagttggtgccatttcaaaatgtggcaggtgataatcttttaccataatttgcataaaactgtaatagaagtttattttgagatgttagtatattatgtactatgcatttctgtggtatagatgttgtggatatatttaagtatttggttacatggttttacaataaattacaatactgcaggctctaggactgaacaggagactgacatgcatatgttgtgtgaatgtcttagttgggtaaagttaaatccaaatacttcaactggctttttcttcagtttgtttgtttttaactttcaagatgcatgttttgttttgttttgctttgtttttgtctcttaagccaattcatttttctaacagttgaaattcttttagtactaaagaaatagatactgctcttttatggctttagtgtttatatacctgtttatatgcatacattaacaaaattagtaacagcagtgcttagaatttcaatgctgtgtcatactgatgattaactccatactcctagtggtgatgtggtccagatactggaatggaagtggcaggatgtggagtccagacatagtctaccactcatgctacttactagtaatattaaggtgttaaacttaggaatttgtcacatgtaggttcctgaggagatctaaaagttaatacaaaaccaagctgtttactgattttcatgagaacatttaagttagtttaggtctacctgatttattttaaaagaaggcagagggctggacgcagtggcttacgcctgtaatcccagcactttgggaggccgaggcgggcggatcacgaggtcaggagatcgagactatcctggctaacactgtgaaaacccatctctactgaaaatacaaaaaattagctgggcgtggtggcagacgcctgtagtcctagctgctacagctgaggcaggagaatggcgtgaacccaggaggcggagctggcagtgagccgagatcacgccactgcactctggcctgggcaacagagcgagagtctgtctcaaaaaaa

SEQ ID NO: 343255 - DNA, 2477 bp, Homo sapiens
agcgaaggaggcgggctttggccttttgccctagggagcgagtgcggagcgagtgggagcgagacggccctgagtggaagtgtctggctccccgtagaggcccttctgtacgccccgccgcccatgagctcgttctcacgcgaacagcgccgtcgttaggctggctctgtagcctcggcttaccccgggacaggcccacgcctcgccagggagggggcagcccgtcgaggcgcctccctagtcagcgtcggcgtcgcgctgcgaccctggaagcgggagccgccgcgagcgagaggaggagctccagtggcggcggcggcggcggcagcggcagcgggcagcagctccagcagcgccagcaggcgggatcgaggccgtcaacatggcgagcgcctcgtaccacatttccaatttgctggaaaaaatgacatccagcgacaaggactttaggtttatggctacaaatgatttgatgacggaactgcagaaagattccatcaagttggatgatgatagtgaaaggaaagtagtgaaaatgattttgaagttattggaagataaaaatggagaggtacagaatttagctgtcaaatgtcttggtcctttagtgagtaaagtgaaagaataccaagtagagacaattgtagataccctctgcactaacatgctttctgataaagaacaacttcgagacatttcaagtattggtcttaaaacagtaattggagaacttcctccagcttccagtggctctgcattagctgctaatgtatgtaaaaagattactggacgtcttacaagtgcaatagcaaaacaggaagatgtctctgttcagctagaagccttggatattatggctgatatgttgagcaggcaaggaggacttcttgttaatttccatccttcaattctgacctgtctacttccccagttgaccagccctagacttgcagtgaggaaaagaaccattatcgctcttggccatctggttatgagctgtggaaatatagtttttgtagatcttattgaacatctgttgtcagagttgtccaaaaatgattctatgtcaacaacaagaacctacatacaatgtattgctgctattagtaggcaagctggtcatagaataggtgaataccttgagaagataattcctttggtggtaaaattttgcaatgtagatgatgatgaattaagagagtactgtattcaagcctttgaatcatttgtaagaagatgtcctaaggaagtatatcctcatgtttctaccattataaatatttgtcttaaatatcttacctatgatccaaattataattacgatgatgaagatgaagatgaaaatgcaatggatgctgatggtggtgatgatgatgatcaagggagtgatgatgaatacagtgatgatgatgacatgagttggaaagtgagacgtgcagctgcgaagtgcttggatgctgtagttagcacaaggcatgaaatgcttccagaattctacaagaccgtctctcctgcactaatatccagatttaaagagcgtgaagagaatgtaaaggcagatgtttttcacgcatacctttctcttttgaagcaaactcgtcctgtacaaagttggctatgtgaccctgatgcaatggagcagggagaaacacctttaacaatgcttcagagtcaggttcccaacattgttaaagctcttcacaaacagatgaaagaaaaaagtgtgaagacccgacagtgttgttttaacatgttaactgagctggtaaatgtattacctggggccctaactcaacacattcctgtacttgtaccaggaatcattttctcactgaatgataaatcaagctcatcgaatttgaagatcgatgctttgtcatgtctatacgtaatcctctgtaaccattctcctcaagtcttccatcctcacgttcaggctttggttcctccagtggtggcttgtgttggagacccattttacaaaattacatctgaagcacttcttgttactcaacagcttgtcaaagtaattcgtcctttagatcagccttcctcgtttgatgcaactccttatatcaaagatctatttacctgtaccattaagagattaaaagcagctgacattgatcaggaagtcaaggaaagggctatttcctgtatgggacaaattatttgcaaccttggagacaatttgggttctgacttgcctaatacacttcagattttcttggagagactaaagaatgaaattaccaggttaactacagtaaaggcattgacactgattgctgggtcacctttgaagatagatttgaggcctgttctgggagaaggggttcctatccttgcttcatttcttagaaaaaaccagagagctttgaaaccagaacagtgctgcatttacttgccttgcatattctgacagacctgaatagtggccacttccgcctcccggttaatgggatccttcataaatt

SEQ ID NO: 343256 - DNA, 2078 bp, Homo sapiens
agcgaaggaggcgggctttggccttttgccctagggagcgagtgcggagcgagtgggagcgagacggccctgagtggaagtgtctggctccccgtagaggcccttctgtacgccccgccgcccatgagctcgttctcacgcgaacagcgccgtcgttaggctggctctgtagcctcggcttaccccgggacaggcccacgcctcgccagggagggggcagcccgtcgaggcgcctccctagtcagcgtcggcgtcgcgctgcgaccctggaagcgggagccgccgcgagcgagaggaggagctccagtggcggcggcggcggcggcagcggcagcgggcagcagctccagcagcgccagcaggcgggatcgaggccgtcaacatggcgagcgcctcgtaccacatttccaatttgctggaaaaaatgacatccagcgacaaggactttaggtttatggctacaaatgatttgatgacggaactgcagaaagattccatcaagttggatgatgatagtgaaaggaaagtagtgaaaatgattttgaagttattggaagataaaaatggagaggtacagaatttagctgtcaaatgtcttggtcctttagtgagtaaagtgaaagaataccaagtagagacaattgtagataccctctgcactaacatgctttctgataaagaacaacttcgagacatttcaagtattggtcttaaaacagtaattggagaacttcctccagcttccagtggtaagcaagagcacatttttcttcctatttctttttgtgtggaggtatttctccccacccttttttccccttctggccaaggagggagggaggtggctgtccttacagatgttcataggaatccctttggacaattaagaaaattaaagcgtgaagccttattttccttagaaataaatgttaaatgaatattttgattgaacttgtatgtaatatgaatttcagtgaaggatttttatatgttggagcaagattttatactgtgtgtaccatgactgcagactagagttatgccaacctatgcagtgagggaagagataaccaaaatattgcatcctgattagttcactgtttccagtattaattttactttgcgtcagtatttgctatgtaaaatgtaacaccattcagacatagctgtggaatagttcagtttactagtagctttaattaaagctgagccttttacagctacttggtaattaaacaaatttaaaactatgattaatgtatttgttaactaattagcttttggcctttgatagaaatgtgtaggtaatataaattttagaattggtcttgactactaaactattgctaaaattattaggctaaaagtttttgtctcatctgcaaaaggtgagattatcacctatttcatgggaagatttagattggtaataatgtagtctgggggccgggcgaggtggctcacgcctataatcccagcactttgggaggccaaggcaggtggatcacctgaggtcgggagttcaagaccagcctgaccaacatggagaaaccccatctctactaaaaatacaaaattagccgggcgtggtggtgcatgcctgtaatcccagctacttgggaggctgaggcaggagaatcactttaactcaggaggcggaggttgtggtgagccgagatggtgccattgcattccagcctagggaacaagagtgaaactccgtgtcaaaaaaaaataaaaaaacaaaaaaataaataatgtagcctgggtatgttatttccactcatgtacttgaatcattcactgtgctagttttcatgctaaaggctgcatacgtaaactagtctaaacatcaatcatatgggaggtcttactgttccttctagtttgtagatgggagaactgaaattcagagagattaggttaattcacccaaagttgggtgagtaattgggtaaagattcaaatccattttcttttaatccaaaaaggatgctttcttcaatgtatcataccagtgttattttacctttattaaatagttacttatttcaataaaacatttcaccaactcagaa

SEQ ID NO: 343257 - DNA, 1446 bp, Homo sapiens
agcgaaggaggcgggctttggccttttgccctagggagcgagtgcggagcgagtgggagcgagacggccctgagtggaagtgtctggctccccgtagaggcccttctgtacgccccgccgcccatgagctcgttctcacgcgaacagcgccgtcgttaggctggctctgtagcctcggcttaccccgggacaggcccacgcctcgccagggagggggcagcccgtcgaggcgcctccctagtcagcgtcggcgtcgcgctgcgaccctggaagcgggagccgccgcgagcgagaggaggagctccagtggcggcggcggcggcggcagcggcagcgggcagcagctccagcagcgccagcaggcgggatcgaggccgtcaacatggcgagcgcctcgtaccacatttccaatttgctggaaaaaatgacatccagcgacaaggactttaggtgaggccgagatccgaccctcaccccacctcggggttctcgcagccgcggccctggccgtcacgcaggccttgccccaccccttcggctgtagccggtagcttctctgccccgaagtctccatgcccaccggtccgctggcctcccgatccctgcggagcccctgttcctctcccctctttgcaaccgcaaccccctccccccattctttctcctaggcagttgcccgccgcggtctctaggccccgtttgcttgtctcagcgcccccacatccttccctgccccaccaggaggcgattcttgcgtctcaggtagcgcgaaggggctaaaccacccaccattgtggagaagggagttgctctaggccgggagaccgggcgccgggcctattcgcttgccatcctgcggcgctaggccgccgtgctcgctggggcccaagctgctgcccactcggggacccggcagcctcctctctgcccgcaggtgcgcgtgggccttgctgcattcaggtggaatgatgaacttttgcgctcttggctgatacatagttcttttgtggattattaattttcgtgaaggtgggaagaagggggaggggagccaggatggaggaaacttcgctcatagggttttcccgccagcatcactgtcagttcctcttgtcaggtaaaaccaacttaggaactcggggtttcagtctcatgtcctcatatccaaaatcactgccaaaggggtggattgctggatcttaatcatagcagacggatcttcaaaaggaagagatgtttaatacggacctggtgaatatgaagctttattacagcagttctgttcaggagatcggtactgttggttccaaagtgttgtaatatgcatagtgaagatttgttatatttttacaggttatctttgtttttatttttccttgcacgcttcggtgattgttgcattctttcccgcctcccatctcttcacaaataagttctcaatctaaa

SEQ ID NO: 343258 - DNA, 1191 bp, Homo sapiens
agcgaaggaggcgggctttggccttttgccctagggagcgagtgcggagcgagtgggagcgagacggccctgagtggaagtgtctggctccccgtagaggcccttctgtacgccccgccgcccatgagctcgttctcacgcgaacagcgccgtcgttaggctggctctgtagcctcggcttaccccgggacaggcccacgcctcgccagggagggggcagcccgtcgaggcgcctccctagtcagcgtcggcgtcgcgctgcgaccctggaagcgggagccgccgcgagcgagaggaggagctccagtggcggcggcggcggcggcagcggcagcgggcagcagctccagcagcgccagcaggcgggatcgaggccgtcaacatggcgagcgcctcgtaccacatttccaatttgctggaaaaaatgacatccagcgacaaggactttaggtttatggctcaacaatgcatttgcatgcacggacactgcagcaaagcattccatcaagttggcatgcatgcatccgtgcacaaggcacaagtcagtgcacacacatgcatctcttgcacagttccattgcgcacagcatcaacacacatgcgcagcaggtaccagcacatttcaagcatagtcaacacatagtccttgcgtcccctttcgaatgcagttccacaggtgcaccacgcacatcacccacagctcacccagcacaacatatagttgacgcaagtcagccccataccatcggccctgccttcaacagcgactggggccgtttctcgacctcgtcacttcaccacgccacagccgaaaaactctcattcggccacgaaaacgagtttttaccaacaagcttgactctgaggggtagcatttcagacactaagcaagggaccacactttcggggcaagccacaactttacccatacacaaggacagctattcagcacagcgatggcggcccattcagtcggaccaccatctcaacgaccgtttggcccatcacacctggcatcaaatggcttacaccactatacggcactttcaccgcttgagacacccggattcccttacacaacccagcagggtcggccacaaatatcagccctgaaacaaccaaatggcggtaaacgcacttggctccgttccctaggctaccccaaggccttcagtaacaacccccatttgg

SEQ ID NO: 343259 - DNA, 670 bp, Homo sapiens
gaagataattcctttggtggtaaaattttgcaatgtagatgatgatgaattaagagagtactgtattcaagcctttgaatcatttgtaagaaggtaagtttttaagatctctattttttacaaaaagtttttccttaagagtagaatcataaggtctacattaggtgtgtgaggagaagcggccttttggatttcagatataacagacaatacagtatttgaaactaatgtcatcttgctattataaaatgtggtcatcacatttattttgaaaattttccttgtcattgttaggactttatttaaagaattttggaaaggtatttataattattttgggtttactttagaagggaagaaatgccagtgtaataatgtagtctgtactgaaagcccagcaggataaattattcgtcagaaataagtagtgaattgccttttcaacaatttcttaggtcacatccattttgctaggtcagtgattctcaatttggaaactgattctaatatattttttaaaagcttagtaaaagttgtgtatttgtgtactagaaggcaatacaagataagtaacattatttttcctcttgactaatgcagtagcatggtgtcttgagaccttactggttgttttctgcatttatcccttgacactcctggttttgagaag

SEQ ID NO: 343260 - DNA, 4427 bp, Homo sapiens
agcgaaggaggcgggctttggccttttgccctagggagcgagtgcggagcgagtgggagcgagacggccctgagtggaagtgtctggctccccgtagaggcccttctgtacgccccgccgcccatgagctcgttctcacgcgaacagcgccgtcgttaggctggctctgtagcctcggcttaccccgggacaggcccacgcctcgccagggagggggcagcccgtcgaggcgcctccctagtcagcgtcggcgtcgcgctgcgaccctggaagcgggagccgccgcgagcgagaggaggagctccagtggcggcggcggcggcggcagcggcagcgggcagcagctccagcagcgccagcaggcgggatcgaggccgtcaacatggcgagcgcctcgtaccacatttccaatttgctggaaaaaatgacatccagcgacaaggactttaggtttatggctacaaatgatttgatgacggaactgcagaaagattccatcaagttggatgatgatagtgaaaggaaagtagtgaaaatgattttgaagttattggaagataaaaatggagaggtacagaatttagctgtcaaatgtcttggtcctttagtgagtaaagtgaaagaataccaagtagagacaattgtagataccctctgcactaacatgctttctgataaagaacaacttcgagacatttcaagtattggtcttaaaacagtaattggagaacttcctccagcttccagtggctctgcattagctgctaatgtatgtaaaaagattactggacgtcttacaagtgcaatagcaaaacaggaagatgtctctgttcagctagaagccttggatattatggctgatatgttgagcaggcaaggaggacttcttgttaatttccatccttcaattctgacctgtctacttccccagttgaccagccctagacttgcagtgaggaaaagaaccattatcgctcttggccatctggttatgagctgtggaaatatagtttttgtagatcttattgaacatctgttgtcagagttgtccaaaaatgattctatgtcaacaacaagaacctacatacaatgtattgctgctattagtaggcaagctggtcatagaataggtgaataccttgagaagataattcctttggtggtaaaattttgcaatgtagatgatgatgaattaagagagtactgtattcaagcctttgaatcatttgtaagaagatgtcctaaggaagtatatcctcatgtttctaccattataaatatttgtcttaaatatcttacctatgatccaaattataattacgatgatgaagatgaagatgaaaatgcaatggatgctgatggtggtgatgatgatgatcaagggagtgatgatgaatacagtgatgatgatgacatgagttggaaagtgagacgtgcagctgcgaagtgcttggatgctgtagttagcacaaggcatgaaatgcttccagaattctacaagaccgtctctcctgcactaatatccagatttaaagagcgtgaagagaatgtaaaggcagatgtttttcacgcatacctttctcttttgaagcaaactcgtcctgtacaaagttggctatgtgaccctgatgcaatggagcagggagaaacacctttaacaatgcttcagagtcaggttcccaacattgttaaagctcttcacaaacagatgaaagaaaaaagtgtgaagacccgacagtgttgttttaacatgttaactgagctggtaaatgtattacctggggccctaactcaacacattcctgtacttgtaccaggaatcattttctcactgaatgataaatcaagctcatcgaatttgaagatcgatgctttgtcatgtctatacgtaatcctctgtaaccattctcctcaagtcttccatcctcacgttcaggctttggttcctccagtggtggcttgtgttggagacccattttacaaaattacatctgaagcacttcttgttactcaacagcttgtcaaagtaattcgtcctttagatcagccttcctcgtttgatgcaactccttatatcaaagatctatttacctgtaccattaagagattaaaagcagctgacattgatcaggaagtcaaggaaagggctatttcctgtatgggacaaattatttgcaaccttggagacaatttgggttctgacttgcctaatacacttcagattttcttggagagactaaagaatgaaattaccaggttaactacagtaaaggcattgacactgattgctgggtcacctttgaagatagatttgaggcctgttctgggagaaggggttcctatccttgcttcatttcttagaaaaaaccagagagctttgaaactgggtactctttctgcccttgatattctaataaaaaactatagtgacagcttgacagctgccatgattgatgcagttctagatgagctcccacctcttatcagcgaaagtgatatgcatgtttcacaaatggccatcagttttcttaccactttggcaaaagtatatccctcctccctttcaaagataagtggatccattctcaatgaacttattggacttgtgagatcacccttattgcaggggggagctcttagtgccatgctagactttttccaagctctggttgtcactggaacaaataatttaggatacatggatttgttgcgcatgctgactggtccagtttactctcagagcacagctcttactcataagcagtcttattattccattgccaaatgtgtagctgcccttactcgagcatgccctaaagagggaccagctgtagtaggtcagtttattcaagatgtcaagaactcaaggtctacagattccattcgtctcttagctctactttctcttggagaagttgggcatcatattgacttaagtggacagttggaactaaaatctgtaatactagaagctttctcatctcctagtgaagaagtcaaatcagctgcatcctatgcattaggcagcattagtgtgggcaaccttcctgaatatctgccgtttgtcctgcaagaaataactagtcaacccaaaaggcagtatcttttacttcattccttgaaggaaattattagctctgcatcagtggtgggccttaaaccatatgttgaaaacatctgggccttattactaaagcactgtgagtgtgcagaggaaggaaccagaaatgttgttgctgaatgtctaggaaaactcactctaattgatccagaaactctccttccacggcttaaggggtacttgatatcaggctcatcatatgcccgaagctcagtggttacggctgtgaaatttacaatttctgaccatccacaacctattgatccactgttaaagaactgcataggtgatttcctaaaaactttggaagacccagatttgaatgtgagaagagtagccttggtcacatttaattcagcagcacataacaagccatcattaataagggatctattggatactgttcttccacatctttacaatgaaacaaaagttagaaaggagcttataagagaggtagaaatgggtccatttaaacatacggttgatgatggtctggatattagaaaggcagcatttgagtgtatgtacacacttctagacagttgtcttgatagacttgatatctttgaatttctaaatcatgttgaagatggtttgaaggaccattatgatattaagatgctgacatttttaatgttggtgagactgtctaccctttgtccaagtgcagtactgcagaggttggaccgacttgttgagccattacgtgcaacatgtacaactaaggtaaaggcaaactcagtaaagcaggagtttgaaaaacaagatgaattaaagcgatctgccatgagagcagtagcagcactgctaaccattccagaagcagagaagagtccactgatgagtgaattccagtcacagatcagttctaaccctgagctggcggctatctttgaaagtatccagaaagattcatcatctactaacttggaatcaatggacactagttagatgtttgttcaccatggggaccattacatatgaccatacaatgcactgaattgacaggttaatcataagacatggaaagagaagtgtctaaaagcttcaaaatgttccacttttttttccttcatggagactgtttgtttggctttcttccattgttgtttttgtagcatttatttcagaaatgtgtatttccataatccagaggttgtaaaaccactagtgttttagtggttacagcaacatttgaaatggaaactaaaagttaggattttatggagtatggagatagggtccagtatctatttaccctgtaatgtttaggattaaaatgttaaaattttgtgaccatgaa

SEQ ID NO: 343261 - DNA, 3469 bp, Homo sapiens
ccccagtcggttctaccattataaatatttgtcttaaatatcttacctatgatccaaattataattacgatgatgaagatgaagatgaaaatgcaatgggattctatgtcaacaacaagaacctacatacaatgtattgctgctattagtaggcaagctggtcatagaataggtgaataccttgagaagataattcctttggtggtaaaattttgcaatgtagatgatgatgaattaagagagtactgtattcaagcctttgaatcatttgtaagaagatgtcctaaggaagtatatcctcatgtttctaccattataaatatttgtcttaaatatcttacctatgatccaaattataattacgatgatgaagatgaagatgaaaatgcaatggatgctgatggtggtgatgatgatgatcaagggagtgatgatgaatacagtgatgatgatgacatgagttggaaagtgagacgtgcagctgcgaagtgcttggatgctgtagttagcacaaggcatgaaatgcttccagaattctacaagaccgtctctcctgcactaatatccagatttaaagagcgtgaagagaatgtaaaggcagatgtttttcacgcatacctttctcttttgaagcaaactcgtcctgtacaaagttggctatgtgaccctgatgcaatggagcagggagaaacacctttaacaatgcttcagagtcaggttcccaacattgttaaagctcttcacaaacagatgaaagaaaaaagtgtgaagacccgacagtgttgttttaacatgttaactgagctggtaaatgtattacctggggccctaactcaacacattcctgtacttgtaccaggaatcattttctcactgaatgataaatcaagctcatcgaatttgaagatcgatgctttgtcatgtctatacgtaatcctctgtaaccattctcctcaagtcttccatcctcacgttcaggctttggttcctccagtggtggcttgtgttggagacccattttacaaaattacatctgaagcacttcttgttactcaacagcttgtcaaagtaattcgtcctttagatcagccttcctcgtttgatgcaactccttatatcaaagatctatttacctgtaccattaagagattaaaagcagctgacattgatcaggaagtcaaggaaagggctatttcctgtatgggacaaattatttgcaaccttggagacaatttgggttctgacttgcctaatacacttcagattttcttggagagactaaagaatgaaattaccaggttaactacagtaaaggcattgacactgattgctgggtcacctttgaagatagatttgaggcctgttctgggagaaggggttcctatccttgcttcatttcttagaaaaaaccagagagctttgaaactgggtactctttctgcccttgatattctaataaaaaactatagtgacagcttgacagctgccatgattgatgcagttctagatgagctcccacctcttatcagcgaaagtgatatgcatgtttcacaaatggccatcagttttcttaccactttggcaaaagtatatccctcctccctttcaaagataagtggatccattctcaatgaacttattggacttgtgagatcacccttattgcaggggggagctcttagtgccatgctagactttttccaagctctggttgtcactggaacaaataatttaggatacatggatttgttgcgcatgctgactggtccagtttactctcagagcacagctcttactcataagcagtcttattattccattgccaaatgtgtagctgcccttactcgagcatgccctaaagagggaccagctgtagtaggtcagtttattcaagatgtcaagaactcaaggtctacagattccattcgtctcttagctctactttctcttggagaagttgggcatcatattgacttaagtggacagttggaactaaaatctgtaatactagaagctttctcatctcctagtgaagaagtcaaatcagctgcatcctatgcattaggcagcattagtgtgggcaaccttcctgaatatctgccgtttgtcctgcaagaaataactagtcaacccaaaaggcagtatcttttacttcattccttgaaggaaattattagctctgcatcagtggtgggccttaaaccatatgttgaaaacatctgggccttattactaaagcactgtgagtgtgcagaggaaggaaccagaaatgttgttgctgaatgtctaggaaaactcactctaattgatccagaaactctccttccacggcttaaggggtacttgatatcaggctcatcatatgcccgaagctcagtggttacggctgtgaaatttacaatttctgaccatccacaacctattgatccactgttaaagaactgcataggtgatttcctaaaaactttggaagacccagatttgaatgtgagaagagtagccttggtcacatttaattcagcagcacataacaagccatcattaataagggatctattggatactgttcttccacatctttacaatgaaacaaaagttagaaaggagcttataagagaggtagaaatgggtccatttaaacatacggttgatgatggtctggatattagaaaggcagcatttgagtgtatgtacacacttctagacagttgtcttgatagacttgatatctttgaatttctaaatcatgttgaagatggtttgaaggaccattatgatattaagatgctgacatttttaatgttggtgagactgtctaccctttgtccaagtgcagtactgcagaggttggaccgacttgttgagccattacgtgcaacatgtacaactaaggtaaaggcaaactcagtaaagcaggagtttgaaaaacaagatgaattaaagcgatctgccatgagagcagtagcagcactgctaaccattccagaagcagagaagagtccactgatgagtgaattccagtcacagatcagttctaaccctgagctggcggctatctttgaaagtatccagaaagattcatcatctactaacttggaatcaatggacactagttagatgtttgttcaccatggggaccattacatatgaccatacaatgcactgaattgacaggttaatcataagacatggaaagagaagtgtctaaaagcttcaaaatgttccacttttttttccttcatggagactgtttgtttggctttcttccattgttgtttttgtagcatttatttcagaaatgtgtatttccataatccagaggttgtaaaaccactagtgttttagtggttacagcaacatttgaaatggaaactaaaagttaggattttatggagtatggagatagggtccagtatctatttaccctgtaatgtttaggattaaaatgttaaaattttgtgaccatgaa

SEQ ID NO: 343262 - DNA, 5905 bp, Homo sapiens
agcgaaggaggcgggctttggccttttgccctagggagcgagtgcggagcgagtgggagcgagacggccctgagtggaagtgtctggctccccgtagaggcccttctgtacgccccgccgcccatgagctcgttctcacgcgaacagcgccgtcgttaggctggctctgtagcctcggcttaccccgggacaggcccacgcctcgccagggagggggcagcccgtcgaggcgcctccctagtcagcgtcggcgtcgcgctgcgaccctggaagcgggagccgccgcgagcgagaggaggagctccagtggcggcggcggcggcggcagcggcagcgggcagcagctccagcagcgccagcaggcgggatcgaggccgtcaacatggcgagcgcctcgtaccacatttccaatttgctggaaaaaatgacatccagcgacaaggactttaggtttatggctacaaatgatttgatgacggaactgcagaaagattccatcaagttggatgatgatagtgaaaggaaagtagtgaaaatgattttgaagttattggaagataaaaatggagaggtacagaatttagctgtcaaatgtcttggtcctttagtgagtaaagtgaaagaataccaagtagagacaattgtagataccctctgcactaacatgctttctgataaagaacaacttcgagacatttcaagtattggtcttaaaacagtaattggagaacttcctccagcttccagtggctctgcattagctgctaatgtatgtaaaaagattactggacgtcttacaagtgcaatagcaaaacaggaagatgtctctgttcagctagaagccttggatattatggctgatatgttgagcaggcaaggaggacttcttgttaatttccatccttcaattctgacctgtctacttccccagttgaccagccctagacttgcagtgaggaaaagaaccattatcgctcttggccatctggttatgagctgtggaaatatagtttttgtagatcttattgaacatctgttgtcagagttgtccaaaaatgattctatgtcaacaacaagaacctacatacaatgtattgctgctattagtaggcaagctggtcatagaataggtgaataccttgagaagataattcctttggtggtaaaattttgcaatgtagatgatgatgaattaagagagtactgtattcaagcctttgaatcatttgtaagaagatgtcctaaggaagtatatcctcatgtttctaccattataaatatttgtcttaaatatcttacctatgatccaaattataattacgatgatgaagatgaagatgaaaatgcaatggatgctgatggtggtgatgatgatgatcaagggagtgatgatgaatacagtgatgatgatgacatgagttggaaagtgagacgtgcagctgcgaagtgcttggatgctgtagttagcacaaggcatgaaatgcttccagaattctacaagaccgtctctcctgcactaatatccagatttaaagagcgtgaagagaatgtaaaggcagatgtttttcacgcatacctttctcttttgaagcaaactcgtcctgtacaaagttggctatgtgaccctgatgcaatggagcagggagaaacacctttaacaatgcttcagagtcaggttcccaacattgttaaagctcttcacaaacagatgaaagaaaaaagtgtgaagacccgacagtgttgttttaacatgttaactgagctggtaaatgtattacctggggccctaactcaacacattcctgtacttgtaccaggaatcattttctcactgaatgataaatcaagctcatcgaatttgaagatcgatgctttgtcatgtctatacgtaatcctctgtaaccattctcctcaagtcttccatcctcacgttcaggctttggttcctccagtggtggcttgtgttggagacccattttacaaaattacatctgaagcacttcttgttactcaacagcttgtcaaagtaattcgtcctttagatcagccttcctcgtttgatgcaactccttatatcaaagatctatttacctgtaccattaagagattaaaagcagctgacattgatcaggaagtcaaggaaagggctatttcctgtatgggacaaattatttgcaaccttggagacaatttgggttctgacttgcctaatacacttcagattttcttggagagactaaagaatgaaattaccaggttaactacagtaaaggcattgacactgattgctgggtcacctttgaagatagatttgaggcctgttctgggagaaggggttcctatccttgcttcatttcttagaaaaaaccagagagctttgaaactgggtactctttctgcccttgatattctaataaaaaactatagtgacagcttgacagctgccatgattgatgcagttctagatgagctcccacctcttatcagcgaaagtgatatgcatgtttcacaaatggccatcagttttcttaccactttggcaaaagtatatccctcctccctttcaaagataagtggatccattctcaatgaacttattggacttgtgagatcacccttattgcaggggggagctcttagtgccatgctagactttttccaagctctggttgtcactggaacaaataatttaggatacatggatttgttgcgcatgctgactggtccagtttactctcagagcacagctcttactcataagcagtcttattattccattgccaaatgtgtagctgcccttactcgagcatgccctaaagagggaccagctgtagtaggtcagtttattcaagatgtcaagaactcaaggtctacagattccattcgtctcttagctctactttctcttggagaagttgggcatcatattgacttaagtggacagttggaactaaaatctgtaatactagaagctttctcatctcctagtgaagaagtcaaatcagctgcatcctatgcattaggcagcattagtgtgggcaaccttcctgaatatctgccgtttgtcctgcaagaaataactagtcaacccaaaaggcagtatcttttacttcattccttgaaggaaattattagctctgcatcagtggtgggccttaaaccatatgttgaaaacatctgggccttattactaaagcactgtgagtgtgcagaggaaggaaccagaaatgttgttgctgaatgtctaggaaaactcactctaattgatccagaaactctccttccacggcttaaggggtacttgatatcaggctcatcatatgcccgaagctcagtggttacggctgtgaaatttacaatttctgaccatccacaacctattgatccactgttaaagaactgcataggtgatttcctaaaaactttggaagacccagatttgaatgtgagaagagtagccttggtcacatttaattcagcagcacataacaagccatcattaataagggatctattggatactgttcttccacatctttacaatgaaacaaaagttagaaaggagcttataagagaggtagaaatgggtccatttaaacatacggttgatgatggtctggatattagaaaggcagcatttgagtgtatgtacacacttctagacagttgtcttgatagacttgatatctttgaatttctaaatcatgttgaagatggtttgaaggaccattatgatattaagatgctgacatttttaatgttggtgagactgtctaccctttgtccaagtgcagtactgcagaggttggaccgacttgttgagccattacgtgcaacatgtacaactaaggtaaaggcaaactcagtaaagcaggagtttgaaaaacaagatgaattaaagcgatctgccatgagagcagtagcagcactgctaaccattccagaagcagagaagagtccactgatgagtgaattccagtcacagatcagttctaaccctgagctggcggctatctttgaaagtatccagaaagattcatcatctactaacttggaatcaatggacactagttagatgtttgttcaccatggggaccattacatatgaccatacaatgcactgaattgacaggttaatcataagacatggaaagagaagtgtctaaaagcttcaaaatgttccacttttttttccttcatggagactgtttgtttggctttcttccattgttgtttttgtagcatttatttcagaaatgtgtatttccataatccagaggttgtaaaaccactagtgttttagtggttacagcaacatttgaaatggaaactaaaagttaggattttatggagtatggagatagggtccagtatctatttaccctgtaatgtttaggattaaaatgttaaaattttgtgaccatgaatttctttcttttataaattttctcatttaaaaatcaaaaatcttgcaaaacaaaaaccatgtttctttttcttgtataactttttgttttcagcaacataaattgatttttagctggcagacaagaatatccatataagatttgttaaccatttcagagagtttggcaatttttaaaagataataaggtatcatttttaagtatgaaaattaacaatatccctgttgcgcacactaattttgcatgagtaagtttacaaatatgtatcgtctgtaaagcagcatgtgcagattattcataatatagaagttaaaataagtattagtgcaattttcagatatttatttttgcacagaaaacacattatctggagagaaagaaaggagaatttttgagacttgggttttcttaatgccagtgtgaatttgcagatgttttcagaaaatcaagtcacagtaacaatttgccacttttttctattataaatcttcttacttaaattttgaatatttagtttttctcagttacccatttgtgtgtgtgtgattccacttagaaattcttaaaaccagatttttctttcattccgtttggatgtctacattccttatcaaaggatataaatactgtgtatgcttttgaattttatttttaggaaaattctgaagccagctatcacaggtttgttagctaataatagtattttcttttagttgagttaggtttttccccatctcctgtagagcgaatttacatattgtattgggtaagtgttcactacttttcctgattaagggatctgtgctggggaacaaagcttttgcagtaccttatattgtagttaaaattttatttaacatatccttcagtgagctcatttcacactgtagcctcttccttaaaatttgtggtgctcctgtaacagtaagaactaattctgaaataaaagacatctcctaatgctgtgcaaacatagtttacatgtattgaaggaggcagttgttaaattgagtgaccaatttaagcaatcagatatttgaaaactgcaccctttagttttgaaactgtgaattagaaacacttttcctgctgtattactacctgctttaacatccaaatatacagtgattttaaatgataacatactgtggttattagattaacagcttgattttgaatgttcagatgataatgcagaagacatcacttctagtaaggattttgactagtgcattgatgttgaagttggtgccatttcaaaatgtggcaggtgataatcttttaccataatttgcataaaactgtaatagaagtttattttgagatgttagtatattatgtactatgcatttctgtggtatagatgttgtggatatatttaagtatttggttacatggttttacaataaattacaatactgcaggctctaggactgaaaaaaaaaaaagtcgacgcggccgcgaatttagtagtagta

SEQ ID NO: 343263 - DNA, 8087 bp, Homo sapiens
agcgaaggaggcgggctttggccttttgccctagggagcgagtgcggagcgagtgggagcgagacggccctgagtggaagtgtctggctccccgtagaggcccttctgtacgccccgccgcccatgagctcgttctcacgcgaacagcgccgtcgttaggctggctctgtagcctcggcttaccccgggacaggcccacgcctcgccagggagggggcagcccgtcgaggcgcctccctagtcagcgtcggcgtcgcgctgcgaccctggaagcgggagccgccgcgagcgagaggaggagctccagtggcggcggcggcggcggcagcggcagcgggcagcagctccagcagcgccagcaggcgggatcgaggccgtcaacatggcgagcgcctcgtaccacatttccaatttgctggaaaaaatgacatccagcgacaaggactttaggtttatggctacaaatgatttgatgacggaactgcagaaagattccatcaagttggatgatgatagtgaaaggaaagtagtgaaaatgattttgaagttattggaagataaaaatggagaggtacagaatttagctgtcaaatgtcttggtcctttagtgagtaaagtgaaagaataccaagtagagacaattgtagataccctctgcactaacatgctttctgataaagaacaacttcgagacatttcaagtattggtcttaaaacagtaattggagaacttcctccagcttccagtggctctgcattagctgctaatgtatgtaaaaagattactggacgtcttacaagtgcaatagcaaaacaggaagatgtctctgttcagctagaagccttggatattatggctgatatgttgagcaggcaaggaggacttcttgttaatttccatccttcaattctgacctgtctacttccccagttgaccagccctagacttgcagtgaggaaaagaaccattatcgctcttggccatctggttatgagctgtggaaatatagtttttgtagatcttattgaacatctgttgtcagagttgtccaaaaatgattctatgtcaacaacaagaacctacatacaatgtattgctgctattagtaggcaagctggtcatagaataggtgaataccttgagaagataattcctttggtggtaaaattttgcaatgtagatgatgatgaattaagagagtactgtattcaagcctttgaatcatttgtaagaagatgtcctaaggaagtatatcctcatgtttctaccattataaatatttgtcttaaatatcttacctatgatccaaattataattacgatgatgaagatgaagatgaaaatgcaatggatgctgatggtggtgatgatgatgatcaagggagtgatgatgaatacagtgatgatgatgacatgagttggaaagtgagacgtgcagctgcgaagtgcttggatgctgtagttagcacaaggcatgaaatgcttccagaattctacaagaccgtctctcctgcactaatatccagatttaaagagcgtgaagagaatgtaaaggcagatgtttttcacgcatacctttctcttttgaagcaaactcgtcctgtacaaagttggctatgtgaccctgatgcaatggagcagggagaaacacctttaacaatgcttcagagtcaggttcccaacattgttaaagctcttcacaaacagatgaaagaaaaaagtgtgaagacccgacagtgttgttttaacatgttaactgagctggtaaatgtattacctggggccctaactcaacacattcctgtacttgtaccaggaatcattttctcactgaatgataaatcaagctcatcgaatttgaagatcgatgctttgtcatgtctatacgtaatcctctgtaaccattctcctcaagtcttccatcctcacgttcaggctttggttcctccagtggtggcttgtgttggagacccattttacaaaattacatctgaagcacttcttgttactcaacagcttgtcaaagtaattcgtcctttagatcagccttcctcgtttgatgcaactccttatatcaaagatctatttacctgtaccattaagagattaaaagcagctgacattgatcaggaagtcaaggaaagggctatttcctgtatgggacaaattatttgcaaccttggagacaatttgggttctgacttgcctaatacacttcagattttcttggagagactaaagaatgaaattaccaggttaactacagtaaaggcattgacactgattgctgggtcacctttgaagatagatttgaggcctgttctgggagaaggggttcctatccttgcttcatttcttagaaaaaaccagagagctttgaaactgggtactctttctgcccttgatattctaataaaaaactatagtgacagcttgacagctgccatgattgatgcagttctagatgagctcccacctcttatcagcgaaagtgatatgcatgtttcacaaatggccatcagttttcttaccactttggcaaaagtatatccctcctccctttcaaagataagtggatccattctcaatgaacttattggacttgtgagatcacccttattgcaggggggagctcttagtgccatgctagactttttccaagctctggttgtcactggaacaaataatttaggatacatggatttgttgcgcatgctgactggtccagtttactctcagagcacagctcttactcataagcagtcttattattccattgccaaatgtgtagctgcccttactcgagcatgccctaaagagggaccagctgtagtaggtcagtttattcaagatgtcaagaactcaaggtctacagattccattcgtctcttagctctactttctcttggagaagttgggcatcatattgacttaagtggacagttggaactaaaatctgtaatactagaagctttctcatctcctagtgaagaagtcaaatcagctgcatcctatgcattaggcagcattagtgtgggcaaccttcctgaatatctgccgtttgtcctgcaagaaataactagtcaacccaaaaggcagtatcttttacttcattccttgaaggaaattattagctctgcatcagtggtgggccttaaaccatatgttgaaaacatctgggccttattactaaagcactgtgagtgtgcagaggaaggaaccagaaatgttgttgctgaatgtctaggaaaactcactctaattgatccagaaactctccttccacggcttaaggggtacttgatatcaggctcatcatatgcccgaagctcagtggttacggctgtgaaatttacaatttctgaccatccacaacctattgatccactgttaaagaactgcataggtgatttcctaaaaactttggaagacccagatttgaatgtgagaagagtagccttggtcacatttaattcagcagcacataacaagccatcattaataagggatctattggatactgttcttccacatctttacaatgaaacaaaagttagaaaggagcttataagagaggtagaaatgggtccatttaaacatacggttgatgatggtctggatattagaaaggcagcatttgagtgtatgtacacacttctagacagttgtcttgatagacttgatatctttgaatttctaaatcatgttgaagatggtttgaaggaccattatgatattaaggtaagatgtttgtgcctatttatacaatgttttagaagaagactttgctagagcaactttcacccttgtaatttactcatgtgtctgagaaaaatcaggttgtctgtgaagattttgataagcatattgtaaactataaagtgcaaaagtaataggcagtgtaacaccagttgacgtgtaagaaagatccagagccctttttattggaggaggaagtggcagtggatgcaaaatgctgtgtgcccacttgcttagtgaatagtccctagatcctttccctcaaaaaagtcccgacagattttgctgtttaaagtataaatctgtaactttttggcctgtcttaacattggaccatagttgctacccatggagggttttcttagcattgtcttgattaagtctcctgagctacctttggggctagtctgaattgtaactgtatcatttacctgaatgaggaatttttgtttttcaatataatatactgtgtttaatatcaagaattttgttataggacatggaacttttcagatatacaaaacaatctgtagaagctacttgagagaaatcatactgcgtcttatgtttggataatgaattttgcatataagtgttctttgttttcctgtgtgttcgtctccatttaaaatgtgaacagtaaaagggtgatttgaaaaatgaaaaatatatgcattgtgtctttttcatctactcttccatttagggcttttggccaagcaggacaaaagtggtaactcagcagtaattgagccatactacccgaactcctactcttaggtttccatgtgtggtagtgacctgagcctctcaaagttcaatgaagagggcctccccaccaagaagtaaaaggatgtgcttgtttaattctatgagtttatagtccaagagaaaaaggtttatggggtttatgggttatcaggttttacatggattaatctgaataactggtcaactctgttatgatagtggaaacttattatgaaattgtgttccagttcagtaattttctagttctatgattctcaattctggtgcacatgagctttaaaaaataaaaataaaaaaaataatgtgtgccatattctgacaggttcagtaaaactctctggggatggggcttgaagaatgggtatgtttctaaagctctctggatgattctaatgtgcaaccaagattgaaaaccactttctagtccttatatgctgttgagacaaatctgtctgattctgattgggcagattacattaaaaggaaggtttactttgcatgctagttattttcctttaaaggatttgtcagaatttagtattttgtttttagaaaatgatgtcaaatctaaattctgtcttttttattcctaatagatgctgacatttttaatgttggtgagactgtctaccctttgtccaagtgcagtactgcagaggttggaccgacttgttgagccattacgtgcaacatgtacaactaaggtaaaggcaaactcagtaaagcaggagtttgaaaaacaagatgaattaaagcgatctgccatgagagcagtagcagcactgctaaccattccagaagcagagaagagtccactgatgagtgaattccagtcacagatcagttctaaccctgagctggcggctatctttgaaagtatccagaaagattcatcatctactaacttggaatcaatggacactagttagatgtttgttcaccatggggaccattacatatgaccatacaatgcactgaattgacaggttaatcataagacatggaaagagaagtgtctaaaagcttcaaaatgttccacttttttttccttcatggagactgtttgtttggctttcttccattgttgtttttgtagcatttatttcagaaatgtgtatttccataatccagaggttgtaaaaccactagtgttttagtggttacagcaacatttgaaatggaaactaaaagttaggattttatggagtatggagatagggtccagtatctatttaccctgtaatgtttaggattaaaatgttaaaattttgtgaccatgaatttctttcttttataaattttctcatttaaaaatcaaaaatcttgcaaaacaaaaaccatgtttctttttcttgtataactttttgttttcagcaacataaattgatttttagctggcagacaagaatatccatataagatttgttaaccatttcagagagtttggcaatttttaaaagataataaggtatcatttttaagtatgaaaattaacaatatccctgttgcgcacactaattttgcatgagtaagtttacaaatatgtatcgtctgtaaagcagcatgtgcagattattcataatatagaagttaaaataagtattagtgcaattttcagatatttatttttgcacagaaaacacattatctggagagaaagaaaggagaatttttgagacttgggttttcttaatgccagtgtgaatttgcagatgttttcagaaaatcaagtcacagtaacaatttgccacttttttctattataaatcttcttacttaaattttgaatatttagtttttctcagttacccatttgtgtgtgtgtgattccacttagaaattcttaaaaccagatttttctttcattccgtttggatgtctacattccttatcaaaggatataaatactgtgtatgcttttgaattttatttttaggaaaattctgaagccagctatcacaggtttgttagctaataatagtattttcttttagttgagttaggtttttccccatctcctgtagagcgaatttacatattgtattgggtaagtgttcactacttttcctgattaagggatctgtgctggggaacaaagcttttgcagtaccttatattgtagttaaaattttatttaacatatccttcagtgagctcatttcacactgtagcctcttccttaaaatttgtggtgctcctgtaacagtaagaactaattctgaaataaaagacatctcctaatgctgtgcaaacatagtttacatgtattgaaggaggcagttgttaaattgagtgaccaatttaagcaatcagatatttgaaaactgcaccctttagttttgaaactgtgaattagaaacacttttcctgctgtattactacctgctttaacatccaaatatacagtgattttaaatgataacatactgtggttattagattaacagcttgattttgaatgttcagatgataatgcagaagacatcacttctagtaaggattttgactagtgcattgatgttgaagttggtgccatttcaaaatgtggcaggtgataatcttttaccataatttgcataaaactgtaatagaagtttattttgagatgttagtatattatgtactatgcatttctgtggtatagatgttgtggatatatttaagtatttggttacatggttttacaataaattacaatactgcaggctctaggactgaacaggagactgacatgcatatgttgtgtgaatgtcttagttgggtaaagttaaatccaaatacttcaactggctttttcttcagtttgtttgtttttaactttcaagatgcatgttttgttttgttttgctttgtttttgtctcttaagccaattcatttttctaacagttgaaattcttttagtactaaagaaatagatactgctcttttatggctttagtgtttatatacctgtttatatgcatacattaacaaaattagtaacagcagtgcttagaatttcaatgctgtgtcatactgatgattaactccatactcctagtggtgatgtggtccagatactggaatggaagtggcaggatgtggagtccagacatagtctaccactcatgctacttactagtaatattaaggtgttaaacttaggaatttgtcacatgtaggttcctgaggagatctaaaagttaatacaaaaccaagctgtttactgattttcatgagaacatttaagttagtttaggtctacctgatttattttaaaagaaggcagagggctggacgcagtggcttacgcctgtaatcccagcactttgggaggccgaggcgggcggatcacgaggtcaggagatcgagactatcctggctaacactgtgaaaacccatctctactgaaaatacaaaaaattagctgggcgtggtggcagacgcctgtagtcctagctgctacagctgaggcaggagaatggcgtgaacccaggaggcggagctggcagtgagccgagatcacgccactgcactctggcctgggcaacagagcgagagtctgtctcaaaaaaa

SEQ ID NO: 343264 - DNA, 4479 bp, Homo sapiens
agcgaaggaggcgggctttggccttttgccctagggagcgagtgcggagcgagtgggagcgagacggccctgagtggaagtgtctggctccccgtagaggcccttctgtacgccccgccgcccatgagctcgttctcacgcgaacagcgccgtcgttaggctggctctgtagcctcggcttaccccgggacaggcccacgcctcgccagggagggggcagcccgtcgaggcgcctccctagtcagcgtcggcgtcgcgctgcgaccctggaagcgggagccgccgcgagcgagaggaggagctccagtggcggcggcggcggcggcagcggcagcgggcagcagctccagcagcgccagcaggcgggatcgaggccgtcaacatggcgagcgcctcgtaccacatttccaatttgctggaaaaaatgacatccagcgacaaggactttaggtttatggctacaaatgatttgatgacggaactgcagaaagattccatcaagttggatgatgatagtgaaaggaaagtagtgaaaatgattttgaagttattggaagataaaaatggagaggtacagaatttagctgtcaaatgtcttggtcctttagtgagtaaagtgaaagaataccaagtagagacaattgtagataccctctgcactaacatgctttctgataaagaacaacttcgagacatttcaagtattggtcttaaaacagtaattggagaacttcctccagcttccagtggctctgcattagctgctaatgtatgtaaaaagattactggacgtcttacaagtgcaatagcaaaacaggaagatgtctctgttcagctagaagccttggatattatggctgatatgttgagcaggcaaggaggacttcttgttaatttccatccttcaattctgacctgtctacttccccagttgaccagccctagacttgcagtgaggaaaagaaccattatcgctcttggccatctggttatgagctgtggaaatatagtttttgtagatcttattgaacatctgttgtcagagttgtccaaaaatgattctatgtcaacaacaagaacctacatacaatgtattgctgctattagtaggcaagctggtcatagaataggtgaataccttgagaagataattcctttggtggtaaaattttgcaatgtagatgatgatgaattaagagagtactgtattcaagcctttgaatcatttgtaagaagatgtcctaaggaagtatatcctcatgtttctaccattataaatatttgtcttaaatatcttacctatgatccaaattataattacgatgatgaagatgaagatgaaaatgcaatggatgctgatggtggtgatgatgatgatcaagggagtgatgatgaatacagtgatgatgatgacatgagttggaaagtgagacgtgcagctgcgaagtgcttggatgctgtagttagcacaaggcatgaaatgcttccagaattctacaagaccgtctctcctgcactaatatccagatttaaagagcgtgaagagaatgtaaaggcagatgtttttcacgcatacctttctcttttgaagcaaactcgtcctgtacaaagttggctatgtgaccctgatgcaatggagcagggagaaacacctttaacaatgcttcagagtcaggttcccaacattgttaaagctcttcacaaacagatgaaagaaaaaagtgtgaagacccgacagtgttgttttaacatgttaactgagctggtaaatgtattacctggggccctaactcaacacattcctgtacttgtaccaggaatcattttctcactgaatgataaatcaagctcatcgaatttgaagatcgatgctttgtcatgtctatacgtaatcctctgtaaccattctcctcaagtcttccatcctcacgttcaggctttggttcctccagtggtggcttgtgttggagacccattttacaaaattacatctgaagcacttcttgttactcaacagcttgtcaaagtaattcgtcctttagatcagccttcctcgtttgatgcaactccttatatcaaagatctatttacctgtaccattaagagattaaaagcagctgacattgatcaggaagtcaaggaaagggctatttcctgtatgggacaaattatttgcaaccttggagacaatttgggttctgacttgcctaatacacttcagattttcttggagagactaaagaatgaaattaccaggttaactacagtaaaggcattgacactgattgctgggtcacctttgaagatagatttgaggcctgttctgggagaaggggttcctatccttgcttcatttcttagaaaaaaccagagagctttgaaactgggtactctttctgcccttgatattctaataaaaaactatagtgacagcttgacagctgccatgattgatgcagttctagatgagctcccacctcttatcagcgaaagtgatatgcatgtttcacaaatggccatcagttttcttaccactttggcaaaagtatatccctcctccctttcaaagataagtggatccattctcaatgaacttattggacttgtgagatcacccttattgcaggggggagctcttagtgccatgctagactttttccaagctctggttgtcactggaacaaataatttaggatacatggatttgttgcgcatgctgactggtccagtttactctcagagcacagctcttactcataagcagtcttattattccattgccaaatgtgtagctgcccttactcgagcatgccctaaagagggaccagctgtagtaggtcagtttattcaagatgtcaagaactcaaggtctacagattccattcgtctcttagctctactttctcttggagaagttgggcatcatattgacttaagtggacagttggaactaaaatctgtaatactagaagctttctcatctcctagtgaagaagtcaaatcagctgcatcctatgcattaggcagcattagtgtgggcaaccttcctgaatatctgccgtttgtcctgcaagaaataactagtcaacccaaaaggcagtatcttttacttcattccttgaaggaaattattagctctgcatcagtggtgggccttaaaccatatgttgaaaacatctgggccttattactaaagcactgtgagtgtgcagaggaaggaaccagaaatgttgttgctgaatgtctaggaaaactcactctaattgatccagaaactctccttccacggcttaaggggtacttgatatcaggctcatcatatgcccgaagctcagtggttacggctgtgaaatttacaatttctgaccatccacaacctattgatccactgttaaagaactgcataggtgatttcctaaaaactttggaagacccagatttgaatgtgagaagagtagccttggtcacatttaattcagcagcacataacaagccatcattaataagggatctattggatactgttcttccacatctttacaatgaaacaaaagttagaaaggagcttataagagaggtagaaatgggtccatttaaacatacggttgatgatggtctggatattagaaaggcagcatttgagtgtatgtacacacttctagacagttgtcttgatagacttgatatctttgaatttctaaatcatgttgaagatggtttgaaggaccattatgatattaagatgctgacatttttaatgttggtgagactgtctaccctttgtccaagtgcagtactgcagaggttggaccgacttgttgagccattacgtgcaacatgtacaactaaggtaaaggcaaactcagtaaagcaggagtttgaaaaacaagatgaattaaagcgatctgccatgagagcagtagcagcactgctaaccattccagaagcagagaagagtccactgatgagtgaattccagtcacagatcagttctaaccctgagctggcggctatctttgaaagtatccagaaagattcatcatctactaacttggaatcaatggacactagttagatgtttgttcaccatggggaccattacatatgaccatacaatgcactgaattgacaggttaatcataagacatggaaagagaagtgtctaaaagcttcaaaatgttccacttttttttccttcatggagactgtttgtttggctttcttccattgttgtttttgtagcatttatttcagaaatgtgtatttccataatccagaggttgtaaaaccactagtgttttagtggttacagcaacatttgaaatggaaactaaaagttaggattttatggagtatggagatagggtccagtatctatttaccctgtaatgtttaggattaaaatgttaaaattttgtgaccatgaatttctttcttttataaattttctcatttaaaaatcaaaaatcttgcaaaaca

SEQ ID NO: 343265 - DNA, 4350 bp, Homo sapiens
  misc_feature (23)..(23): n is a, c, g, or t
  misc_feature (25)..(25): n is a, c, g, or t
  misc_feature (32)..(32): n is a, c, g, or t
gcactgatgtcatgagtgcgagncngggttgntgggtactctttctgcccttgatattctaataaaaaactatagtgacagcttgacagctgccatgattgatgcagttctagatgagctcccacctcttatcagcgaaagtgatatgcatgtttcacaaatggccatcagttttcttaccactttggcaaaagtatatccctcctccctttcaaagataagtggatccattctcaatgaacttattggacttgtgagatcacccttattgcaggggggagctcttagtgccatgctagactttttccaagctctggttgtcactggaacaaataatttaggatacatggatttgttgcgcatgctgactggtccagtttactctcagagcacagctcttactcataagcagtcttattattccattgccaaatgtgtagctgcccttactcgagcatgccctaaagagggaccagctgtagtaggtcagtttattcaagatgtcaagaactcaaggtctacagattccattcgtctcttagctctactttctcttggagaagttgggcatcatattgacttaagtggacagttggaactaaaatctgtaatactagaagctttctcatctcctagtgaagaagtcaaatcagctgcatcctatgcattaggcagcattagtgtgggcaaccttcctgaatatctgccgtttgtcctgcaagaaataactagtcaacccaaaaggcagtatcttttacttcattccttgaaggaaattattagctctgcatcagtggtgggccttaaaccatatgttgaaaacatctgggccttattactaaagcactgtgagtgtgcagaggaaggaaccagaaatgttgttgctgaatgtctaggaaaactcactctaattgatccagaaactctccttccacggcttaaggggtacttgatatcaggctcatcatatgcccgaagctcagtggttacggctgtgaaatttacaatttctgaccatccacaacctattgatccactgttaaagaactgcataggtgatttcctaaaaactttggaagacccagatttgaatgtgagaagagtagccttggtcacatttaattcagcagcacataacaagccatcattaataagggatctattggatactgttcttccacatctttacaatgaaacaaaagttagaaaggagcttataagagaggtagaaatgggtccatttaaacatacggttgatgatggtctggatattagaaaggcagcatttgagtgtatgtacacacttctagacagttgtcttgatagacttgatatctttgaatttctaaatcatgttgaagatggtttgaaggaccattatgatattaagatgctgacatttttaatgttggtgagactgtctaccctttgtccaagtgcagtactgcagaggttggaccgacttgttgagccattacgtgcaacatgtacaactaaggtaaaggcaaactcagtaaagcaggagtttgaaaaacaagatgaattaaagcgatctgccatgagagcagtagcagcactgctaaccattccagaagcagagaagagtccactgatgagtgaattccagtcacagatcagttctaaccctgagctggcggctatctttgaaagtatccagaaagattcatcatctactaacttggaatcaatggacactagttagatgtttgttcaccatggggaccattacatatgaccatacaatgcactgaattgacaggttaatcataagacatggaaagagaagtgtctaaaagcttcaaaatgttccacttttttttccttcatggagactgtttgtttggctttcttccattgttgtttttgtagcatttatttcagaaatgtgtatttccataatccagaggttgtaaaaccactagtgttttagtggttacagcaacatttgaaatggaaactaaaagttaggattttatggagtatggagatagggtccagtatctatttaccctgtaatgtttaggattaaaatgttaaaattttgtgaccatgaatttctttcttttataaattttctcatttaaaaatcaaaaatcttgcaaaacaaaaaccatgtttctttttcttgtataactttttgttttcagcaacataaattgatttttagctggcagacaagaatatccatataagatttgttaaccatttcagagagtttggcaatttttaaaagataataaggtatcatttttaagtatgaaaattaacaatatccctgttgcgcacactaattttgcatgagtaagtttacaaatatgtatcgtctgtaaagcagcatgtgcagattattcataatatagaagttaaaataagtattagtgcaattttcagatatttatttttgcacagaaaacacattatctggagagaaagaaaggagaatttttgagacttgggttttcttaatgccagtgtgaatttgcagatgttttcagaaaatcaagtcacagtaacaatttgccacttttttctattataaatcttcttacttaaattttgaatatttagtttttctcagttacccatttgtgtgtgtgtgattccacttagaaattcttaaaaccagatttttctttcattccgtttggatgtctacattccttatcaaaggatataaatactgtgtatgcttttgaattttatttttaggaaaattctgaagccagctatcacaggtttgttagctaataatagtattttcttttagttgagttaggtttttccccatctcctgtagagcgaatttacatattgtattgggtaagtgttcactacttttcctgattaagggatctgtgctggggaacaaagcttttgcagtaccttatattgtagttaaaattttatttaacatatccttcagtgagctcatttcacactgtagcctcttccttaaaatttgtggtgctcctgtaacagtaagaactaattctgaaataaaagacatctcctaatgctgtgcaaacatagtttacatgtattgaaggaggcagttgttaaattgagtgaccaatttaagcaatcagatatttgaaaactgcaccctttagttttgaaactgtgaattagaaacacttttcctgctgtattactacctgctttaacatccaaatatacagtgattttaaatgataacatactgtggttattagattaacagcttgattttgaatgttcagatgataatgcagaagacatcacttctagtaaggattttgactagtgcattgatgttgaagttggtgccatttcaaaatgtggcaggtgataatcttttaccataatttgcataaaactgtaatagaagtttattttgagatgttagtatattatgtactatgcatttctgtggtatagatgttgtggatatatttaagtatttggttacatggttttacaataaattacaatactgcaggctctaggactgaacaggagactgacatgcatatgttgtgtgaatgtcttagttgggtaaagttaaatccaaatacttcaactggctttttcttcagtttgtttgtttttaactttcaagatgcatgttttgttttgttttgctttgtttttgtctcttaagccaattcatttttctaacagttgaaattcttttagtactaaagaaatagatactgctcttttatggctttagtgtttatatacctgtttatatgcatacattaacaaaattagtaacagcagtgcttagaatttcaatgctgtgtcatactgatgattaactccatactcctagtggtgatgtggtccagatactggaatggaagtggcaggatgtggagtccagacatagtctaccactcatgctacttactagtaatattaaggtgttaaacttaggaatttgtcacatgtaggttcctgaggagatctaaaagttaatacaaaaccaagctgtttactgattttcatgagaacatttaagttagtttaggtctacctgatttattttaaaagaaggcagagggctggacgcagtggcttacgcctgtaatcccagcactttgggaggccgaggcgggcggatcacgaggtcaggagatcgagactatcctggctaacactgtgaaaacccatctctactgaaaatacaaaaaattagctgggcgtggtggcagacgcctgtagtcctagctgctacagctgaggcaggagaatggcgtgaacccaggaggcggagctggcagtgagccgagatcacgccactgcactctggcctgggcaacagagcgagagtctgtctcaaaaaaa

SEQ ID NO: 343266 - DNA, 4482 bp, Homo sapiens
  misc_feature (4457)..(4459): n is a, c, g, or t
agcgaaggaggcgggctttggccttttgccctagggagcgagtgcggagcgagtgggagcgagacggccctgagtggaagtgtctggctccccgtagaggcccttctgtacgccccgccgcccatgagctcgttctcacgcgaacagcgccgtcgttaggctggctctgtagcctcggcttaccccgggacaggcccacgcctcgccagggagggggcagcccgtcgaggcgcctccctagtcagcgtcggcgtcgcgctgcgaccctggaagcgggagccgccgcgagcgagaggaggagctccagtggcggcggcggcggcggcagcggcagcgggcagcagctccagcagcgccagcaggcgggatcgaggccgtcaacatggcgagcgcctcgtaccacatttccaatttgctggaaaaaatgacatccagcgacaaggactttaggtttatggctacaaatgatttgatgacggaactgcagaaagattccatcaagttggatgatgatagtgaaaggaaagtagtgaaaatgattttgaagttattggaagataaaaatggagaggtacagaatttagctgtcaaatgtcttggtcctttagtgagtaaagtgaaagaataccaagtagagacaattgtagataccctctgcactaacatgctttctgataaagaacaacttcgagacatttcaagtattggtcttaaaacagtaattggagaacttcctccagcttccagtggctctgcattagctgctaatgtatgtaaaaagattactggacgtcttacaagtgcaatagcaaaacaggaagatgtctctgttcagctagaagccttggatattatggctgatatgttgagcaggcaaggaggacttcttgttaatttccatccttcaattctgacctgtctacttccccagttgaccagccctagacttgcagtgaggaaaagaaccattatcgctcttggccatctggttatgagctgtggaaatatagtttttgtagatcttattgaacatctgttgtcagagttgtccaaaaatgattctatgtcaacaacaagaacctacatacaatgtattgctgctattagtaggcaagctggtcatagaataggtgaataccttgagaagataattcctttggtggtaaaattttgcaatgtagatgatgatgaattaagagagtactgtattcaagcctttgaatcatttgtaagaagatgtcctaaggaagtatatcctcatgtttctaccattataaatatttgtcttaaatatcttacctatgatccaaattataattacgatgatgaagatgaagatgaaaatgcaatggatgctgatggtggtgatgatgatgatcaagggagtgatgatgaatacagtgatgatgatgacatgagttggaaagtgagacgtgcagctgcgaagtgcttggatgctgtagttagcacaaggcatgaaatgcttccagaattctacaagaccgtctctcctgcactaatatccagatttaaagagcgtgaagagaatgtaaaggcagatgtttttcacgcatacctttctcttttgaagcaaactcgtcctgtacaaagttggctatgtgaccctgatgcaatggagcagggagaaacacctttaacaatgcttcagagtcaggttcccaacattgttaaagctcttcacaaacagatgaaagaaaaaagtgtgaagacccgacagtgttgttttaacatgttaactgagctggtaaatgtattacctggggccctaactcaacacattcctgtacttgtaccaggaatcattttctcactgaatgataaatcaagctcatcgaatttgaagatcgatgctttgtcatgtctatacgtaatcctctgtaaccattctcctcaagtcttccatcctcacgttcaggctttggttcctccagtggtggcttgtgttggagacccattttacaaaattacatctgaagcacttcttgttactcaacagcttgtcaaagtaattcgtcctttagatcagccttcctcgtttgatgcaactccttatatcaaagatctatttacctgtaccattaagagattaaaagcagctgacattgatcaggaagtcaaggaaagggctatttcctgtatgggacaaattatttgcaaccttggagacaatttgggttctgacttgcctaatacacttcagattttcttggagagactaaagaatgaaattaccaggttaactacagtaaaggcattgacactgattgctgggtcacctttgaagatagatttgaggcctgttctgggagaaggggttcctatccttgcttcatttcttagaaaaaaccagagagctttgaaactgggtactctttctgcccttgatattctaataaaaaactatagtgacagcttgacagctgccatgattgatgcagttctagatgagctcccacctcttatcagcgaaagtgatatgcatgtttcacaaatggccatcagttttcttaccactttggcaaaagtatatccctcctccctttcaaagataagtggatccattctcaatgaacttattggacttgtgagatcacccttattgcaggggggagctcttagtgccatgctagactttttccaagctctggttgtcactggaacaaataatttaggatacatggatttgttgcgcatgctgactggtccagtttactctcagagcacagctcttactcataagcagtcttattattccattgccaaatgtgtagctgcccttactcgagcatgccctaaagagggaccagctgtagtaggtcagtttattcaagatgtcaagaactcaaggtctacagattccattcgtctcttagctctactttctcttggagaagttgggcatcatattgacttaagtggacagttggaactaaaatctgtaatactagaagctttctcatctcctagtgaagaagtcaaatcagctgcatcctatgcattaggcagcattagtgtgggcaaccttcctgaatatctgccgtttgtcctgcaagaaataactagtcaacccaaaaggcagtatcttttacttcattccttgaaggaaattattagctctgcatcagtggtgggccttaaaccatatgttgaaaacatctgggccttattactaaagcactgtgagtgtgcagaggaaggaaccagaaatgttgttgctgaatgtctaggaaaactcactctaattgatccagaaactctccttccacggcttaaggggtacttgatatcaggctcatcatatgcccgaagctcagtggttacggctgtgaaatttacaatttctgaccatccacaacctattgatccactgttaaagaactgcataggtgatttcctaaaaactttggaagacccagatttgaatgtgagaagagtagccttggtcacatttaattcagcagcacataacaagccatcattaataagggatctattggatactgttcttccacatctttacaatgaaacaaaagttagaaaggagcttataagagaggtagaaatgggtccatttaaacatacggttgatgatggtctggatattagaaaggcagcatttgagtgtatgtacacacttctagacagttgtcttgatagacttgatatctttgaatttctaaatcatgttgaagatggtttgaaggaccattatgatattaagatgctgacatttttaatgttggtgagactgtctaccctttgtccaagtgcagtactgcagaggttggaccgacttgttgagccattacgtgcaacatgtacaactaaggtaaaggcaaactcagtaaagcaggagtttgaaaaacaagatgaattaaagcgatctgccatgagagcagtagcagcactgctaaccattccagaagcagagaagagtccactgatgagtgaattccagtcacagatcagttctaaccctgagctggcggctatctttgaaagtatccagaaagattcatcatctactaacttggaatcaatggacactagttagatgtttgttcaccatggggaccattacatatgaccatacaatgcactgaattgacaggttaatcataagacatggaaagagaagtgtctaaaagcttcaaaatgttccacttttttttccttcatggagactgtttgtttggctttcttccattgttgtttttgtagcatttatttcagaaatgtgtatttccataatccagaggttgtaaaaccactagtgttttagtggttacagcaacatttgaaatggaaactaaaagttaggattttatggagtatggagatagggtccagtatctatttaccctgtaatgtttaggattaaaatgttaaaattttgtgaccatgaaaaaaaaaaaaaaaaaaaaaaaaaaaaaaannnaaaaaaaaaaaaaaaaaaaaaaa

SEQ ID NO: 343267 - DNA, 3983 bp, Homo sapiens
ctgcccttactcgagcatgccctaaagagggaccagtcatggttttaaacgtatggtcagtttattcaatagactgatcaaggtaactcaaaggatcatacagagtttgccaaaatatccgggtccctcgtgtaagggccatgccctaagccgtgtatccatacctgggggaccgaaaccggttctagcgcgacctcagtaacttctggggacttaagtggacagttggaactaaaatctgtaatactagaagctttctcatctcctagtgaagaagtcaaatcagctgcatcctatgcattaggcagcattagtgtgggcaaccttcctgaatatctgccgtttgtcctgcaagaaataactagtcaacccaaaaggcagtatcttttacttcattccttgaaggaaattattagctctgcatcagtggtgggccttaaaccatatgttgaaaacatctgggccttattactaaagcactgtgagtgtgcagaggaaggaaccagaaatgttgttgctgaatgtctaggaaaactcactctaattgatccagaaactctccttccacggcttaaggggtacttgatatcaggctcatcatatgcccgaagctcagtggttacggctgtgaaatttacaatttctgaccatccacaacctattgatccactgttaaagaactgcataggtgatttcctaaaaactttggaagacccagatttgaatgtgagaagagtagccttggtcacatttaattcagcagcacataacaagccatcattaataagggatctattggatactgttcttccacatctttacaatgaaacaaaagttagaaaggagcttataagagaggtagaaatgggtccatttaaacatacggttgatgatggtctggatattagaaaggcagcatttgagtgtatgtacacacttctagacagttgtcttgatagacttgatatctttgaatttctaaatcatgttgaagatggtttgaaggaccattatgatattaagatgctgacatttttaatgttggtgagactgtctaccctttgtccaagtgcagtactgcagaggttggaccgacttgttgagccattacgtgcaacatgtacaactaaggtaaaggcaaactcagtaaagcaggagtttgaaaaacaagatgaattaaagcgatctgccatgagagcagtagcagcactgctaaccattccagaagcagagaagagtccactgatgagtgaattccagtcacagatcagttctaaccctgagctggcggctatctttgaaagtatccagaaagattcatcatctactaacttggaatcaatggacactagttagatgtttgttcaccatggggaccattacatatgaccatacaatgcactgaattgacaggttaatcataagacatggaaagagaagtgtctaaaagcttcaaaatgttccacttttttttccttcatggagactgtttgtttggctttcttccattgttgtttttgtagcatttatttcagaaatgtgtatttccataatccagaggttgtaaaaccactagtgttttagtggttacagcaacatttgaaatggaaactaaaagttaggattttatggagtatggagatagggtccagtatctatttaccctgtaatgtttaggattaaaatgttaaaattttgtgaccatgaatttctttcttttataaattttctcatttaaaaatcaaaaatcttgcaaaacaaaaaccatgtttctttttcttgtataactttttgttttcagcaacataaattgatttttagctggcagacaagaatatccatataagatttgttaaccatttcagagagtttggcaatttttaaaagataataaggtatcatttttaagtatgaaaattaacaatatccctgttgcgcacactaattttgcatgagtaagtttacaaatatgtatcgtctgtaaagcagcatgtgcagattattcataatatagaagttaaaataagtattagtgcaattttcagatatttatttttgcacagaaaacacattatctggagagaaagaaaggagaatttttgagacttgggttttcttaatgccagtgtgaatttgcagatgttttcagaaaatcaagtcacagtaacaatttgccacttttttctattataaatcttcttacttaaattttgaatatttagtttttctcagttacccatttgtgtgtgtgtgattccacttagaaattcttaaaaccagatttttctttcattccgtttggatgtctacattccttatcaaaggatataaatactgtgtatgcttttgaattttatttttaggaaaattctgaagccagctatcacaggtttgttagctaataatagtattttcttttagttgagttaggtttttccccatctcctgtagagcgaatttacatattgtattgggtaagtgttcactacttttcctgattaagggatctgtgctggggaacaaagcttttgcagtaccttatattgtagttaaaattttatttaacatatccttcagtgagctcatttcacactgtagcctcttccttaaaatttgtggtgctcctgtaacagtaagaactaattctgaaataaaagacatctcctaatgctgtgcaaacatagtttacatgtattgaaggaggcagttgttaaattgagtgaccaatttaagcaatcagatatttgaaaactgcaccctttagttttgaaactgtgaattagaaacacttttcctgctgtattactacctgctttaacatccaaatatacagtgattttaaatgataacatactgtggttattagattaacagcttgattttgaatgttcagatgataatgcagaagacatcacttctagtaaggattttgactagtgcattgatgttgaagttggtgccatttcaaaatgtggcaggtgataatcttttaccataatttgcataaaactgtaatagaagtttattttgagatgttagtatattatgtactatgcatttctgtggtatagatgttgtggatatatttaagtatttggttacatggttttacaataaattacaatactgcaggctctaggactgaacaggagactgacatgcatatgttgtgtgaatgtcttagttgggtaaagttaaatccaaatacttcaactggctttttcttcagtttgtttgtttttaactttcaagatgcatgttttgttttgttttgctttgtttttgtctcttaagccaattcatttttctaacagttgaaattcttttagtactaaagaaatagatactgctcttttatggctttagtgtttatatacctgtttatatgcatacattaacaaaattagtaacagcagtgcttagaatttcaatgctgtgtcatactgatgattaactccatactcctagtggtgatgtggtccagatactggaatggaagtggcaggatgtggagtccagacatagtctaccactcatgctacttactagtaatattaaggtgttaaacttaggaatttgtcacatgtaggttcctgaggagatctaaaagttaatacaaaaccaagctgtttactgattttcatgagaacatttaagttagtttaggtctacctgatttattttaaaagaaggcagagggctggacgcagtggcttacgcctgtaatcccagcactttgggaggccgaggcgggcggatcacgaggtcaggagatcgagactatcctggctaacactgtgaaaacccatctctactgaaaatacaaaaaattagctgggcgtggtggcagacgcctgtagtcctagctgctacagctgaggcaggagaatggcgtgaacccaggaggcggagctggcagtgagccgagatcacgccactgcactctggcctgggcaacagagcgagagtctgtctcaaaaaaa

SEQ ID NO: 343268 - DNA, 3185 bp, Homo sapiens
  misc_feature (48)..(49): n is a, c, g, or t
  misc_feature (56)..(56): n is a, c, g, or t
tcgtctagaggatcccatgagcagcatattataggtgaggtctctttnncacttantcaggtaaggttgagacaaatctgtctgattctgattgggcagattacattaaaaggaaggtttactttgcatgctagttattttcctttaaaggatttgtcagaatttagtattttgtttttagaaaatgatgtcaaatctaaattctgtcttttttattcctaatagatgctgacatttttaatgttggtgagactgtctaccctttgtccaagtgcagtactgcagaggttggaccgacttgttgagccattacgtgcaacatgtacaactaaggtaaaggcaaactcagtaaagcaggagtttgaaaaacaagatgaattaaagcgatctgccatgagagcagtagcagcactgctaaccattccagaagcagagaagagtccactgatgagtgaattccagtcacagatcagttctaaccctgagctggcggctatctttgaaagtatccagaaagattcatcatctactaacttggaatcaatggacactagttagatgtttgttcaccatggggaccattacatatgaccatacaatgcactgaattgacaggttaatcataagacatggaaagagaagtgtctaaaagcttcaaaatgttccacttttttttccttcatggagactgtttgtttggctttcttccattgttgtttttgtagcatttatttcagaaatgtgtatttccataatccagaggttgtaaaaccactagtgttttagtggttacagcaacatttgaaatggaaactaaaagttaggattttatggagtatggagatagggtccagtatctatttaccctgtaatgtttaggattaaaatgttaaaattttgtgaccatgaatttctttcttttataaattttctcatttaaaaatcaaaaatcttgcaaaacaaaaaccatgtttctttttcttgtataactttttgttttcagcaacataaattgatttttagctggcagacaagaatatccatataagatttgttaaccatttcagagagtttggcaatttttaaaagataataaggtatcatttttaagtatgaaaattaacaatatccctgttgcgcacactaattttgcatgagtaagtttacaaatatgtatcgtctgtaaagcagcatgtgcagattattcataatatagaagttaaaataagtattagtgcaattttcagatatttatttttgcacagaaaacacattatctggagagaaagaaaggagaatttttgagacttgggttttcttaatgccagtgtgaatttgcagatgttttcagaaaatcaagtcacagtaacaatttgccacttttttctattataaatcttcttacttaaattttgaatatttagtttttctcagttacccatttgtgtgtgtgtgattccacttagaaattcttaaaaccagatttttctttcattccgtttggatgtctacattccttatcaaaggatataaatactgtgtatgcttttgaattttatttttaggaaaattctgaagccagctatcacaggtttgttagctaataatagtattttcttttagttgagttaggtttttccccatctcctgtagagcgaatttacatattgtattgggtaagtgttcactacttttcctgattaagggatctgtgctggggaacaaagcttttgcagtaccttatattgtagttaaaattttatttaacatatccttcagtgagctcatttcacactgtagcctcttccttaaaatttgtggtgctcctgtaacagtaagaactaattctgaaataaaagacatctcctaatgctgtgcaaacatagtttacatgtattgaaggaggcagttgttaaattgagtgaccaatttaagcaatcagatatttgaaaactgcaccctttagttttgaaactgtgaattagaaacacttttcctgctgtattactacctgctttaacatccaaatatacagtgattttaaatgataacatactgtggttattagattaacagcttgattttgaatgttcagatgataatgcagaagacatcacttctagtaaggattttgactagtgcattgatgttgaagttggtgccatttcaaaatgtggcaggtgataatcttttaccataatttgcataaaactgtaatagaagtttattttgagatgttagtatattatgtactatgcatttctgtggtatagatgttgtggatatatttaagtatttggttacatggttttacaataaattacaatactgcaggctctaggactgaacaggagactgacatgcatatgttgtgtgaatgtcttagttgggtaaagttaaatccaaatacttcaactggctttttcttcagtttgtttgtttttaactttcaagatgcatgttttgttttgttttgctttgtttttgtctcttaagccaattcatttttctaacagttgaaattcttttagtactaaagaaatagatactgctcttttatggctttagtgtttatatacctgtttatatgcatacattaacaaaattagtaacagcagtgcttagaatttcaatgctgtgtcatactgatgattaactccatactcctagtggtgatgtggtccagatactggaatggaagtggcaggatgtggagtccagacatagtctaccactcatgctacttactagtaatattaaggtgttaaacttaggaatttgtcacatgtaggttcctgaggagatctaaaagttaatacaaaaccaagctgtttactgattttcatgagaacatttaagttagtttaggtctacctgatttattttaaaagaaggcagagggctggacgcagtggcttacgcctgtaatcccagcactttgggaggccgaggcgggcggatcacgaggtcaggagatcgagactatcctggctaacactgtgaaaacccatctctactgaaaatacaaaaaattagctgggcgtggtggcagacgcctgtagtcctagctgctacagctgaggcaggagaatggcgtgaacccaggaggcggagctggcagtgagccgagatcacgccactgcactctggcctgggcaacagagcgagagtctgtctcaaaaaaa

SEQ ID NO: 343269 - DNA, 1452 bp, Homo sapiens
agcgaaggaggcgggctttggccttttgccctagggagcgagtgcggagcgagtgggagcgagacggccctgagtggaagtgtctggctccccgtagaggcccttctgtacgccccgccgcccatgagctcgttctcacgcgaacagcgccgtcgttaggctggctctgtagcctcggcttaccccgggacaggcccacgcctcgccagggagggggcagcccgtcgaggcgcctccctagtcagcgtcggcgtcgcgctgcgaccctggaagcgggagccgccgcgagcgagaggaggagctccagtggcggcggcggcggcggcagcggcagcgggcagcagctccagcagcgccagcaggcgggatcgaggccgtcaacatggcgagcgcctcgtaccacatttccaatttgctggaaaaaatgacatccagcgacaaggactttaggtgaggccgagatccgaccctcaccccacctcggggttctcgcagccgcggccctggccgtcacgcaggccttgccccaccccttcggctgtagccggtagcttctctgccccgaagtctccatgcccaccggtccgctggcctcccgatccctgcggagcccctgttcctctcccctctttgcaaccgcaaccccctccccccattctttctcctaggcagttgcccgccgcggtctctaggccccgtttgcttgtctcagcgcccccacatccttccctgccccaccaggaggcgattcttgcgtctcaggtagcgcgaaggggctaaaccacccaccattgtggagaagggagttgctctaggccgggagaccgggcgccgggcctattcgcttgccatcctgcggcgctaggccgccgtgctcgctggggcccaagctgctgcccactcggggacccggcagcctcctctctgcccgcaggtgcgcgtgggccttgctgcattcaggtggaatgatgaacttttgcgctcttggctgatacatagttcttttgtggattattaattttcgtgaaggtgggaagaagggggaggggagccaggatggaggaaacttcgctcatagggttttcccgccagcatcactgtcagttcctcttgtcaggtaaaaccaacttaggaactcggggtttcagtctcatgtcctcatatccaaaatcactgccaaaggggtggattgctggatcttaatcatagcagacggatcttcaaaaggaagagatgtttaatacggacctggtgaatatgaagctttattacagcagttctgttcaggagatcggtactgttggttccaaagtgttgtaatatgcatagtgaagatttgttatatttttacaggttatctttgtttttatttttccttgcacgcttcggtgatttggcttgcagttgattaaagccgcgcgggccattcttcttccactacattaagtctag

SEQ ID NO: 343270 - DNA, 855 bp, Homo sapiens
gtccctttcacaatgcatcggaattatgagagctacaattgaagatgagatttgggtggggacacaggcaaaccatatcagaccccaagatctcttttcagctctataggctgatccctgtgacttgcatcttgcagaagaaaacaatggcttttcagtgccttttttgtaaataatatggctgcatagtcagagaatatgggagacagtgtctcctttattttgaagacataattgtggtttggtggaaagagctctggactaagagacagaaggcctaggttttacttttagcttcaataccatgtggccatgtgaccggaggaaggttgactcttctgaacttcagttcctctacctgagaaacaagaagcttggactggactggctctaggctcttgtcagctctgacatctgggcaaggatgccaggtgcctcacctactgctccagatgtcccaggagaggtttccatgcaggatttcaacttgctgaaagcacgtgcgtctttcctaatgaatgactgggattccttcacaggtgaaaatctctaaacctctgggaaagtctgtaatgtcacagcaaactcatcttctttgtatgataaaaccgaggtctttcctctggttgatgataaggggagacagagttcttgtcatagtacttgaactaggggacaagcaaaagggccacataggaaaggcttttggttgttgcttaataaaagcaacaataaggttttggaaaggctttaattcatcgctcatgtagaaggtagccgggcctgaatttctagaagatccaaagctgggagcaagtcacatggctgcacggagaactaccatggccaccctgg

SEQ ID NO: 343271 - DNA, 290 bp, Homo sapiens
aagctcccaacaagagctagagaaataagcaaacaagatgtaaattaatcatctgttggcaaaagaggaaagaaataggagctgagggtgtatgagagcaaaaatccaggtattttaaatagttggttaaaggaggtgaccacaaataagaaagggagtaaaatcaaatttaaaaaatatatgcaagctcacttcaagctcatgtatttgcaaaatcccaagaaatagcgagtagcacacaaaccagtcctgtggttcagcaatcaggaatgtggtgatcttgttggagc

SEQ ID NO: 343272 - DNA, 1533 bp, Homo sapiens
tggaactaaaaagtcgtatattattatcccacagattttagctatttcaccttgatggagtgatgaatgattcacattagaacagatgattcacagacttcacaaggcagaaattttagcgcctgtcaaatcagagaaatggtccaggataaaaagggaaagaggacacagttaggtcctgttaatgcaggggtttggctaatgcttactttcttctgtttgtttatgtgtctatccacactcttcaggtataagtctacctacctatcgatcgagcaggtatttgttaagcagtttctgagtgctagccctggagatatttgcatctgaggggtaaataaataacatccctctcttccttttcaggttcctgaaccaactgagaaagagagatgcttaagatcaaatgtgaaccttaatactaagaaggctaattgaaaaactgatttcagttctacaactaaatgggcttactaacacttctctggcaacagatagacatttccaccttgtcattgacatagatgggcagcaatactcacctctttggcagagggagaatcataccccacagtgaaataatgaatcggctattgcccatttctgtggcctgattgatgagggagagaaaagatcaataagaggctgagttgatcatgtttagtttcctctctgaaatccacaatttggtagaggtagacatagagacagattataaatgattgcttcctctcttgggtgataaagtggaaattatcttctctctgtaagaacataagaagtgggggaaaattgtccagggaaaagtcctggaagtgtgaattattgtaacaatgagtagtttgatgtccttggagcataggatgtggcctgggaagagacccatgcattaatatcattattaattccatgcattaatatcattattaattctatgcattaatgttattaattccatgaatgtggcaggtatttttttaacatttattgtaggctcagctgtctactgggtgttctgagaaaatacaaggaagctatagtaatgcagtgtatacatacattctttcctgcatattaggaacctatagtctaattggggatgtaagctttcacgcatgaaaagacaggtaaatgtagaagacaatttcttatgagtttcagtgagtcatgcagacagtactggaggagttcacaggtggaaggggatgcagggaatgagagttatggagaggaactaggagatcaggaaagtctttctgggggagtgaagatttgactggactttaaaaaatggaacatgcatggaccatttgagggatggtgaagaaatcaccccaactggaataaatgtgttgggtagtgggagatgagtctaggaaggtggtttggagttatattttgaaggatcttgttgggtgaagtaaggatccatggacttgctctttgcaccccgactatgttccttcaccctttatcgcctcgatccgatgtctcttaacccgtccctacagctctacttcttcattctcccgg

SEQ ID NO: 343273 - DNA, 1987 bp, Homo sapiens
agtgggaggtgctgagccgcctgatttattccggtcccagaggagaaggcgccagaaccccgcggggtctgagcagcccagcgtgcccattccagcgcccgcgtccccgcagcatgccgcgcccccgcctgctggccgcgctgtgcggcgcgctgctctgcgcccccagcctcctcgtcgccctggatatctgttccaaaaacccctgccacaacggtggtttatgcgaggagatttcccaagaagtgcgaggagatgtcttcccctcgtacacctgcacgtgccttaagggctacgcgggcaaccactgtgagacgaaatgtgtcgagccactgggcatggagaatgggaacattgccaactcacagatcgccgcctcatctgtgcgtgtgaccttcttgggtttgcagcattgggtcccggagctggcccgcctgaaccgcgcaggcatggtcaatgcctggacacccagcagcaatgacgataacccctggatccaggtgaacctgctgcggaggatgtgggtaacaggtgtggtgacgcagggtgccagccgcttggccagtcatgagtacctgaaggccttcaaggtggcctacagccttaatggacacgaattcgatttcatccatgatgttaataaaaaacacaaggagtttgtgggtaactggaacaaaaacgcggtgcatgtcaacctgtttgagacccctgtggaggctcagtacgtgagattgtaccccacgagctgccacacggcctgcactctgcgctttgagctactgggctgtgagctgaacggatgcgccaatcccctgggcctgaagaataacagcatccctgacaagcagatcacggcctccagcagctacaagacctggggcttgcatctcttcagctggaacccctcctatgcacggctggacaagcagggcaacttcaacgcctgggttgcggggagctacggtaacgatcagtggctgcaggtggacctgggctcctcgaaggaggtgacaggcatcatcacccagggggcccgtaactttggctctgtccagtttgtggcatcctacaaggttgcctacagtaatgacagtgcgaactggactgagtaccaggaccccaggactggcagcagtaagatcttccctggcaactgggacaaccactcccacaagaagaacttgtttgagacgcccatcctggctcgctatgtgcgcatcctgcctgtagcctggcacaaccgcatcgccctgcgcctggagctgctgggctgttagtggccacctgccacccccaggtcttcctgctttccatgggcccgctgcctcttggcttctcagcccctttaaatcaccatagggctggggactggggaaggggagggtgttcagaggcagcaccaccacacagtcacccctccctccctctttcccaccctccacctctcacgggccctgccccagcccctaagccccgtcccctaacccccagtcctcactgtcctgttttcttaggcactgagggatctgagtaggtctgggatggacaggaaagggcaaagtagggcgtgtggtttccctgcccctgtccggaccgccgatcccaggtgcgtgtgtctctgtctctcctagcccctctctcacacatcacattcccatggtggcctcaagaaaggcccggaagcgccaggctggagataacagcctcttgcccgtcggccctgcgtcggccctggggtaccatgtggccacaactgctgtggccccctgtccccaagacacttccccttgtctccctggttgcctctcttgccccttgtcctgaagcccagcgacacagaagggggtggggcgggtctatggggagaaagggagcgaggtcagaggagggcatgggttggcagggtgggcgtttggggccctctatgctggcttttcaccccagaggacacaggcagcttccaaaatatatttatcttcttcacggg

SEQ ID NO: 343274 - DNA, 1831 bp, Homo sapiens
agtgggaggtgctgagccgcctgatttattccggtcccagaggagaaggcgccagaaccccgcggggtctgagcagcccagcgtgcccattccagcgcccgcgtccccgcagcatgccgcgcccccgcctgctggccgcgctgtgcggcgcgctgctctgcgcccccagcctcctcgtcgccctggatatctgttccaaaaacccctgccacaacggtggtttatgcgaggagatttcccaagaagtgcgaggagatgtcttcccctcgtacacctgcacgtgccttaagggctacgcgggcaaccactgtgagacgaaatgtgtcgagccactgggcatggagaatgggaacattgccaactcacagatcgccgcctcatctgtgcgtgtgaccttcttgggtttgcagcattgggtcccggagctggcccgcctgaaccgcgcaggcatggtcaatgcctggacacccagcagcaatgacgataacccctggatccaggtgaacctgctgcggaggatgtgggtaacaggtgtggtgacgcagggtgccagccgcttggccagtcatgagtacctgaaggccttcaaggtggcctacagccttaatggacacgaattcgatttcatccatgatgttaataaaaaacacaaggagtttgtgggtaactggaacaaaaacgcggtgcatgtcaacctgtttgagacccctgtggaggctcagtacgtgagattgtaccccacgagctgccacacggcctgcactctgcgctttgagctactgggctgtgagctgaacggatgcgccaatcccctgggcctgaagaataacagcatccctgacaagcagatcacggcctccagcagctacaagacctggggcttgcatctcttcagctggaacccctcctatgcacggctggacaagcagggcaacttcaacgcctgggttgcggggagctacggtaacgatcagtggctgcagatcttccctggcaactgggacaaccactcccacaagaagaacttgtttgagacgcccatcctggctcgctatgtgcgcatcctgcctgtagcctggcacaaccgcatcgccctgcgcctggagctgctgggctgttagtggccacctgccacccccaggtcttcctgctttccatgggcccgctgcctcttggcttctcagcccctttaaatcaccatagggctggggactggggaaggggagggtgttcagaggcagcaccaccacacagtcacccctccctccctctttcccaccctccacctctcacgggccctgccccagcccctaagccccgtcccctaacccccagtcctcactgtcctgttttcttaggcactgagggatctgagtaggtctgggatggacaggaaagggcaaagtagggcgtgtggtttccctgcccctgtccggaccgccgatcccaggtgcgtgtgtctctgtctctcctagcccctctctcacacatcacattcccatggtggcctcaagaaaggcccggaagcgccaggctggagataacagcctcttgcccgtcggccctgcgtcggccctggggtaccatgtggccacaactgctgtggccccctgtccccaagacacttccccttgtctccctggttgcctctcttgccccttgtcctgaagcccagcgacacagaagggggtggggcgggtctatggggagaaagggagcgaggtcagaggagggcatgggttggcagggtgggcgtttggggccctctatgctggcttttcaccccagaggacacaggcagcttccaaaatatatttatcttcttcacggg

SEQ ID NO: 343275 - DNA, 672 bp, Homo sapiens
  misc_feature (93)..(93): n is a, c, g, or t
  misc_feature (99)..(99): n is a, c, g, or t
  misc_feature (119)..(119): n is a, c, g, or t
tctatttccatctcatacacccttcacctcaatcatattcttttacagcctctcctttatactccctatcttctctacattttctctactccnaagccnctcctctttctttttctctnatcttctacttttaagggccctgccccagcccctaagccccgtcccctaacccccagtcctcactgtcctgttttcttaggcactgagggatctgagtaggtctgggatggacaggaaagggcaaagtagggcgtgtggtttccctgcccctgtccggaccgccgatcccaggtgcgtgtgtctctgtctctcctagcccctctctcacacatcacattcccatggtggcctcaagaaaggcccggaagcgccaggctggagataacagcctcttgcccgtcggccctgcgtcggccctggggtaccatgtggccacaactgctgtggccccctgtccccaagacacttccccttgtctccctggttgcctctcttgccccttgtcctgaagcccagcgacacagaagggggtggggcgggtctatggggagaaagggagcgaggtcagaggagggcatgggttggcagggtgggcgtttggggccctctatgctggcttttcaccccagaggacacaggcagcttccaaaatatatttatcttcttcacggg

SEQ ID NO: 343276 - DNA, 963 bp, Homo sapiens
ggagcctctctttgagggggaaggtggtggttccctggtgcatcaccatcaggagatgatggtaccatcagcaggcattgtcaacacaccctggaggcaaatgtcttgagtggtgagagtacaggtgggcagtgatataacttagctggctcccagtactcttgagtggtgagagtattggagggcagtgatataacttagctggctcccagagggcagggggctctccagtcccaccgtccactcctgcctccctcaattccccagagggatagacacttgtggagtgaggattcttccaggtgggagacacccccatcattctcttgggagttgtatctcttgcccatccccaactgttctatccatatgcaggtgcagatacaagtgcaaggcagcccggcacattcctgagtgtttggggcagggctgagtgaaacaaaggccagcttcccgggccagccctcacaggcctgtgtgacagcatccccagaacatttgagtgtgcgaaggccctctgggagacactaagtcagggggcttctggggaatggaaatagagatgttcctgtgccccaggagttgtctgatttctctaactgccagctgctggagggcagggatgttgtcctgttcatcactgggtcgtcactaggcaggccttcatcatctagctgggatgtgtagctggtagaggtgacgtcatagtgtgacattaggagtttgtatgtgacttgagcatgatgcttaatgtctttcagttttctcatctatagaatgggcttactaatttctacttcatttagtgtttttttttcttttttttttggtggcaggttaaatgactgaagtaagcactgaataaacaatgtggttgttattaaagtagatagtgactgtgccatgggacggatgggaggccgaggcgatgggggcagtgctgtgagtccagaagaggaagaa

SEQ ID NO: 343277 - DNA, 883 bp, Homo sapiens
ggagcctctctttgagggggaaggtggtggttccctggtgcatcaccatcaggagatgatggtaccatcagcaggcattgtcaacacaccctggaggcaaatgtcttgagtggtgagagtacaggtgggcagtgatataacttagctggctcccagtactcttgagtggtgagagtattggagggcagtgatataacttagctggctcccagagggcagggggctctccagtcccaccgtccactcctgcctccctcaattccccagagggatagacacttgtggagtgaggattcttccaggtgggagacacccccatcattctcttgggagttgtatctcttgcccatccccaactgttctatccatatgcaggtgcagatacaagtgcaaggcagcccggcacattcctgagtgtttggggcagggctgagtgaaacaaaggccagcttcccgggccagccctcacaggcctgtgtgacagcatccccagaacatttgagtgtgcgaaggccctctgggagacactaagtcagggggcttctggggaatggaaatagagatgttcctgtgccccaggagttgtctgatttctctaactgccagctgctggagggcagggatgttgtcctgttcatcactgggtcgtcactaggcaggccttcatcatctagctgggatgtgtagctggtagaggtgacgtcatagtgtgacattaggagtttgtatgtgacttgagcatgatgcttaatgtctttcagttttctcatctatagaatgggcttactaatttctacttcatttagtgtttttttttcttttttttttggtggcaggttaaatgactgaagtaagcactgaataaacaatgtggttgttatta

SEQ ID NO: 343278 - DNA, 460 bp, Homo sapiens
tgtgtgggtggggctgaggtctgggggtacctgggattccacaagggattcctctttgcagacatatggtgtctttggtaaattaattatttaattcgatggatgtttattaagatattgattaagcccctcctgggtgcttggctctagggaatgattccttgacctcatgtaatttgcattgtagcaaggaaggcagacttgaggcgaggagcagatgacagagagcagtaacagctctgaagaaaagctagaggctgatgagatgaccatgacttggggtgaggggagagagcaagacaaggactgctctgtcgggaaggcctttgactgggggcctgaatgatggagagccagccacatgaaaaacttaaaaacagcactgcaaaaagagcactgcaggcaaggaattggttaaatgactgaagtaagcactgaataaacaatgtggttgttatta

SEQ ID NO: 343279 - DNA, 704 bp, Homo sapiens
cgaaccccttccacctgggagattctaggactctagtatggataagtcttgtctggataactttgtcctggccatctccctgccaactccagttggctggacagttcattggatttttgcgctcccaattgtccgtgcctggtcacataagggaagggccggggagtcggtgcaatggacgcaggccgtaagtggggcccgggaggggacccagaggcttcgaggagcttggaagagggctgcctgctgatgggagtctcctgactccctccctcccgcggccttggccggctgctgtatcttccccggtcctcctccgcctcccaggaggcctccggaggccagctgggccccttgcaggctggacttgcggatgccccgtgccattcaccgtggagcgctgggagggagtcagggccaggactctttaggtggcccctccatcattttctcatagaaatgggattgactgaagcaaggtaggtaacagctgagccccagccctatgtcctgtgatctgcctgaccctcggggctagagcttccagagtgctccaagctcccaggaacttgggagctcctggccctccccggccaccatgaaagacagctggatcttcttagcccctttctactcttccctgtaccccccaactgcactccagcctgggtgacagagcgagactgtgtctcaaacaaacaaac

SEQ ID NO: 343280 - DNA, 2532 bp, Homo sapiens
  misc_feature (2054)..(2055): n is a, c, g, or t
  misc_feature (2057)..(2057): n is a, c, g, or t
agtgggaggtgctgagccgcctgatttattccggtcccagaggagaaggcgccagaaccccgcggggtctgagcagcccagcgtgcccattccagcgcccgcgtccccgcagcatgccgcgcccccgcctgctggccgcgctgtgcggcgcgctgctctgcgcccccagcctcctcgtcgccctggatatctgttccaaaaacccctgccacaacggtggtttatgcgaggagatttcccaagaagtgcgaggagatgtcttcccctcgtacacctgcacgtgccttaagggctacgcgggcaaccactgtgagacgaaatgtgtcgagccactgggcatggagaatgggaacattgccaactcacagatcgccgcctcatctgtgcgtgtgaccttcttgggtttgcagcattgggtcccggagctggcccgcctgaaccgcgcaggcatggtcaatgcctggacacccagcagcaatgacgataacccctggatccaggtgaacctgctgcggaggatgtgggtaacaggtgtggtgacgcagggtgccagccgcttggccagtcatgagtacctgaaggccttcaaggtggcctacagccttaatggacacgaattcgatttcatccatgatgttaataaaaaacacaaggagtttgtgggtaactggaacaaaaacgcggtgcatgtcaacctgtttgagacccctgtggaggctcagtacgtgagattgtaccccacgagctgccacacggcctgcactctgcgctttgagctactgggctgtgagctgaacggatgcgccaatcccctgggcctgaagaataacagcatccctgacaagcagatcacggcctccagcagctacaagacctggggcttgcatctcttcagctggaacccctcctatgcacggctggacaagcagggcaacttcaacgcctgggttgcggggagctacggtaacgatcagtggctgcaggtggacctgggctcctcgaaggaggtgacaggcatcatcacccagggggcccgtaactttggctctgtccagtttgtggcatcctacaaggttgcctacagtaatgacagtgcgaactggactgagtaccaggaccccaggactggcagcagtaagatcttccctggcaactgggacaaccactcccacaagaagaacttgtttgagacgcccatcctggctcgctatgtgcgcatcctgcctgtagcctggcacaaccgcatcgccctgcgcctggagctgctgggctgttagtggccacctgccacccccaggtcttcctgctttccatgggcccgctgcctcttggcttctcagcccctttaaatcaccatagggctggggactggggaaggggagggtgttcagaggcagcaccaccacacagtcacccctccctccctctttcccaccctccacctctcacgggccctgccccagcccctaagccccgtcccctaacccccagtcctcactgtcctgttttcttaggcactgagggatctgagtaggtctgggatggacaggaaagggcaaagtagggcgtgtggtttccctgcccctgtccggaccgccgatcccaggtgcgtgtgtctctgtctctcctagcccctctctcacacatcacattcccatggtggcctcaagaaaggcccggaagcgccaggctggagataacagcctcttgcccgtcggccctgcgtcggccctggggtaccatgtggccacaactgctgtggccccctgtccccaagacacttccccttgtctccctggttgcctctcttgccccttgtcctgaagcccagcgacacagaagggggtggggcgggtctatggggagaaagggagcgaggtcagaggagggcatgggttggcagggtgggcgtttggggccctctatgctggcttttcaccccagaggacacaggcagcttccaaaatatatttatcttcttcacggggaaaaaaaaaaaaaaagaaaaaaaaaaaaaaaaaaaaaaaaaaaaaaaaaaaaaaaaaaaaaaaagnngngggcggcgcgccgccccaaaacccccccccccgcccccccccccccccccccccccccttttttgtaaagggggccccccaaaggggcggcgcataataaaacagcgacgcggcgagcgcggggcgcgcgggttaaaaaacacgcgcgatcagtggaggagaacaacaggcgggaccacgggggggactccttcgggggagaaaagacacacccaactgcgcggggggggaggagaaccacaaggtggggagcacaaacacccacagggaggattattataacgggcctccgagggggaaaaatatattagaagtgttccgaggggtgtataatcagggtggtgtaaacacaaccgcgcgacattatatcggcgggcgagtaaaagaaaagattggggctcacccgcaggaatgatattgttgagcagaatctttattttccggggggtgctttgttgtttataaaacgggggtg

SEQ ID NO: 343281 - DNA, 1763 bp, Homo sapiens
agtgggaggtgctgagccgcctgatttattccggtcccagaggagaaggcgccagaaccccgcggggtctgagcagcccagcgtgcccattccagcgcccgcgtccccgcagcatgccgcgcccccgcctgctggccgcgctgtgcggcgcgctgctctgcgcccccagcctcctcgtcgccctggatatctgttccaaaaacccctgccacaacggtggtttatgcgaggagatttcccaagaagtgcgaggagatgtcttcccctcgtacacctgcacgtgccttaagggctacgcgggcaaccactgtgagacgaaatgtgtcgagccactgggcatggagaatgggaacattgccaactcacagatcgccgcctcatctgtgcgtgtgaccttcttgggtttgcagcattgggtcccggagctggcccgcctgaaccgcgcaggcatggtcaatgcctggacacccagcagcaatgacgataacccctggatccaggtgaacctgctgcggaggatgtgggtaacaggtgtggtgacgcagggtgccagccgcttggccagtcatgagtacctgaaggccttcaaggtggcctacagccttaatggacacgaattcgatttcatccatgatgttaataaaaaacacaaggagtttgtgggtaactggaacaaaaacgcggtgcatgtcaacctgtttgagacccctgtggaggctcagtacgtgagattgtaccccacgagctgccacacggcctgcactctgcgctttgagctactgggctgtgagctgaacggatgcgccaatcccctgggcctgaagaataacagcatccctgacaagcagatcacggcctccagcagctacaagacctggggcttgcatctcttcagctggaacccctcctatgcacggctggacaagcagggcaacttcaacgcctgggttgcggggagctacggtaacgatcagtggctgcaggtggacctgggctcctcgaaggaggtgacaggcatcatcacccagggggcccgtaactttggctctgtccagtttgtggcatcctacaaggttgcctacagtaatgacagtgcgaactggactgagtaccaggaccccaggactggcagcagtaagatcttccctggcaactgggacaaccactcccacaagaagaacttgtttgagacgcccatcctggctcgctatgtgcgcatcctgcctgtagcctggcacaaccgcatcgccctgcgcctggagctgctgggctgttagtggccacctgccagcactgagggatctgagtaggtctgggatggacaggaaagggcaaagtagggcgtgtggtttccctgcccctgtccggaccgccgatcccaggtgcgtgtgtctctgtctctcctagcccctctctcacacatcacattcccatggtggcctcaagaaaggcccggaagcgccaggctggagataacagcctcttgcccgtcggccctgcgtcggccctggggtaccatgtggccacaactgctgtggccccctgtccccaagacacttccccttgtctccctggttgcctctcttgccccttgtcctgaagcccagcgacacagaagggggtggggcgggtctatggggagaaagggagcgaggtcagaggagggcatgggttggcagggtgggcgtttggggccctctatgctggcttttcaccccagaggacacaggcagcttccaaaatatatttatcttcttcacggg

SEQ ID NO: 343282 - DNA, 1854 bp, Homo sapiens
agtgggaggtgctgagccgcctgatttattccggtcccagaggagaaggcgccagaaccccgcggggtctgagcagcccagcgtgcccattccagcgcccgcgtccccgcagcatgccgcgcccccgcctgctggccgcgctgtgcggcgcgctgctctgcgcccccagcctcctcgtcgccctggatatctgttccaaaaacccctgccacaacggtggtttatgcgaggagatttcccaagaagtgcgaggagatgtcttcccctcgtacacctgcacgtgccttaagggctacgcgggcaaccactgtgagacgaaatgtgtcgagccactgggcatggagaatgggaacattgccaactcacagatcgccgcctcatctgtgcgtgtgaccttcttgggtttgcagcattgggtcccggagctggcccgcctgaaccgcgcaggcatggtcaatgcctggacacccagcagcaatgacgataacccctggatccaggtgaacctgctgcggaggatgtgggtaacaggtgtggtgacgcagggtgccagccgcttggccagtcatgagtacctgaaggccttcaaggtggcctacagccttaatggacacgaattcgatttcatccatgatgttaataaaaaacacaaggagtttgtgggtaactggaacaaaaacgcggtgcatgtcaacctgtttgagacccctgtggaggctcagtacgtgagattgtaccccacgagctgccacacggcctgcactctgcgctttgagctactgggctgtgagctgaacggatgcgccaatcccctgggcctgaagaataacagcatccctgacaagcagatcacggcctccagcagctacaagacctggggcttgcatctcttcagctggaacccctcctatgcacggctggacaagcagggcaacttcaacgcctgggttgcggggagctacggtaacgatcagtggctgcaggtggacctgggctcctcgaaggaggtgacaggcatcatcacccagggggcccgtaactttggctctgtccagtttgtggcatcctacaaggttgcctacagtaatgacagtgcgaactggactgagtaccaggaccccaggactggcagcagtaagatcttccctggcaactgggacaaccactcccacaagaagaacttgtttgagacgcccatcctggctcgctatgtgcgcatcctgcctgtagcctggcacaaccgcatcgccctgcgcctggagctgctgggctgttagtggccacctgccacccccaggtcttcctgctttccatgggcccgctgcctcttggcttctcagcccctttaaatcaccatagggctggggactggggaaggggagggtgttcagaggcagcaccaccacacagtcacccctccctccctctttcccaccctccacctctcacgggccctgccccagcccctaagccccgtcccctaacccccagtcctcactgtcctgttttcttaggcactgagggatctgagtaggtctgggatggacaggaaagggcaaagtagggcgtgtggtttccctgcccctcctgcgtcggccctggggtaccatgtggccacaactgctgtggccccctgtccccaagacacttccccttgtctccctggttgcctctcttgccccttgtcctgaagcccagcgacacagaagggggtggggcgggtctatggggagaaagggagcgaggtcagaggagggcatgggttggcagggtgggcgtttggggccctctatgctggcttttcaccccagaggacacaggcagcttccaaaatatatttatcttcttcacggg

SEQ ID NO: 343283 - DNA, 1701 bp, Homo sapiens
agtgggaggtgctgagccgcctgatttattccggtcccagaggagaaggcgccagaaccccgcggggtctgagcagcccagcgtgcccattccagcgcccgcgtccccgcagcatgccgcgcccccgcctgctggccgcgctgtgcggcgcgctgctctgcgcccccagcctcctcgtcgccctggatatctgttccaaaaacccctgccacaacggtggtttatgcgaggagatttcccaagaagtgcgaggagatgtcttcccctcgtacacctgcacgtgccttaagggctacgcgggcaaccactgtgagacgaaatgtgtcgagccactgggcatggagaatgggaacattgccaactcacagatcgccgcctcatctgtgcgtgtgaccttcttgggtttgcagcattgggtcccggagctggcccgcctgaaccgcgcaggcatggtcaatgcctggacacccagcagcaatgacgataacccctggatccaggtgaacctgctgcggaggatgtgggtaacaggtgtggtgacgcagggtgccagccgcttggccagtcatgagtacctgaaggccttcaaggtggcctacagccttaatggacacgaattcgatttcatccatgatgttaataaaaaacacaaggagtttgtgggtaactggaacaaaaacgcggtgcatgtcaacctgtttgagacccctgtggaggctcagtacgtgagattgtaccccacgagctgccacacggcctgcactctgcgctttgagctactgggctgtgagctgaacggatgcgccaatcccctgggcctgaagaataacagcatccctgacaagcagatcacggcctccagcagctacaagacctggggcttgcatctcttcagctggaacccctcctatgcacggctggacaagcagggcaacttcaacgcctgggttgcggggagctacggtaacgatcagtggctgcaggtggacctgggctcctcgaaggaggtgacaggcatcatcacccagggggcccgtaactttggctctgtccagtttgtggcatcctacaaggttgcctacagtaatgacagtgcgaactggactgagtaccaggaccccaggactggcagcagtaagatcttccctggcaactgggacaaccactcccacaagaagaacttgtttgagacgcccatcctggctcgctatgtgcgcatcctgcctgtagcctggcacaaccgcatcgccctgcgcctggagctgctgggctgttagtggccacctgccacccccaggtcttcctgctttccatgggcccgctgcctcttggcttctcagcccctttaaatcaccatagggctggggactggggaaggggagggtgttcagaggcagcaccaccacacagtcacccctccctccctctttcccaccctccacctctcacgggccctgccccagcccctaagccccgtcccctgtccccaagacacttccccttgtctccctggttgcctctcttgccccttgtcctgaagcccagcgacacagaagggggtggggcgggtctatggggagaaagggagcgaggtcagaggagggcatgggttggcagggtgggcgtttggggccctctatgctggcttttcaccccagaggacacaggcagcttccaaaatatatttatcttcttcacggg

SEQ ID NO: 343284 - DNA, 1430 bp, Homo sapiens
agtgggaggtgctgagccgcctgatttattccggtcccagaggagaaggcgccagaaccccgcggggtctgagcagcccagcgtgcccattccagcgcccgcgtccccgcagcatgccgcgcccccgcctgctggccgcgctgtgcggcgcgctgctctgcgcccccagcctcctcgtcgccctggatatctgttccaaaaacccctgccacaacggtggtttatgcgaggagatttcccaagaagtgcgaggagatgtcttcccctcgtacacctgcacgtgccttaagggctacgcgggcaaccactgtgagacgaaatgtgtcgagccactgggcatggagaatgggaacattgccaactcacagatcgccgcctcatctgtgcgtgtgaccttcttgggtttgcagcattgggtcccggagctggcccgcctgaaccgcgcaggcatggtcaatgcctggacacccagcagcaatgacgataacccctggatccaggtgaacctgctgcggaggatgtgggtaacaggtgtggtgacgcagggtgccagccgcttggccagtcatgagtacctgaaggccttcaaggtggcctacagccttaatggacacgaattcgatttcatccatgatgttaataaaaaacacaaggagtttgtgggtaactggaacaaaaacgcggtgcatgtcaacctgtttgagacccctgtggaggctcagtacgtgagattgtaccccacgagctgccacacggcctgcactctgcgctttgagctactgggctgtgagctgaacggatgcgccaatcccctgggcctgaagaataacagcatccctgacaagcagatcacggcctccagcagctacaagacctggggcttgcatctcttcagctggaacccctcctatgcacggctggacaagcagggcaacttcaacgcctgggttgcggggagctacggtaacgatcagtggctgcaggtggacctgggctcctcgaaggaggtgacaggcatcatcacccagggggcccgtaactttggctctgtccagtttgtggcatcctacaaggttgcctacagtaatgacagtgcgaactggactgagtaccaggaccccaggactggcagcagtaagatcttccctggcaactgggacaaccactcccacaagaagaacttgtttgagacgcccatcctggctcgctatgtgcgcatcctgcctgtagcctggcacaaccgcatcgccctgcgcctggagctgctgggctgttagtggccacctgccacccccaggtcttcctgctttccatgggcccgctgcctcttggcttctcagcccctttaaatcaccatagggctggggactggggaaggggagggtgttcagaggcggcagcttccaaaatatatttatcttcttcacggg

SEQ ID NO: 343285 - DNA, 1761 bp, Homo sapiens
agtgggaggtgctgagccgcctgatttattccggtcccagaggagaaggcgccagaaccccgcggggtctgagcagcccagcgtgcccattccagcgcccgcgtccccgcagcatgccgcgcccccgcctgctggccgcgctgtgcggcgcgctgctctgcgcccccagcctcctcgtcgccctggatatctgttccaaaaacccctgccacaacggtggtttatgcgaggagatttcccaagaagtgcgaggagatgtcttcccctcgtacacctgcacgtgccttaagggctacgcgggcaaccactgtgagacgaaatgtgtcgagccactgggcatggagaatgggaacattgccaactcacagatcgccgcctcatctgtgcgtgtgaccttcttgggtttgcagcattgggtcccggagctggcccgcctgaaccgcgcaggcatggtcaatgcctggacacccagcagcaatgacgataacccctggatccaggtgaacctgctgcggaggatgtgggtaacaggtgtggtgacgcagggtgccagccgcttggccagtcatgagtacctgaaggccttcaaggtggcctacagccttaatggacacgaattcgatttcatccatgatgttaataaaaaacacaaggagtttgtgggtaactggaacaaaaacgcggtgcatgtcaacctgtttgagacccctgtggaggctcagtacgtgagattgtaccccacgagctgccacacggcctgcactctgcgctttgagctactgggctgtgagctgaacgcaagacctggggcttgcatctcttcagctggaacccctcctatgcacggctggacaagcagggcaacttcaacgcctgggttgcggggagctacggtaacgatcagtggctgcagatcttccctggcaactgggacaaccactcccacaagaagaacttgtttgagacgcccatcctggctcgctatgtgcgcatcctgcctgtagcctggcacaaccgcatcgccctgcgcctggagctgctgggctgttagtggccacctgccacccccaggtcttcctgctttccatgggcccgctgcctcttggcttctcagcccctttaaatcaccatagggctggggactggggaaggggagggtgttcagaggcagcaccaccacacagtcacccctccctccctctttcccaccctccacctctcacgggccctgccccagcccctaagccccgtcccctaacccccagtcctcactgtcctgttttcttaggcactgagggatctgagtaggtctgggatggacaggaaagggcaaagtagggcgtgtggtttccctgcccctgtccggaccgccgatcccaggtgcgtgtgtctctgtctctcctagcccctctctcacacatcacattcccatggtggcctcaagaaaggcccggaagcgccaggctggagataacagcctcttgcccgtcggccctgcgtcggccctggggtaccatgtggccacaactgctgtggccccctgtccccaagacacttccccttgtctccctggttgcctctcttgccccttgtcctgaagcccagcgacacagaagggggtggggcgggtctatggggagaaagggagcgaggtcagaggagggcatgggttggcagggtgggcgtttggggccctctatgctggcttttcaccccagaggacacaggcagcttccaaaatatatttatcttcttcacggg

SEQ ID NO: 343286 - DNA, 1008 bp, Homo sapiens
agtgggaggtgctgagccgcctgatttattccggtcccagaggagaaggcgccagaaccccgcggggtctgagcagcccagcgtgcccattccagcgcccgcgtccccgcagcatgccgcgcccccgcctgctggccgcgctgtgcggcgcgctgctctgcgcccccagcctcctcgtcgccctggatatctgttccaaaaacccctgccacaacggtggtttatgcgaggagatttcccaagaagtgcgaggagatgtcttcccctcgtacacctgcacgtgccttaagggctacgcgggcaaccactgtgagacgaaatgtgtcgagccactgggcatggagaatgggaacattgccaactcacagatcgccgcctcatctgtgcgtgtgaccttcttgggtttgcagcattgggtcccggagctggcccgcctgaaccgcgcaggcatggtcaatgcctggacacccagcagcaatgacgataacccctggatccaggtgaacctgctgcggaggatgtgggtaacaggtgtggtgacgcagggtgccagccgcttggccagtcatgagtacctgaaggccttcaaggtggcctacagccttaatggacacgaattcgatttcatccatgatgttaataaaaaacacaaggagtttgtgggtaactggaacaaaaacgcggtgcatgtcaacctgtttgagacccctgtggaggctcagtacgtgagattgtaccccacgagctgccacacggcctgcactctgcgctttgagctactgggctgtgagctgaacggatgcgccaatcccctgggcctgaagaataacagcatccctgacaagcagatcacggcctccagcagctacccccaggtcttcctgctttccatgggcccgctgcctcttggcttctcagcccctttaaatcaccatagggctggggactggggaaggggagggtgttcagaggcggcagcttccaaaatatatttatcttcttcacggg

SEQ ID NO: 343287 - DNA, 829 bp, Homo sapiens
agtgggaggtgctgagccgcctgatttattccggtcccagaggagaaggcgccagaaccccgcggggtctgagcagcccagcgtgcccattccagcgcccgcgtccccgcagcatgccgcgcccccgcctgctggccgcgctgtgcggcgcgctgctctgcgcccccagcctcctcgtcgccctggatatctgttccaaaaacccctgccacaacggtggtttatgcgaggagatttcccaagaagtgcgaggagatgtcttcccctcgtacacctgcacgtgccttaagggctacgcgggcaaccactgtgagacgaaatgtgtcgagccactgggcatggagaatgggaacattgccaactcacagatcgccgcctcatctgtgcgtgtgaccttcttgggtttgcagcattgggtcccggagctggcccgcctgaaccgcgcaggcatggtcaatgcctggacacccagcagcaatgacgataacccctggatccaggtgaacctgctgcggaggatgtgggtaacaggtgtggtgacgcagggtgccagccgcttggccagtcatgagtacctgaaggccttcaaggtggcctacagccttaatggacacgaattcgatttcatccatgatgttaataaaaaacacaaggagtttgtgggtaactggaacaaaaacgcggtgcatgtcaacctgtttgagacccctgtggaggctcagtacgtgagattgtaccccacgagctgccacacggcctgcactctgcgctttgagctactgggctgtgagctgaacggtaaattgcctcaagtaagcactgataacat

SEQ ID NO: 343288 - DNA, 1195 bp, Homo sapiens
  misc_feature (93)..(93): n is a, c, g, or t
  misc_feature (99)..(99): n is a, c, g, or t
  misc_feature (119)..(119): n is a, c, g, or t
  misc_feature (717)..(718): n is a, c, g, or t
  misc_feature (720)..(720): n is a, c, g, or t
tctatttccatctcatacacccttcacctcaatcatattcttttacagcctctcctttatactccctatcttctctacattttctctactccnaagccnctcctctttctttttctctnatcttctacttttaagggccctgccccagcccctaagccccgtcccctaacccccagtcctcactgtcctgttttcttaggcactgagggatctgagtaggtctgggatggacaggaaagggcaaagtagggcgtgtggtttccctgcccctgtccggaccgccgatcccaggtgcgtgtgtctctgtctctcctagcccctctctcacacatcacattcccatggtggcctcaagaaaggcccggaagcgccaggctggagataacagcctcttgcccgtcggccctgcgtcggccctggggtaccatgtggccacaactgctgtggccccctgtccccaagacacttccccttgtctccctggttgcctctcttgccccttgtcctgaagcccagcgacacagaagggggtggggcgggtctatggggagaaagggagcgaggtcagaggagggcatgggttggcagggtgggcgtttggggccctctatgctggcttttcaccccagaggacacaggcagcttccaaaatatatttatcttcttcacgggaaaaaaaaaaaaaaaaaaaaaaaaaaaaaaaaaaaaaaaaaaagnngngggcggcgcgccgccccaaaacccccccccccgcccccccccccccccccccccccccttttttgtaaagggggccccccaaaggggcggcgcataataaaacagcgacgcggcgagcgcggggcgcgcgggttaaaaaacacgcgcgatcagtggaggagaacaacaggcgggaccacgggggggactccttcgggggagaaaagacacacccaactgcgcggggggggaggagaaccacaaggtggggagcacaaacacccacagggaggattattataacgggcctccgagggggaaaaatatattagaagtgttccgaggggtgtataatcagggtggtgtaaacacaaccgcgcgacattatatcggcgggcgagtaaaagaaaagattggggctcacccgcaggaatgatattgttgagcagaatctttattttccggggggtgctttgttgtttataaaacgggggtg

SEQ ID NO: 343289 - DNA, 478 bp, Homo sapiens
ctgagacagagccttgctctgtcacccaggctggagtgcagtggcgccatctcggctcaccgcaacctccgcctcccaggttcaagcggttcttctgactcagcctccctagtagctgggattacaggcagccaccatcatgcccagctaattttttgtatttttagtagagacggggtttcaccatgttggtcaggctggtctcgaactcctgacctcaggtgatccacctgcctcaagtctctcccaaagtgttgggattataggcatgagacaccatgtccggccttatgcccattttatagccaaagaaactgaggctcacccaagtagtttttttcaaaactagaattcatgcctcagtgtgtctgcctcttttcaccttactggagatggtccaagcagagaaaatgtggttggtttcttctgtaggtggacctgggctcctcgaaggaggtgacaggcatcatcacccagg

SEQ ID NO: 343290 - DNA, 501 bp, Homo sapiens
catgaaaaacttaaaaacagcactgcaaaaagagcactgcaggcaaggaattggtaaatgcaaaggccctggggcatgttgaagggtggaaggaaggccagtggagctggagccaagagatggaggggcagcttggtgggtgaagagccccagggacccgcagtgtcatcacctaggagcttcttagaaatgcagactgaggccgggtgcggtggctcacgcctgtaatcccagcactttgggaggccgaggcgagcggatcacctgaggtcaggagatcaagaccagcttggccaacatggcgaagccccgtctctactaaaaaaatacaaaaattagccaggcgtggtggcaggtgcctgtaatcccagctactagggaggctgaggcaggataattgcctgaacccggtcagaaggtggaggttgcagtgagccgagatcatgccactgcactccagcctgggtgacagagcgagactgtgtctcaaacaaacaaaca

SEQ ID NO: 343291 - DNA, 479 bp, Homo sapiens
tcttaggcactgagggatctgagtaggtctgggatggacaggaaagggcaaagtagggcgtgtggtttccctgcccctgtccggaccgccgatcccaggtgcgtgtgtctctgtctctcctagcccctctctcacacatcacattcccatggtggcctcaagaaaggcccggaagcgccaggctggagataacagcctcttgcccgtcggccctgcgtcggccctggggtaccatgtggccacaactgctgtggccccctgtccccaagacacttccccttgtctccctggttgcctctcttgccccttgtcctgaagcccagcgacacagaagggggtggggcgggtctatggggagaaagggagcgaggtcagaggagggcatgggttggcagggtgggcgtttggggccctctatgctggcttttcaccccagaggacacaggcagcttccaaaatatatttatcttcttcacggg

SEQ ID NO: 343292 - DNA, 3837 bp, Homo sapiens
agtgggaggtgctgagccgcctgatttattccggtcccagaggagaaggcgccagaaccccgcggggtctgagcagcccagcgtgcccattccagcgcccgcgtccccgcagcatgccgcgcccccgcctgctggccgcgctgtgcggcgcgctgctctgcgcccccagcctcctcgtcgccctggatatctgttccaaaaacccctgccacaacggtggtttatgcgaggagatttcccaagaagtgcgaggagatgtcttcccctcgtacacctgcacgtgccttaagggctacgcgggcaaccactgtgagacgaaatgtgtcgagccactgggcatggagaatgggaacattgccaactcacagatcgccgcctcatctgtgcgtgtgaccttcttgggtttgcagcattgggtcccggagctggcccgcctgaaccgcgcaggcatggtcaatgcctggacacccagcagcaatgacgataacccctggatccaggtgaacctgctgcggaggatgtgggtaacaggtgtggtgacgcagggtgccagccgcttggccagtcatgagtacctgaaggccttcaaggtggcctacagccttaatggacacgaattcgatttcatccatgatgttaataaaaaacacaaggagtttgtgggtaactggaacaaaaacgcggtgcatgtcaacctgtttgagacccctgtggaggctcagtacgtgagattgtaccccacgagctgccacacggcctgcactctgcgctttgagctactgggctgtgagctgaacggatgcgccaatcccctgggcctgaagaataacagcatccctgacaagcagatcacggcctccagcagctacaagacctggggcttgcatctcttcagctggaacccctcctatgcacggctggacaagcagggcaacttcaacgcctgggttgcggggagctacggtaacgatcagtggctgcaggtggacctgggctcctcgaaggaggtgacaggcatcatcacccagggggcccgtaactttggctctgtccagtttgtggcatcctacaaggttgcctacagtaatgacagtgcgaactggactgagtaccaggaccccaggactggcagcagtaagatcttccctggcaactgggacaaccactcccacaagaagaacttgtttgagacgcccatcctggctcgctatgtgcgcatcctgcctgtagcctggcacaaccgcatcgccctgcgcctggagctgctgggctgttagtggccacctgccacccccaggtcttcctgctttccatgggcccgctgcctcttggcttctcagcccctttaaatcaccatagggctggggactggggaaggggagggtgttcagaggcagcaccaccacacagtcacccctccctccctctttcccaccctccacctctcacgggccctgccccagcccctaagccccgtcccctaacccccagtcctcactgtcctgttttcttaggcactgagggatctgagtaggtctgggatggacaggaaagggcaaagtagggcgtgtggtttccctgcccctgtccggaccgccgatcccaggtgcgtgtgtctctgtctctcctagcccctctctcacacatcacattcccatggtggcctcaagaaaggcccggaagcgccaggctggagataacagcctcttgcccgtcggccctgcgtcggccctggggtaccatgtggccacaactgctgtggccccctgtccccaagacacttccccttgtctccctggttgcctctcttgccccttgtcctgaagcccagcgacacagaagggggtggggcgggtctatggggagaaagggagcgaggtcagaggagggcatgggttggcagggtgggcgtttggggccctctatgctggcttttcaccccagaggacacaggcagcttccaaaatatatttatcttcttcacggggaaaaaaaaaaaaaaagaaaaaaaaaaaaaaaaaaaaaaaaaaaaggggggggggcgcgcgcgcaagaagaaccactccccgagaggggcgcccaccctaatgacgcacgcaccacacggagatctgatcgagggacaaaaggggggccaccaaaagaggagcggctgcagatattaatacactaggacagcggagcagggacgcgcagtttatcaagaacacgcactgcaccgcgcattgagagcgaggcaaaacacgcgcgcggcgacacccacgcgcggagaccacctgcgtggagagagagaagagagacacccctgatcctcgggcggggggggagggggagccacccacacgagggggggcgaacaagcaaagcccaagaaggagaacagatagatattatagaccgcccccacagagacggggcgggccaccaaaccatcaaacagacgaccatcttctcgcgaagaggcgaggcgaggaccaagcgcagcgggcgggcgcggcccagacaccacagccacacgagccgcccgagccaaaatccaccatgccccgcggcgccgcatcacccccgaccagcatgcagacagaaaataccaattctagccgctcgacgcgcccacacaacgcagcaagcgaacccgcacccacaagtcgagacctaatcactgccaacacaaccaacacacaaatacttctgatgttacatacgcacaccacgacgggggggggagggaccaacagaagagagtggcacatataactaacaaacccccaagcgcgccagacactcaccaacgacatacgatgaggatgacagcgaccgcaagacacacaggagcgacacgcggaacgaacaagccacctgaccaccaacactgcatgaacagtgctaacactcagagcgacatcacacgcagtcacaccagcaacagagccaacacacacccagcaaccagacaagcaggaaccaccacagcgacaaccacacgcatagccacgtcgagatcgaaccaacgagccgctgactcacccaccacctcgcctgacgacagatccagacgaacgacacaacgcgatgagcgcacgaacacagacgcaacccagacgcaccgaagagcgaatactgacacagccagagaatcacacgacctccacaagccggacgcgaggcgactaagccacacacgaacgacaaccgtaaaccagcgaccgccgccgccgaccgatacacaccgaacctgcgacacacgaaagataacacgtcaccacgcgcaacgagcacagacggctcgcaacacaacgagacagcgcgacagccgacggcgcaacagcgcccgcgacacaggcccgcacgacgcgaccgacgccacacgccagcgcagcccgagcacgcggaccgtccacgctccacacaccacaccaccggccccgcgcacccagcagtacaccacgacgaggccagccgcagccacacaccaccgctcgattcgcctcgcgccactcggacagcgtacgggatgtacctcctcgcaccacccgccaccgacgcgcccgcaacccgcgccacaaccacacaccacccgcacccgcgagacagagtgcccccaacacacgcgcacgtgcacgccaactgcgcgacgtaggcgggaggggccccggcactgcggcgcgccggcagcgcgcaggaccgcgagggcacgcctgcacggcgcagaaggaggcgaaggcatgacaccagcgacgcggccgaccggggcggccaagagagcgtcgggggcgagggcagcgaggtcgacgacgagacggcggggtcagacgaggtccgaggcgcgaagcacgc

SEQ ID NO: 343293 - DNA, 2510 bp, Homo sapiens
  misc_feature (2032)..(2033): n is a, c, g, or t
  misc_feature (2035)..(2035): n is a, c, g, or t
agtgggaggtgctgagccgcctgatttattccggtcccagaggagaaggcgccagaaccccgcggggtctgagcagcccagcgtgcccattccagcgcccgcgtccccgcagcatgccgcgcccccgcctgctggccgcgctgtgcggcgcgctgctctgcgcccccagcctcctcgtcgccctggatatctgttccaaaaacccctgccacaacggtggtttatgcgaggagatttcccaagaagtgcgaggagatgtcttcccctcgtacacctgcacgtgccttaagggctacgcgggcaaccactgtgagacgaaatgtgtcgagccactgggcatggagaatgggaacattgccaactcacagatcgccgcctcatctgtgcgtgtgaccttcttgggtttgcagcattgggtcccggagctggcccgcctgaaccgcgcaggcatggtcaatgcctggacacccagcagcaatgacgataacccctggatccaggtgaacctgctgcggaggatgtgggtaacaggtgtggtgacgcagggtgccagccgcttggccagtcatgagtacctgaaggccttcaaggtggcctacagccttaatggacacgaattcgatttcatccatgatgttaataaaaaacacaaggagtttgtgggtaactggaacaaaaacgcggtgcatgtcaacctgtttgagacccctgtggaggctcagtacgtgagattgtaccccacgagctgccacacggcctgcactctgcgctttgagctactgggctgtgagctgaacggatgcgccaatcccctgggcctgaagaataacagcatccctgacaagcagatcacggcctccagcagctacaagacctggggcttgcatctcttcagctggaacccctcctatgcacggctggacaagcagggcaacttcaacgcctgggttgcggggagctacggtaacgatcagtggctgcaggtggacctgggctcctcgaaggaggtgacaggcatcatcacccagggggcccgtaactttggctctgtccagtttgtggcatcctacaaggttgcctacagtaatgacagtgcgaactggactgagtaccaggaccccaggactggcagcagtaagatcttccctggcaactgggacaaccactcccacaagaagaacttgtttgagacgcccatcctggctcgctatgtgcgcatcctgcctgtagcctggcacaaccgcatcgccctgcgcctggagctgctgggctgttagtggccacctgccacccccaggtcttcctgctttccatgggcccgctgcctcttggcttctcagcccctttaaatcaccatagggctggggactggggaaggggagggtgttcagaggcagcaccaccacacagtcacccctccctccctctttcccaccctccacctctcacgggccctgccccagcccctaagccccgtcccctaacccccagtcctcactgtcctgttttcttaggcactgagggatctgagtaggtctgggatggacaggaaagggcaaagtagggcgtgtggtttccctgcccctgtccggaccgccgatcccaggtgcgtgtgtctctgtctctcctagcccctctctcacacatcacattcccatggtggcctcaagaaaggcccggaagcgccaggctggagataacagcctcttgcccgtcggccctgcgtcggccctggggtaccatgtggccacaactgctgtggccccctgtccccaagacacttccccttgtctccctggttgcctctcttgccccttgtcctgaagcccagcgacacagaagggggtggggcgggtctatggggagaaagggagcgaggtcagaggagggcatgggttggcagggtgggcgtttggggccctctatgctggcttttcaccccagaggacacaggcagcttccaaaatatatttatcttcttcacgggaaaaaaaaaaaaaaaaaaaaaaaaaaaaaaaaaaaaaaaaaaagnngngggcggcgcgccgccccaaaacccccccccccgcccccccccccccccccccccccccttttttgtaaagggggccccccaaaggggcggcgcataataaaacagcgacgcggcgagcgcggggcgcgcgggttaaaaaacacgcgcgatcagtggaggagaacaacaggcgggaccacgggggggactccttcgggggagaaaagacacacccaactgcgcggggggggaggagaaccacaaggtggggagcacaaacacccacagggaggattattataacgggcctccgagggggaaaaatatattagaagtgttccgaggggtgtataatcagggtggtgtaaacacaaccgcgcgacattatatcggcgggcgagtaaaagaaaagattggggctcacccgcaggaatgatattgttgagcagaatctttattttccggggggtgctttgttgtttataaaacgggggtg

SEQ ID NO: 343294 - DNA, 1882 bp, Homo sapiens
agtgggaggtgctgagccgcctgatttattccggtcccagaggagaaggcgccagaaccccgcggggtctgagcagcccagcgtgcccattccagcgcccgcgtccccgcagcatgccgcgcccccgcctgctggccgcgctgtgcggcgcgctgctctgcgcccccagcctcctcgtcgccctggatatctgttccaaaaacccctgccacaacggtggtttatgcgaggagatttcccaagaagtgcgaggagatgtcttcccctcgtacacctgcacgtgccttaagggctacgcgggcaaccactgtgagacgaaatgtgtcgagccactgggcatggagaatgggaacattgccaactcacagatcgccgcctcatctgtgcgtgtgaccttcttgggtttgcagcattgggtcccggagctggcccgcctgaaccgcgcaggcatggtcaatgcctggacacccagcagcaatgacgataacccctggatccaggtgaacctgctgcggaggatgtgggtaacaggtgtggtgacgcagggtgccagccgcttggccagtcatgagtacctgaaggccttcaaggtggcctacagccttaatggacacgaattcgatttcatccatgatgttaataaaaaacacaaggagtttgtgggtaactggaacaaaaacgcggtgcatgtcaacctgtttgagacccctgtggaggctcagtacgtgagattgtaccccacgagctgccacacggcctgcactctgcgctttgagctactgggctgtgagctgaacggatgcgccaatcccctgggcctgaagaataacagcatccctgacaagcagatcacggcctccagcagctacaagacctggggcttgcatctcttcagctggaacccctcctatgcacggctggacaagcagggcaacttcaacgcctgggttgcggggagctacggtaacgatcagtggctgcaggtggacctgggctcctcgaaggaggtgacaggcatcatcacccagggggcccgtaactttggctctgtccagtttgtggcatcctacaaggttgcctacagtaatgacagtgcgaactggactgagtaccaggaccccaggactggcagcagtaagatcttccctggcaactgggacaaccactcccacaagaagaacttgtttgagacgcccatcctggctcgctatgtgcgcatcctgcctgtagcctggcacaaccgcatcgccctgcgcctggagctgctgggctgttagtggccacctgccacccccaggtcttcctgctttccatgggcccgctgcctcttggcttctcagcccctttaaatcaccatagggctggggactggggaaggggagggtgttcagaggcagcaccaccacacagtcacccctccctccctctttcccaccctccacctctcacgggccctgccccagcccctaagccccgtccccgtccggaccgccgatcccaggtgcgtgtgtctctgtctctcctagcccctctctcacacatcacattcccatggtggcctcaagaaaggcccggaagcgccaggctggagataacagcctcttgcccgtcggccctgcgtcggccctggggtaccatgtggccacaactgctgtggccccctgtccccaagacacttccccttgtctccctggttgcctctcttgccccttgtcctgaagcccagcgacacagaagggggtggggcgggtctatggggagaaagggagcgaggtcagaggagggcatgggttggcagggtgggcgtttggggccctctatgctggcttttcaccccagaggacacaggcagcttccaaaatatatttatcttcttcacggg

SEQ ID NO: 343295 - DNA, 1479 bp, Homo sapiens
agtgggaggtgctgagccgcctgatttattccggtcccagaggagaaggcgccagaaccccgcggggtctgagcagcccagcgtgcccattccagcgcccgcgtccccgcagcatgccgcgcccccgcctgctggccgcgctgtgcggcgcgctgctctgcgcccccagcctcctcgtcgccctggatatctgttccaaaaacccctgccacaacggtggtttatgcgaggagatttcccaagaagtgcgaggagatgtcttcccctcgtacacctgcacgtgccttaagggctacgcgggcaaccactgtgagacgaaatgtgtcgagccactgggcatggagaatgggaacattgccaactcacagatcgccgcctcatctgtgcgtgtgaccttcttgggtttgcagcattgggtcccggagctggcccgcctgaaccgcgcaggcatggtcaatgcctggacacccagcagcaatgacgataacccctggatccaggtgaacctgctgcggaggatgtgggtaacaggtgtggtgacgcagggtgccagccgcttggccagtcatgagtacctgaaggccttcaaggtggcctacagccttaatggacacgaattcgatttcatccatgatgttaataaaaaacacaaggagtttgtgggtaactggaacaaaaacgcggtgcatgtcaacctgtttgagacccctgtggaggctcagtacgtgagattgtaccccacgagctgccacacggcctgcactctgcgctttgagctactgggctgtgagctgaacggatgcgccaatcccctgggcctgaagaataacagcatccctgacaagcagatcacggcctccagcagctacaagacctggggcttgcatctcttcagctggaacccctcctatgcacggctggacaagcagggcaacttcaacgcctgggttgcggggagctacggtaacgatcagtggctgcaggtggacctgggctcctcgaaggaggtgacaggcatcatcacccagggggcccgtaactttggctctgtccagtttgtggcatcctacaaggttgcctacagtaatgacagtgcgaactggactgagtaccaggaccccaggactggcagcagtaagatcttccctggcaactgggacaaccactcccacaagaagaacttgtttgagacgcccatcctggctcgctatgtgcgcatcctgcctgtagcctggcacaaccgcatcgccctgcgcctggagctgctgggctgttagtggccacctgccacccccaggtcttcctgctttccatgggcccgctgcctcttggcttctcagcccctttaaatcaccatagggctggggactggggaaggggagggtgttcagaggcggtgggcgtttggggccctctatgctggcttttcaccccagaggacacaggcagcttccaaaatatatttatcttcttcacggg

SEQ ID NO: 343296 - DNA, 1855 bp, Homo sapiens
agtgggaggtgctgagccgcctgatttattccggtcccagaggagaaggcgccagaaccccgcggggtctgagcagcccagcgtgcccattccagcgcccgcgtccccgcagcatgccgcgcccccgcctgctggccgcgctgtgcggcgcgctgctctgcgcccccagcctcctcgtcgccctggaatgtgtcgagccactgggcatggagaatgggaacattgccaactcacagatcgccgcctcatctgtgcgtgtgaccttcttgggtttgcagcattgggtcccggagctggcccgcctgaaccgcgcaggcatggtcaatgcctggacacccagcagcaatgacgataacccctggatccaggtgaacctgctgcggaggatgtgggtaacaggtgtggtgacgcagggtgccagccgcttggccagtcatgagtacctgaaggccttcaaggtggcctacagccttaatggacacgaattcgatttcatccatgatgttaataaaaaacacaaggagtttgtgggtaactggaacaaaaacgcggtgcatgtcaacctgtttgagacccctgtggaggctcagtacgtgagattgtaccccacgagctgccacacggcctgcactctgcgctttgagctactgggctgtgagctgaacggatgcgccaatcccctgggcctgaagaataacagcatccctgacaagcagatcacggcctccagcagctacaagacctggggcttgcatctcttcagctggaacccctcctatgcacggctggacaagcagggcaacttcaacgcctgggttgcggggagctacggtaacgatcagtggctgcaggtggacctgggctcctcgaaggaggtgacaggcatcatcacccagggggcccgtaactttggctctgtccagtttgtggcatcctacaaggttgcctacagtaatgacagtgcgaactggactgagtaccaggaccccaggactggcagcagtaagatcttccctggcaactgggacaaccactcccacaagaagaacttgtttgagacgcccatcctggctcgctatgtgcgcatcctgcctgtagcctggcacaaccgcatcgccctgcgcctggagctgctgggctgttagtggccacctgccacccccaggtcttcctgctttccatgggcccgctgcctcttggcttctcagcccctttaaatcaccatagggctggggactggggaaggggagggtgttcagaggcagcaccaccacacagtcacccctccctccctctttcccaccctccacctctcacgggccctgccccagcccctaagccccgtcccctaacccccagtcctcactgtcctgttttcttaggcactgagggatctgagtaggtctgggatggacaggaaagggcaaagtagggcgtgtggtttccctgcccctgtccggaccgccgatcccaggtgcgtgtgtctctgtctctcctagcccctctctcacacatcacattcccatggtggcctcaagaaaggcccggaagcgccaggctggagataacagcctcttgcccgtcggccctgcgtcggccctggggtaccatgtggccacaactgctgtggccccctgtccccaagacacttccccttgtctccctggttgcctctcttgccccttgtcctgaagcccagcgacacagaagggggtggggcgggtctatggggagaaagggagcgaggtcagaggagggcatgggttggcagggtgggcgtttggggccctctatgctggcttttcaccccagaggacacaggcagcttccaaaatatatttatcttcttcacggg

SEQ ID NO: 343297 - DNA, 1151 bp, Homo sapiens
tttttcccgtgaagaagataaatatattttggaagctgcctgtgtcctctggggtgaaaagccagcatagcgagccaggatacaggcaggatgcgcacatagcgagcctgggttgcggggagctacggtaacgatcagtggctgcaggtggacctgggctcctcgaaggaggtgacaggcatcatcacccagggggcccgtaactttggctctgtccagtttgtggcatcctacaaggttgcctacagtaatgacagtgcgaactggactgagtaccaggaccccaggactggcagcagtaagatcttccctggcaactgggacaaccactcccacaagaagaacttgtttgagacgcccatcctggctcgctatgtgcgcatcctgcctgtagcctggcacaaccgcatcgccctgcgcctggagctgctgggctgttagtggccacctgccacccccaggtcttcctgctttccatgggcccgctgcctcttggcttctcagcccctttaaatcaccatagggctggggactggggaaggggagggtgttcagaggcagcaccaccacacagtcacccctccctccctctttcccaccctccacctctcacgggccctgccccagcccctaagccccgtcccctaacccccagtcctcactgtcctgttttcttaggcactgagggatctgagtaggtctgggatggacaggaaagggcaaagtagggcgtgtggtttccctgcccctgtccggaccgccgatcccaggtgcgtgtgtctctgtctctcctagcccctctctcacacatcacattcccatggtggcctcaagaaaggcccggaagcgccaggctggagataacagcctcttgcccgtcggccctgcgtcggccctggggtaccatgtggccacaactgctgtggccccctgtccccaagacacttccccttgtctccctggttgcctctcttgccccttgtcctgaagcccagcgacacagaagggggtggggcgggtctatggggagaaagggagcgaggtcagaggagggcatgggttggcagggtgggcgtttggggccctctatgctggcttttcaccccagaggacacaggcagcttccaaaatatatttatcttcttcacggg

SEQ ID NO: 343298 - DNA, 851 bp, Homo sapiens
agtgggaggtgctgagccgcctgatttattccggtcccagaggagaaggcgccagaaccccgcggggtctgagcagcccagcgtgcccattccagcgcccgcgtccccgcagcatgccgcgcccccgcctgctggccgcgctgtgcggcgcgctgctctgcgcccccagcctcctcgtcgccctggatatctgttccaaaaacccctgccacaacggtggtttatgcgaggagatttcccaagaagtgcgaggagatgtcttcccctcgtacacctgcacgtgccttaagggctacgcgggcaaccactgtgagacgaaatgtgtcgagccactgggcatggagaatgggaacattgccaactcacagatcgccgcctcatctgtgcgtgtgaccttcttgggtttgcagcattgggtcccggagctggcccgcctgaaccgcgcaggcatggtcaatgcctggacacccagcagcaatgacgataacccctggatccaggtgaacctgctgcggaggatgtgggtaacaggtgtggtgacgcagggtgccagccgcttggccagtcatgagtacctgaaggccttcaaggtggcctacagccttaatggacacgaattcgatttcatccatgatgttaataaaaaacacaaggagtttgtgggtaactggaacaaaaacgcggtgcatgtcaacctgtttgagacccctgtggaggctcagtacgtgagattgtaccccacgagctgccacacggcctgcactctgcgctttgagctactgggctgtgagctgaacgatgcgcccatccctgggcccgaaggtctaccctccagggatcctctagatccg

SEQ ID NO: 343299 - DNA, 505 bp, Homo sapiens
agtgggaggtgctgagccgcctgatttattccggtcccagaggagaaggcgccagaaccccgcggggtctgagcagcccagcgtgcccattccagcgcccgcgtccccgcagcatgccgcgcccccgcctgctggccgcgctgtgcggcgcgctgctctgcgcccccagcctcctcgtcgccctggtgggatttctgcatttcagccagagggacctgtctgcagctaccagatgctccccaccctgggagagctcagcggcatgtctgcacatgggccttttcagccttcttcatcccgcaattggaactgactttcccactcccatctcacacttgagaatctctgtttcttgtttcttgttttttattttatttttattttttctcccccctggtggacaatggtgaggagggtgaaggaaggttaaaagccactgctctacgggatgaaaaactaaacttgtcattcttcagatccctcccagtctggccccagcctaccc

SEQ ID NO: 343300 - DNA, 371 bp, Homo sapiens
taaccaagagccctgctaataggctatgtccacaaacataggccacaatgcaataattatcatatcaactccaggaatttactgatacttgggtttaaccctcaaatcaccagaaagccatagggttatactgaattttaaccgtgaaactggtagaattcagaataaaaacgaattcttccctcaatgtgacatgatacctaaaggtaccctgggtagggcgtggtggctcatgcctgtaatcccagcactttgggaggccgaggtgggtggatcacctgaggtcgggagttcaagaccagcctgaccaacacagagaaaccccatctctgctaaaaatacaaaaaaaaaattagccgggcatgctggtg

SEQ ID NO: 343301 - DNA, 638 bp, Homo sapiens
aatctccctggggtgccctccccaggcagcaatgccaggatgcctgtgtccacctccctccaccaggatggcagccaggagcggccggtgagcctgacctctaccacctcctcgtcgggctcctcctgtgacagtcgcagtgccatggaggagcccagcagctccgaggctcccgccaagaatggggcaggctccctgagaagccggcatctgcccaacagcaacaacaactccagcagctggttgaacgtgaaggggcccctctccccgttcaacagccgggcagcggcagggcctgcacaccacaagctcagctacctgggccgagtggtgcgggagatcgtggagacagagcgcatgtacgtacaggacctgcgcagcatcgtggaggactacctcttgaagatcattgacacacccgggctgctgaagccagaacaggtcagcgccctctttgggaacatagaaaatatctacgcgctgaacagagccaagagtttgatatctacactcagtattgcaacaattaccccaactccgtggccgccctgacggaatgcatgcgggacaagcagcaggccaagttctttcgggaccggcaggagctgctacagcactcgctgcccttgggctcctac

SEQ ID NO: 343302 - DNA, 2156 bp, Homo sapiens
ggaagcaccgccgggagccccctccaggcctctggacagggggagcagccgcctggaccgaagctacagctatagctacagcaatggcccaggcccattctacaataaagggctcatctctgaagaggagctcggggccagtgtggcttccctgagcagtgagaacccatatgccaccatccgggacctgcccagcttgccagggggcccccgggagagcagctacatggagatgaaaggccctccctcaggatctccccccaggcagcctcctcagttctgggacagccagaggcggcggcaaccccagccacagagagacagtggcacctacgagcagcccagccccctgatccatgaccgagactctgtgggctcccagccccctctgcctccgggcctaccccccggccactatgactcacccaagaacagccacatccctggacattatgacttgcctccagtacggcatcccccatcacctccacttcgacgccaggaccgttgaggagccaggatggtatggcagaggccagcacacctggctgttgctgctcaaggctggggacagagcctagtgtacccctgccaggagcagggagtggaccggcaggctgtgaacatgaacaacacttaacagagcaagtgatgggagccttgttcctgggttctaccatgggagacgctgatcagcaggatgcctggctccctttcccaacccactgctcccaaggcctccagggccctgtgtacataaactggtgggttggaagttgctgggtaactctgatttcagacatgcgtgtggggtaccttttctgtgcatgctcagcctgggctctgtgcgtgtgtgtgtttctgtgattttagaagggtaccaggcacaggttctgtcctagggcacttaccatttagtagggagatggaaccaacccaattaactctagcaatagcctcctaactggcctcctccattgattcagtgaaccttccaatgcatggctcataatttcaaaatacaggctggttagttactccctacctgaaagccttcataggtgcctctttgctcttctgccagtatcaaaacttttgaaggccttaaaggccctgctttgcctggcccatctgtctctccagcctcaccttgaactgtgttcctgtcactgcacgccagtcacaccggcctctaggtcctcctgtaggccactcttctttctggcacagggacctgcacacctggagtgcccttcctcccccactcgcctgttcacccctgcttttcctttacacctcctcctcagggaagtgcccaccctccgtacatctttcacagccctgattgcagctgtgttcactcaccaggtacctgcagaaggcctacagggtgccaggcacttctttaatgtgttctttctttatgtgattatttgattaatctctgcctcccccactagactgtaagctccctgaaggcaagaatcctgtgcttatgctcaatattagctctcccttggcacagagtaggcactcaacaaatgctccccaaaaggctgagtggctgactgaattaagtaccagtgacatgcagtaactgctaagatagatgagccatctgtatgctctgacagttacagactgaataagttggagacttccctaaagggtggcatttccccagggtaacaacgcagagctcaggtgtgggaaggtgccaggggcaggggtgcagaggggctgaggctgaggggggtgcagaggctggagaaaggataacaggagagagtatacaggcatgccttgatttattgcacttcacaggtagcagaatttttaaagaaattgaaggttttgggacatatatgtgacagcaataggttaagaaaagcaaagcagagaaattgaagatttgtgtcaacactgctttaagcaaatctgttggcaccatttttccaatagcatgtgcccattttgggtctctacattgcattttggtaattgcttgcaatatttcaagcattttcattgttattatatgtgttatagtgatctgtgatcagtgatctttgatatattattgtaattgtttcggggcgccatgaaccgcacccatataacacggtaaacttaatcagcaaacgttgtgtgtgttc

SEQ ID NO: 343303 - DNA, 1305 bp, Homo sapiens
ggaagcaccgccgggagccccctccaggcctctggacagggggagcagccgcctggaccgaagctacagctatagctacagcaatggcccaggcccattctacaataaagggctcatctctgaagaggagctcggggccagtgtggcttccctgagcagtgagaacccatatgccaccatccgggacctgcccagcttgccagggggcccccgggagagcagctacatggagatgaaaggccctccctcaggatctccccccaggcagcctcctcagttctgggacagccagaggcggcggcaaccccagccacagagagacagtggcacctacgagcagcccagccccctgatccatgaccgagactctgtgggctcccagccccctctgcctccgggcctaccccccggccactatgactcacccaagaacagccacatccctggacattatgacttgcctccagtacggcatcccccatcacctccacttcgacgccaggaccgttgaggagccaggatggtatggcagaggccagcacacctggctgttgctgctcaaggctggggacagagcctagtgtacccctgccaggagcagggagtggaccggcaggctgtgaacatgaacaacacttaacagagcaagtgatgggagccttgttcctgggttctaccatgggagacgctgatcagcaggatgcctggctccctttcccaacccactgctcccaaggcctccagggccctgtgtacataaactggtgggttggaagttgctgggtaactctgatttcagacatgcgtgtggggtaccttttctgtgcatgctcagcctgggctctgtgcgtgtgtgtgtttctgtgattttagaagggtaccaggcacaggttctgtcctagggcacttaccatttagtagggagatggaaccaacccaattaactctagcaatagcctcctaactggcctcctccattgattcagtgaaccttccaatgcatggctcataatttcaaaatacaggctggttagttactccctacctgaaagccttcataggtgcctctttgctcttctgccagtatcaaaacttttgaaggccttaaaggccctgctttgcctggcccatctgtctctccagcctcaccttgaactgtgttcctgtcactgcacgccagtcacaccggcctctaggtcctcctgtaggccactcttctttctgcgctcagagtcaaatggtctcctcgagtgctcttgcaatccccactaggctttattctatactcaacaatcagaaagaaat

SEQ ID NO: 343304 - DNA, 143 bp, Homo sapiens
aatcccagcactttgggaggctgagatgggaggatctcttgagtccaggagttcaagatcagtccacagcctgggcaacatgataagatccctgtctctacaaaagaaagaaagaaaaaagaaagttaaaaaacttatctggg

SEQ ID NO: 343305 - DNA, 608 bp, Homo sapiens
agaccatccttgttgacggagtcagtgaggaatttcggcttgttgacctgcttcctagcacccactatactgccaccatgtatgccaccaatggacctctcaccagtggcaccatcagcaccaacttttctactctcctggaccctccggcaaacctgacagccagtgaagtcaccagacaaagtgccctgatctcctggcagcctcccagggcagagattgaaaattatgtcttgacctacaaatccaccgatggaagccgcaaggagctgattgtggatgcagaagacacctggattcgactggagggcctgttggagaacacagactacacggtgctcctgcaggcagcacaggacaccacgtggagcagcatcacctccaccgctttcaccacagcccctaccaggaaacctctcactaacaaggtaaccgcaggaaccagcagtacaactccctgatccacccggaccaattaaatgcaccaagtaaagacatcaggttctggctgggtgcggtgactcacacctataatcccagcacttcgggggcctagatgggcagattacctgaggtcaggagtttgagaccagcctgtccaacatgat

SEQ ID NO: 343306 - DNA, 223 bp, Homo sapiens
actaatatactagtttttttctttcacttttttactattcatttttctttgcttttttgttttttcattgttctcgttttagaagtttgatcatgatactccctctttctttcttccctttgttaatttggaaggtccactgttgttttacattctgctagcagttactgctcctttcccaacactcataatcaaaagcatattcgtctctcacgaggtcagg

SEQ ID NO: 343307 - DNA, 550 bp, Homo sapiens
ccatgtttgctgcaatcacagtattcctgaggttagttcccttctcacatattctaaatgcaaggtgttactgatagggtgatgacaacaagaatctgtccattaaactgacagtgttagatgtttccaggttagtaggcttctttcagcaattagtgtgtatgtgtggggtaaggaaggtgctatgagatacatttcttaggcaatagagagcttcaattaagtagccaaattacagttgatgttattgtgtaactattttggcagtatgtatcagaatccattcatgctctttgacccagaaatgctactgtagcggtcctgctattgccatatcaattaaggataactgggagtgggaagccatataagccaagatgttcatagagacattatcaaaggtatataacagaaaaaaacacctcattctttaacagctggtaagtggtgttttagctcttagaatgttgtccttaaacaattgttatgaagtctgactgtctcacaccttgcatttagaatatgtgagaagggaactaacctcaggaat

SEQ ID NO: 343308 - DNA, 780 bp, Homo sapiens
gcctagcagcaacagaatctttaatgagcaagtagaaacagccagaagtgaagtggtgttggtactagggaaaggttagaaggagtcagatttgaaacacgaatgcatgttttactagccgtgtgactttcaatttggcacctcacctttccaagcctcagcttcttttcgtgtaaactgaggatagtccctccctagtggagtttctcttggtattaaatgtatgaagtgcctgacatgtaggtcccttgctagtataggaggtgctggaaatgaagtatgtgtctttacgaggtgttactgatagggtgatgacaacaagaatctgtccattaaactgacagtgttagatgtttccaggttagtaggcttctttcagcaattagtgtgtatgtgtggggtaaggaaggtgctatgagatacatttcttaggcaatagagagcttcaattaagtagccaaattacagttgatgttattgtgtaactattttggcagtatgtatcagaatccattcatgctctttgacccagaaatgctactgtagcggtcctgctattgccatatcaattaaggataactgggagtgggaagccatataagccaagatgttcatagagacattatcaaaggtatataacagaaaaaaacacctcattctttaacagctggtaagtggtgttttagctcttagaatgttgtccttaaacaattgttatgaagtctgactgtctcacaccttgcatttagaatatgtgagaagggaactaacctcaggaat

SEQ ID NO: 343309 - DNA, 438 bp, Homo sapiens
atcatactgtaagatgaggaaatggtagatgagcagaaaaaggtggctgaggcagaatagggcagctaagatgattaacaagttctggcttgagtgaatgaatagataaatggtggaatcattcaatgacagaatgtggaagagtggtgacaaggctagttttaggtacttgtggaatatccaggtgaataaatccaatagtcaattagaagatggcagagagaaagagcaaaagaaaaaagatttgcatataacctgcattaagtggtattgaaagttctcactatgttaagtgctaggaacataacaaagaacaaatcacagcctcatacaaggaagcttatagaagatgactgtaaaacatcaattacagaactttgagtggtaatgatgtgtcaaggtaggttcatcaattgtagcaaatgaaccactctggtg

SEQ ID NO: 343310 - DNA, 262 bp, Homo sapiens
ccaatcaacatccaaccatggacctgctctgtttctgtcaataatttgttgtttctggtctgcaataccaaaacatagttatcatgcaggttaccttcaaaattttcatgtcatccaccccatattgaaattatcaccaaacttactatttctccattcaaaatgcctcctgaattagccttttcttcttcagtcatccatcactcaacttaaagtcttcatcctcttaagtctagaggactatcagagtttggatcaattt

SEQ ID NO: 343311 - DNA, 499 bp, Homo sapiens
ccttgggcaacagagcgagactctgtctcaaaaaaaaaaaaaatttaaaatgacaagttaaaaagtgataggtaaggatgatatatttctgtgactacccagattagaaaaagaactaatagctatttttccatatatatttatatataaataattttataatgtgtgtattatatatcatcaaaatatattttataatattgtgtatgttattgtatatattatcttttatatataaacataaaatttacatacacaaattttattaaaatataaatatattcattgtgtatataaaatatagctattatatacagtatacaatttaatagctattacaatatgcaatattacatatactgtacaatttatattgtatatatgtataaataaaagacatacacatatatatatatcatgtgttacttaatgattgggtagtcacagaccgatccgagtagggccagatatacggatccctggggtgggtagtcacaga

SEQ ID NO: 343312 - DNA, 645 bp, Homo sapiens
gagccgttcatgtcagagactcactctctgctcagcgaggacttggccgcctcacttggagtcttggtcctcgctgagcagagagggagccgttcatgtcagagactcactgccagaaaagccttacccattttggttttcactattgagaccgcaactgcttgcactgatcattttggttcatgagcagttggtgattttagttggtctggtgttcgggctaagaatattttattgtggacttaattacaaccactgcactgtaatgattcaatgctgtattatgatattgctgtaaacaaaattcattcttatattgtcacttattctttgcctgattcagaagttaaataggagctttggaatcattattcatgacccctctgcaaatgtgtcagtctccaaagagagtatctccccccaaattttgtgtagcttcttttgttatggaaaatggtggacaaaaaaagaaactgtgataactggggcgttgttttttaaaataaactccagcacagggatgctgtgcatgcctgagttgattccgaagtgcatatgtctgtaaggatttggagtgcctgcagtgttttatgtgtgggaagtaagggtgagtctcatattcttctattaaatttgccacaagaa

SEQ ID NO: 343313 - DNA, 1268 bp, Homo sapiens
ccacctcctacctgccgggcgggacgagcaacatgattggtggaatcgagtaattactgatcagtattgtccaatcacggagggcagtttagagccggcccaatgagggcctccagggggcgggtcggactgccgcgggccggggagcgctctgggtggccagctgtgggcccgggccgtcgtgggctccggcttgcgtgcggagatgagcgggtccctcggccgagctgcggcggctctgctccgctgggggcgcggcgcgggcggcggtggcctttggggtccgggcgtgcgggcggcgggctcgggcgcgggcggcggcggctcggcggagcagttggacgcgctggtgaagaaggacaaggtggtggtcttcctcaaggggacgccggagcagccccagtgcggcttcagcaacgccgtggtgcagatcctgcggctgcacggcgtccgcgattacgcggcctacaacgtgctggacgacccggagctccgacaaggcattaaagactattccaactggcccaccatcccgcaagtgtacctcaatggcgagtttgtagggggctgtgacattcttctgcagatgcaccagaatggggacttggtggaagaactgaaaaagctggggatccactccgcccttttagatgaaaagaaagaccaagactccaagtgagggcggccaagtcctcgctgagcagagagggagccgttcatgtcagagactcactgccagaaaagccttacccattttggttttcactattgagaccgcaactgcttgcactgatcattttggttcatgagcagttggtgattttagttggtctggtgttcgggctaagaatattttattgtggacttaattacaaccactgcactgtaatgattcaatgctgtattatgatattgctgtaaacaaaattcattcttatattgtcacttattctttgcctgattcagaagttaaataggagctttggaatcattattcatgacccctctgcaaatgtgtcagtctccaaagagagtatctccccccaaattttgtgtagcttcttttgttatggaaaatggtggacaaaaaaagaaactgtgataactggggcgttgttttttaaaataaactccagcacagggatgctgtgcatgcctgagttgattccgaagtgcatatgtctgtaaggatttggagtgcctgcagtgttttatgtgtgggaagtaagggtgagtctcatattcttctattaaatttgccacaagaa

SEQ ID NO: 343314 - DNA, 2370 bp, Homo sapiens
ccttctcaaggattactcttaatctttaatggcagctgcattctcaacttaatacaacgttcaacaaataaaaaagacaactgcttctgagcccaatattatacattaggtaaggaacacgatactcctcattactgttctgtctcaggatataagtttgcaaattcttctcctgatctcagtcaacataaaagcagaattacagtttagagtgggcaatgagaaaggtggaatcaaaatagacacagggaaggccataaagagttcgcaagcataaatgcctgatagcaaaaacgatcacagaagattccaaaaccacaatcctgcacaaaggccatctcaatcttacacaaaaaatacttctgcaatgcctgccgagcacctgcctgtccaacctgggactggtgtcacctttgttactgatccttgtagtcaaaaataattatctcaaaacaattatgtaaccctcctcatttttcctttaaagacctttgtcttcctctatctcccaggatacacacagttaactatcgcatgcattttctcattgcagtgctctattcctgaataaatgccattttcttttagagagcctctctctgttcgttatttaagttgacagcaacaaacagtttaggtttttggcaacaaatcaccaatatttacttaaaaacaaacaaaacacttacaacacaggtaggaacaacagtttattttggaaagagtttaatatattctctattgttaagtgcaccagatgctggacttctgaaacaacaattatgcttctgcataatagctttttctacatatttctgttcatgttgcttgttcctctgatttacctggaatcaatgaatctgaaaaacaaaaagattctttaagcacctggtaaatttcaggtcccacattagaaaatgagcaatcatcaataatattgatgggggtgaaaatatgacattgagactttcgggtaatgtgccgagtttactttcatagtttactaggctcaggtttcatgccgaaggattatttgaaagactcactcactgacatgattttctgattttaaattcgaacactctcaaagcataaacagatcacctccagcaacattgtaaaaaaatactcaaagtttaaaaaaaaaaaagtaacttgtggcagtacttagtgttcaacagaaaacactccatctgctaaacaatatctcgactgcaaagcttctcttactgttggcggatagataatgacatagcccagtcattatcaccgtggcaacagcgaccagaaactatcagaggaaaattgcacatggaacagctggctctcgagcaggcatgcctcagcttcctctggagtatgctttttctgcaagtctggtgtgctcgagggtaccaccaaccctgtgcggctccaagactacagattatgtagcaagtccactggtcctgctcttccggatttattcttcccgccaataggagcacttaccacgttccaagcatcgtcctaggcactgaggatacagcagtgaataaaactgagtgctgggtaggaagtcaataaccaagctagtaaataactgtatattgtcaagcactggcattaaagactattccaactggcccaccatcccgcaagtgtacctcaatggcgagtttgtagggggctgtgacattcttctgcagatgcaccagaatggggacttggtggaagaactgaaaaagctggggatccactccgcccttttagatgaaaagaaagaccaagactccaagtgagggcggccaagtcctcgctgagcagagagggagccgttcatgtcagagactcactgccagaaaagccttacccattttggttttcactattgagaccgcaactgcttgcactgatcattttggttcatgagcagttggtgattttagttggtctggtgttcgggctaagaatattttattgtggacttaattacaaccactgcactgtaatgattcaatgctgtattatgatattgctgtaaacaaaattcattcttatattgtcacttattctttgcctgattcagaagttaaataggagctttggaatcattattcatgacccctctgcaaatgtgtcagtctccaaagagagtatctccccccaaattttgtgtagcttcttttgttatggaaaatggtggacaaaaaaagaaactgtgataactggggcgttgttttttaaaataaactccagcacagggatgctgtgcatgcctgagttgattccgaagtgcatatgtctgtaaggatttggagtgcctgcagtgttttatgtgtgggaagtaagggtgagtctcatattcttctattaaatttgccacaagaa

SEQ ID NO: 343315 - DNA, 1739 bp, Homo sapiens
ccttctcaaggattactcttaatctttaatggcagctgcattctcaacttaatacaacgttcaacaaataaaaaagacaactgcttctgagcccaatattatacattaggtaaggaacacgatactcctcattactgttctgtctcaggatataagtttgcaaattcttctcctgatctcagtcaacataaaagcagaattacagtttagagtgggcaatgagaaaggtggaatcaaaatagacacagggaaggccataaagagttcgcaagcataaatgcctgatagcaaaaacgatcacagaagattccaaaaccacaatcctgcacaaaggccatctcaatcttacacaaaaaatacttctgcaatgcctgccgagcacctgcctgtccaacctgggactggtgtcacctttgttactgatccttgtagtcaaaaataattatctcaaaacaattatgtaaccctcctcatttttcctttaaagacctttgtcttcctctatctcccaggatacacacagttaactatcgcatgcattttctcattgcagtgctctattcctgaataaatgccattttcttttagagagcctctctctgttcgttatttaagttgacagcaacaaacagtttaggtttttggcaacaaatcaccaatatttacttaaaaacaaacaaaacacttacaacacaggtaggaacaacagtttattttggaaagagtttaatatattctctattgttaagtgcaccagatgctggacttctgaaacaacaattatgcttctgcataatagctttttctacatatttctgttcatgttgcttgttcctctgatttacctggaatcaatgaatcacgttccaagcatcgtcctaggcactgaggatacagcagtgaataaaactgagtgctgggtaggaagtcaataaccaagctagtaaataactgtatattgtcaagcactggcattaaagactattccaactggcccaccatcccgcaagtgtacctcaatggcgagtttgtagggggctgtgacattcttctgcagatgcaccagaatggggacttggtggaagaactgaaaaagctggggatccactccgcccttttagatgaaaagaaagaccaagactccaagtgagggcggccaagtcctcgctgagcagagagggagccgttcatgtcagagactcactgccagaaaagccttacccattttggttttcactattgagaccgcaactgcttgcactgatcattttggttcatgagcagttggtgattttagttggtctggtgttcgggctaagaatattttattgtggacttaattacaaccactgcactgtaatgattcaatgctgtattatgatattgctgtaaacaaaattcattcttatattgtcacttattctttgcctgattcagaagttaaataggagctttggaatcattattcatgacccctctgcaaatgtgtcagtctccaaagagagtatctccccccaaattttgtgtagcttcttttgttatggaaaatggtggacaaaaaaagaaactgtgataactggggcgttgttttttaaaataaactccagcacagggatgctgtgcatgcctgagttgattccgaagtgcatatgtctgtaaggatttggagtgcctgcagtgttttatgtgtgggaagtaagggtgagtctcatattcttctattaaatttgccacaagaa

SEQ ID NO: 343316 - DNA, 1285 bp, Homo sapiens
ccacctcctacctgccgggcgggacgagcaacatgattggtggaatcgagtaattactgatcagtattgtccaatcacggagggcagtttagagccggcccaatgagggcctccagggggcgggtcggactgccgcgggccggggagcgctctgggtggccagctgtgggcccgggccgtcgtgggctccggcttgcgtgcggagatgagcgggtccctcggccgagctgcggcggctctgctccgctgggggcgcggcgcgggcggcggtggcctttggggtccgggcgtgcgggcggcgggctcgggcgcgggcggcggcggctcggcggagcagttggacgcgctggtgaagaaggacaaggtggtggtcttcctcaaggggacgccggagcagccccagtgcggcttcagcaacgccgtggtgcagatcctgcggctgcacggcgtccgcgattacgcggcctacaacgtgctggacgacccggagctccgacaaggcattaaagactattccaactggcccaccatcccgcaagtgtacctcaatggcgagtttgtagggggctgtgacattcttctgcagatgcaccagaatggggacttggtggaagaactgaaaaagctggggatccactccgcccttttagatgaaaagaaagaccaagactccaagtgagggcggccaagtcctcgctgagcagagagggagccgttcatgtcagagactcactgccagaaaagccttacccattttggttttcactattgagaccgcaactgcttgcactgatcattttggttcatgagcagttggtgattttagttggtctggtgttcgggctaagaatattttattgtggacttaattacaaccactgcactgtaatgattcaatgctgtattatgatattgctgtaaacaaaattcattcttatattgtcacttattctttgcctgattcagaagttaaataggagctttggaatcattattcatgacccctctgcaaatgtgtcagtctccaaagagagtatctccccccaaattttgtgtagcttcttttgttatggaaaatggtggacaaaaaaagaaactgtgataactggggcgttgttttttaaaataaactgcacccagcccagactgactttttttaaagtgggactaccagaggccgggtgcggtggatcagtttggcaggccggggtgggaggattgcttgagtccgggagtttaagaccagtctgagcgacatagtgaaaccccatttcattaaaaaaaa

SEQ ID NO: 343317 - DNA, 2670 bp, Homo sapiens
ccttctcaaggattactcttaatctttaatggcagctgcattctcaacttaatacaacgttcaacaaataaaaaagacaactgcttctgagcccaatattatacattaggtaaggaacacgatactcctcattactgttctgtctcaggatataagtttgcaaattcttctcctgatctcagtcaacataaaagcagaattacagtttagagtgggcaatgagaaaggtggaatcaaaatagacacagggaaggccataaagagttcgcaagcataaatgcctgatagcaaaaacgatcacagaagattccaaaaccacaatcctgcacaaaggccatctcaatcttacacaaaaaatacttctgcaatgcctgccgagcacctgcctgtccaacctgggactggtgtcacctttgttactgatccttgtagtcaaaaataattatctcaaaacaattatgtaaccctcctcatttttcctttaaagacctttgtcttcctctatctcccaggatacacacagttaactatcgcatgcattttctcattgcagtgctctattcctgaataaatgccattttcttttagagagcctctctctgttcgttatttaagttgacagcaacaaacagtttaggtttttggcaacaaatcaccaatatttacttaaaaacaaacaaaacacttacaacacaggtaggaacaacagtttattttggaaagagtttaatatattctctattgttaagtgcaccagatgctggacttctgaaacaacaattatgcttctgcataatagctttttctacatatttctgttcatgttgcttgttcctctgatttacctggaatcaatgaatctgaaaaacaaaaagattctttaagcacctggtaaatttcaggtcccacattagaaaatgagcaatcatcaataatattgatgggggtgaaaatatgacattgagactttcgggtaatgtgccgagtttactttcatagtttactaggctcaggtttcatgccgaaggattatttgaaagactcactcactgacatgattttctgattttaaattcgaacactctcaaagcataaacagatcacctccagcaacattgtaaaaaaatactcaaagtttaaaaaaaaaaaagtaacttgtggcagtacttagtgttcaacagaaaacactccatctgctaaacaatatctcgactgcaaagcttctcttactgttggcggatagataatgacatagcccagtcattatcaccgtggcaacagcgaccagaaactatcagaggaaaattgcacatggaacagctggctctcgagcaggcatgcctcagcttcctctggagtatgctttttctgcaagtctggtgtgctcgagggtaccaccaaccctgtgcggctccaagactacagattatgtagcaagtccactggtcctgctcttccggatttattcttcccgccaataggagcacttaccacgttccaagcatcgtcctaggcactgaggatacagcagtgaataaaactgagtgctgggtaggaagtcaataaccaagctagtaaataactgtatattgtcaagcactggtaagtacaagggagagcagagcaagcaatgggcctgatgaggcttgctttgtctcctctgcactcccacactgctttgtatctgcttctcatttctcacgatgggtccaagctttgggcaccaggtctccctggacattccgcgctggcactgcgcctagcacccagcggctgctcaggaaacgtttgtcgaacgaacgaattcacttcttagttccccattcaacaaacctttcctgatcctaggcccaacaggttaaaaggctggagggccaacgaggctggaaactcagaggcggccgggggcggtggctcacgcctgtaatcccagcactttaagaggccgaggcaggaggatcccttgaagccaggagttcgagaccagcctgggcaaaaaagtgagacatcgaccccccgcccccgccgccaattccgtctctacaaaaaggaagaaaaaaaaaaaaacccagaggaaatcacacaggcaaaagcgctttacaaattttaaaaatgaaaactgttctagagaaataatcgcgcgccggaggcggaagccccagagcctcagctcccacgtggcggcggagccagggaaagtccaggagccaaggctacggcccgagcgctggaaccccggtcaggctccggctccccgccacgacgaactgcatgcggccgcggcgctccggaggcgcccggggacgctcacctaagctgggagaggcggatacccgcccggcctagccccgctacctcccaagagaccaacacgacaagcgcgcgcccaccgcattgccatggcaattcaaccgccgctgacaccggaaccggaaacttcatcaggaggtgaccccttcccggcgttccgcggaacgggcgagtcccgcgcctctcccagttgtctcggcgtagtccagctggcctcattggctcacaggaggaaagtcgtcttccctcttgttttgcctctcgttgccctgcaagcgtgaccctgatggacatccagtctctccaattaactaacaaagcggttgccgacgaccaatagtaaggcagtaggatgaggct

SEQ ID NO: 343318 - DNA, 2039 bp, Homo sapiens
ccttctcaaggattactcttaatctttaatggcagctgcattctcaacttaatacaacgttcaacaaataaaaaagacaactgcttctgagcccaatattatacattaggtaaggaacacgatactcctcattactgttctgtctcaggatataagtttgcaaattcttctcctgatctcagtcaacataaaagcagaattacagtttagagtgggcaatgagaaaggtggaatcaaaatagacacagggaaggccataaagagttcgcaagcataaatgcctgatagcaaaaacgatcacagaagattccaaaaccacaatcctgcacaaaggccatctcaatcttacacaaaaaatacttctgcaatgcctgccgagcacctgcctgtccaacctgggactggtgtcacctttgttactgatccttgtagtcaaaaataattatctcaaaacaattatgtaaccctcctcatttttcctttaaagacctttgtcttcctctatctcccaggatacacacagttaactatcgcatgcattttctcattgcagtgctctattcctgaataaatgccattttcttttagagagcctctctctgttcgttatttaagttgacagcaacaaacagtttaggtttttggcaacaaatcaccaatatttacttaaaaacaaacaaaacacttacaacacaggtaggaacaacagtttattttggaaagagtttaatatattctctattgttaagtgcaccagatgctggacttctgaaacaacaattatgcttctgcataatagctttttctacatatttctgttcatgttgcttgttcctctgatttacctggaatcaatgaatcacgttccaagcatcgtcctaggcactgaggatacagcagtgaataaaactgagtgctgggtaggaagtcaataaccaagctagtaaataactgtatattgtcaagcactggtaagtacaagggagagcagagcaagcaatgggcctgatgaggcttgctttgtctcctctgcactcccacactgctttgtatctgcttctcatttctcacgatgggtccaagctttgggcaccaggtctccctggacattccgcgctggcactgcgcctagcacccagcggctgctcaggaaacgtttgtcgaacgaacgaattcacttcttagttccccattcaacaaacctttcctgatcctaggcccaacaggttaaaaggctggagggccaacgaggctggaaactcagaggcggccgggggcggtggctcacgcctgtaatcccagcactttaagaggccgaggcaggaggatcccttgaagccaggagttcgagaccagcctgggcaaaaaagtgagacatcgaccccccgcccccgccgccaattccgtctctacaaaaaggaagaaaaaaaaaaaaacccagaggaaatcacacaggcaaaagcgctttacaaattttaaaaatgaaaactgttctagagaaataatcgcgcgccggaggcggaagccccagagcctcagctcccacgtggcggcggagccagggaaagtccaggagccaaggctacggcccgagcgctggaaccccggtcaggctccggctccccgccacgacgaactgcatgcggccgcggcgctccggaggcgcccggggacgctcacctaagctgggagaggcggatacccgcccggcctagccccgctacctcccaagagaccaacacgacaagcgcgcgcccaccgcattgccatggcaattcaaccgccgctgacaccggaaccggaaacttcatcaggaggtgaccccttcccggcgttccgcggaacgggcgagtcccgcgcctctcccagttgtctcggcgtagtccagctggcctcattggctcacaggaggaaagtcgtcttccctcttgttttgcctctcgttgccctgcaagcgtgaccctgatggacatccagtctctccaattaactaacaaagcggttgccgacgaccaatagtaaggcagtaggatgaggct

SEQ ID NO: 343319 - DNA, 1697 bp, Homo sapiens
ccttctcaaggattactcttaatctttaatggcagctgcattctcaacttaatacaacgttcaacaaataaaaaagacaactgcttctgagcccaatattatacattaggtaaggaacacgatactcctcattactgttctgtctcaggatataagtttgcaaattcttctcctgatctcagtcaacataaaagcagaattacagtttagagtgggcaatgagaaaggtggaatcaaaatagacacagggaaggccataaagagttcgcaagcataaatgcctgatagcaaaaacgatcacagaagattccaaaaccacaatcctgcacaaaggccatctcaatcttacacaaaaaatacttctgcaatgcctgccgagcacctgcctgtccaacctgggactggtgtcacctttgttactgatccttgtagtcaaaaataattatctcaaaacaattatgtaaccctcctcatttttcctttaaagacctttgtcttcctctatctcccaggatacacacagttaactatcgcatgcattttctcattgcagtgctctattcctgaataaatgccattttcttttagagagcctctctctgttcgttatttaagttgacagcaacaaacagtttaggtttttggcaacaaatcaccaatatttacttaaaaacaaacaaaacacttacaacacaggtaggaacaacagtttattttggaaagagtttaatatattctctattgttaagtgcaccagatgctggacttctgaaacaacaattatgcttctgcataatagctttttctacatatttctgttcatgttgcttgttcctctgatttacctggaatcaatgaatctttcctgatcctaggcccaacaggttaaaaggctggagggccaacgaggctggaaactcagaggcggccgggggcggtggctcacgcctgtaatcccagcactttaagaggccgaggcaggaggatcccttgaagccaggagttcgagaccagcctgggcaaaaaagtgagacatcgaccccccgcccccgccgccaattccgtctctacaaaaaggaagaaaaaaaaaaaaacccagaggaaatcacacaggcaaaagcgctttacaaattttaaaaatgaaaactgttctagagaaataatcgcgcgccggaggcggaagccccagagcctcagctcccacgtggcggcggagccagggaaagtccaggagccaaggctacggcccgagcgctggaaccccggtcaggctccggctccccgccacgacgaactgcatgcggccgcggcgctccggaggcgcccggggacgctcacctaagctgggagaggcggatacccgcccggcctagccccgctacctcccaagagaccaacacgacaagcgcgcgcccaccgcattgccatggcaattcaaccgccgctgacaccggaaccggaaacttcatcaggaggtgaccccttcccggcgttccgcggaacgggcgagtcccgcgcctctcccagttgtctcggcgtagtccagctggcctcattggctcacaggaggaaagtcgtcttccctcttgttttgcctctcgttgccctgcaagcgtgaccctgatggacatccagtctctccaattaactaacaaagcggttgccgacgaccaatagtaaggcagtaggatgaggct

SEQ ID NO: 343320 - DNA, 1219 bp, Homo sapiens
ccttctcaaggattactcttaatctttaatggcagctgcattctcaacttaatacaacgttcaacaaataaaaaagacaactgcttctgagcccaatattatacattaggtaaggaacacgatactcctcattactgttctgtctcaggatataagtttgcaaattcttctcctgatctcagtcaacataaaagcagaattacagtttagagtgggcaatgagaaaggtggaatcaaaatagacacagggaaggccataaagagttcgcaagcataaatgcctgatagcaaaaacgatcacagaagattccaaaaccacaatcctgcacaaaggccatctcaatcttacacaaaaaatacttctgcaatgcctgccgagcacctgcctgtccaacctgggactggtgtcacctttgttactgatccttgtagtcaaaaataattatctcaaaacaattatgtaaccctcctcatttttcctttaaagacctttgtcttcctctatctcccaggatacacacagttaactatcgcatgcattttctcattgcagtgctctattcctgaataaatgccattttcttttagagagcctctctctgttcgttatttaagttgacagcaacaaacagtttaggtttttggcaacaaatcaccaatatttacttaaaaacaaacaaaacacttacaacacaggtaggaacaacagtttattttggaaagagtttaatatattctctattgttaagtgcaccagatgctggacttctgaaacaacaattatgcttctgcataatagctttttctacatatttctgttcatgttgcttgttcctctgatttacctggaatcaatgaatctaagctgggagaggcggatacccgcccggcctagccccgctacctcccaagagaccaacacgacaagcgcgcgcccaccgcattgccatggcaattcaaccgccgctgacaccggaaccggaaacttcatcaggaggtgaccccttcccggcgttccgcggaacgggcgagtcccgcgcctctcccagttgtctcggcgtagtccagctggcctcattggctcacaggaggaaagtcgtcttccctcttgttttgcctctcgttgccctgcaagcgtgaccctgatggacatccagtctctccaattaactaacaaagcggttgccgacgaccaatagtaaggcagtaggatgaggct

SEQ ID NO: 343321 - DNA, 385 bp, Homo sapiens
agctataccaccctataccaccctataccaccctataccacccgataccactgactataccaccctataccaccctataccaccctataccaccataccactctataccaccgtgatacccctctgcaaatgtgtcagtctccaaagagagtatctccccccaaattttgtgtagcttcttttgttatggaaaatggtggacaaaaaaagaaactgtgataactggggcgttgttttttaaaataaactccagcacagggatgctgtgcatgcctgagttgattccgaagtgcatatgtctgtaaggatttggagtgcctgcagtgttttatgtgtgggaagtaagggtgagtctcatattcttctattaaatttgccacaagaa

SEQ ID NO: 343322 - DNA, 1140 bp, Homo sapiens
ccttctcaaggattactcttaatctttaatggcagctgcattctcaacttaatacaacgttcaacaaataaaaaagacaactgcttctgagcccaatattatacattaggtaaggaacacgatactcctcattactgttctgtctcaggatataagtttgcaaattcttctcctgatctcagtcaacataaaagcagaattacagtttagagtgggcaatgagaaaggtggaatcaaaatagacacagggaaggccataaagagttcgcaagcataaatgcctgatagcaaaaacgatcacagaagattccaaaaccacaatcctgcacaaaggccatctcaatcttacacaaaaaatacttctgcaatgcctgccgagcacctgcctgtccaacctgggactggtgtcacctttgttactgatccttgtagtcaaaaataattatctcaaaacaattatgtaaccctcctcatttttcctttaaagacctttgtcttcctctatctcccaggatacacacagttaactatcgcatgcattttctcattgcagtgctctattcctgaataaatgccattttcttttagagagcctctctctgttcgttatttaagttgacagcaacaaacagtttaggtttttggcaacaaatcaccaatatttacttaaaaacaaacaaaacacttacaacacaggtaggaacaacagtttattttggaaagagtttaatatattctctattgttaagtgcaccagatgctggacttctgaaacaacaattatgcttctgcataatagctttttctacatatttctgttcatgttgcttgttcctctgatttacctggaatcaatgaatcgcattgccatggcaattcaaccgccgctgacaccggaaccggaaacttcatcaggaggtgaccccttcccggcgttccgcggaacgggcgagtcccgcgcctctcccagttgtctcggcgtagtccagctggcctcattggctcacaggaggaaagtcgtcttccctcttgttttgcctctcgttgccctgcaagcgtgaccctgatggacatccagtctctccaattaactaacaaagcggttgccgacgaccaatagtaaggcagtaggatgaggct

SEQ ID NO: 343323 - DNA, 1322 bp, Homo sapiens
ccacctcctacctgccgggcgggacgagcaacatgattggtggaatcgagtaattactgatcagtattgtccaatcacggagggcagtttagagccggcccaatgagggcctccagggggcgggtcggactgccgcgggccggggagcgctctgggtggccagctgtgggcccgggccgtcgtgggctccggcttgcgtgcggagatgagcgggtccctcggccgagctgcggcggctctgctccgctgggggcgcggcgcgggcggcggtggcctttggggtccgggcgtgcgggcggcgggctcgggcgcgggcggcggcggctcggcggagcagttggacgcgctggtgaagaaggacaaggtggtggtcttcctcaaggggacgccggagcagccccagtgcggcttcagcaacgccgtggtgcagatcctgcggctgcacggcgtccgcgattacgcggcctacaacgtgctggacgacccggagctccgacaaggcattaaagactattccaactggcccaccatcccgcaagtgtacctcaatggcgagtttgtagggggctgtgacattcttctgcagatgcaccagaatggggacttggtggaagaactgaaaaagctggggatccactccgcccttttagatgaaaagaaagaccaagactccaagtgagggcggccaagtcctcgctgagcagagagggagccgttcatgtcagagactcactgccagaaaagccttacccattttggttttcactattgagaccgcaactgcttgcactgatcattttggttcatgagcagttggtgattttagttggtctggtgttcgggctaagaatattttattgtggacttaattacaaccactgcactgtaatgattcaatgctgtattatgatattgctgtaaacaaaattcattcttatattgtcacttattctttgcctgattcagaagttaaataggagctttggaatcattattcatgacccctctgcaaatgtgtcagtctccaaagagagtatctccccccaaattttgtgtagcttcttttgttatggaaaatggtggacaaaaaaagaaactgtgataactggggcgttgttttttaaaataaactccagcacagggatgctgtgcatgctgaaaaaaaaaaaaaaaaaaaaaaggggggggtaagattactccggggcgatttcggtcccgttttgaaagggcccaaggggcgtaaagaagagggggcggggaaacggggggaagacggttgtggggccttgggggatggggacacagagggaaataggtgtgtc

SEQ ID NO: 343324 - DNA, 1810 bp, Homo sapiens
gaatgttaagagtaatcttttatgtcttaagattgaagccacatttctttcttaccattttgttacagtcatcatccttgtggctcagaattgaacagagtagttgcacagctgcgctgtcacagagtgtccctcatctcatgtgtgtcctcagagccatttgcacacaggactgatcacatgcatgctggttggtttcttggctgctgtgagcgcttaagagcagagcgggtctcactcccccacccctcagccctggacagggaccttgctgagctctgggccttcattagactcaccagtcacttcgggttctgcacagagcctcatcatccactccacagagagcccatcacagtggctggatagatgggaactgacaacccatagctgtgggacagggatttttccctgggtaaaagtaattgttaaaaattaaaaaaaaaaaaaactcaacaactcatcatctcgaggagaagtgactgacggcctgcaccaacttagacggtcacagtcatgaaaagtgcacaggtgggattgcccgagttggccatgaattaccgtgatggatccatttggaaatgaagttggttgtgacatttcttcaagttttgtttcgcttgaagcttgactggtagatggagaattttggccttatgtatcttatgtgacttgcattacccagtccagtcctctgccattaatctaaggtccgcaatgtatcaggtattttactgagaatcttgcttacctaattctcacaaaaaaaaaaaccttgggagatgagggtggaaacaggatgagaggtcaggtgacttgtctgagggctgacggtttgtaattggaagagtcagggcctaaccactggtctctttgacacaaaaactcatgctcttagtggcaagcacagtgttctcaagattgggggaagccagggagggacagtgggttgtctgctactagtgggtcaaaattacatatttagtcatgaatggttcagcttttaccatttaaataacaaataaatgttctttctccataggcattaaagactattccaactggcccaccatcccgcaagtgtacctcaatggcgagtttgtagggggctgtgacattcttctgcagatgcaccagaatggggacttggtggaagaactgaaaaagctggggatccactccgcccttttagatgaaaagaaagaccaagactccaagtgagggcggccaagtcctcgctgagcagagagggagccgttcatgtcagagactcactgccagaaaagccttacccattttggttttcactattgagaccgcaactgcttgcactgatcattttggttcatgagcagttggtgattttagttggtctggtgttcgggctaagaatattttattgtggacttaattacaaccactgcactgtaatgattcaatgctgtattatgatattgctgtaaacaaaattcattcttatattgtcacttattctttgcctgattcagaagttaaataggagctttggaatcattattcatgacccctctgcaaatgtgtcagtctccaaagagagtatctccccccaaattttgtgtagcttcttttgttatggaaaatggtggacaaaaaaagaaactgtgataactggggcgttgttttttaaaataaactccagcacagggatgctgtgcatgcctgagttgattccgaagtgcatatgtctgtaaggatttggagtgcctgcagtgttttatgtgtgggaagtaagggtgagtctcatattcttctattaaatttgccacaagaa

SEQ ID NO: 343325 - DNA, 517 bp, Homo sapiens
tttcacctcaggtgccatttctgtttccatctctgatcagttagtagtggctgttcagagtggagtagcagccccccattgccgtgtatttgcaatctctgcacaaacggaactctcttttcctgggggagttgcagaagccatgcaaaggttatgatggcttgagtgaggttatacatctagttagtggcttctaagctgaaatgtctttattggctttcatttatagtattgccctatagaattcctgatataaatcaccttattctgtcaatcaaaaattgcatttaaatggtatctgatttttggataatgtgcctccacttaaactgatcatgtggtgggtcatgcttttcctatgagatgaaagtaaagaaggagaaataatggggtagttggatttattttattaacctgtatgcctgcacaggtgggatgctagctgaaagaagtagagtagtgacatactgacagtttaagttttcagtgttgacttgagtcaatgtatgtaagtatg

SEQ ID NO: 343326 - DNA, 239 bp, Homo sapiens
agaagggggtgtaggtactccaggggaaaggcctctccagcagattagcttgttcacgtgatactagagtcccaaaagggcaatagtggaagctctaaagcttcttgcagcttaggcttggactgaataaataacagcagtaacacaacagcaatggtaatagtaataatgaaaacaactcttctaaaaaatttgaggaaagtctcttgtctattgaatataaaaaatatttaccatta

SEQ ID NO: 343327 - DNA, 307 bp, Homo sapiens
actatcttcctcaatatgcctcaacattcataatgaggaattacacgtgaacactgaactctcttctgaacttctgcttaatgtggaaaactgaagagcaattcagaaaagatcaagcacatgtttctacgatgccaaacagctggatggaaatatgaaaactctataaataatctacattttgctaaatagccagacattgagtgttgaagctaaaacctcagttcttttattgctttatgatcattcttcaaatgacacagaaggcctgaagtgctcttgcgaatatttttcttcattatggctc

SEQ ID NO: 343328 - DNA, 315 bp, Homo sapiens
agctgtactgagagaagctgggtttggggtactcaagaactctgctgtttctacattttttttttgaacctaaaattccttcaaaacagttaaaacaaaagacagttatgctaccctcagcttgaatgccttacagttgtaggatatgataaatttctcttcatagattttagcctgtaaattgttaagtacaatgagttctgagatcctctccaaagaaccagtgtatcagtatgttcagctcccctgttctttgttcttcattttaaagtttaaattcctagttctttatttctccttgcccccagtttcagt

SEQ ID NO: 343329 - DNA, 353 bp, Homo sapiens
acagaagggcttaacaaaatgagggcttttattttctcacataaaacatctgaaagcaatccagcctttcagcctggcacacaggcttcatagtgcatttggggcttagcctctttctgtttggctgtctttagtaggtggctttattcttcatgagaacaagatagctgttccactttcaggcacaaagtctgaagcagatggcagcagccaataaaatttgtgctagtgaagtctgccctttaataagctctgctagaaaactttgccacttagctaaccagccacaaaagagtttgggaagctaggcacttttctgccccaaacaaaattgggggttgccttactgtaag

SEQ ID NO: 343330 - DNA, 718 bp, Homo sapiens
tagcactttgggaggccaaggtgggaggatcactggagctcaggagtttgagaccagcttgggcaacgtagtgagacttcatctctattaaaaaaaaaatgaaaagaaaaaattttaaagtccatatataactttaaaatcacatagagatatttatcaattagtatgtctttagagtaaggagaaaattgccttgcaagggcttaaacgataagggtggcttgtgccatccacgttaaggtctcctaggcgggctgcagataggagcccttctgcttggccactctccactgtggctttgccctggggcagcgccccctcttggtctcacttgtctagacttacacaagaggatggccaggtggaaccgggatcactcttcctgtgccacgcatgtcttctaagcccatcaccacgaacttctgaaatcagctgcctaaggtcatttcaagccgatatgttttccctaaacagttcttgttcaaataaagagatggagaggaggacttactacctgagtagctttgaggattgaaacataaggcaccaacctgtcttctaaaatcactttttgggccaggcgtggtggctcatgcctgtaatcccagcactttgggaggccgaagcaggcagatcacttgaggccaggagttcaagagcagcctggccaacatggcgaaaccctatctttactaaaaataccaaaaaattggctggg

SEQ ID NO: 343331 - DNA, 875 bp, Homo sapiens
ccgccgcccaagatgccgaaaggaaagaaggccaagggaaagaaggtggctccggccccagctgtcgtgaagaagcaggaggctaagaaagtggtgaatcccctgtttgagaaaaggcctaagaattttggcattggacaggacatccagcccaaaagagacctcacccgctttgtgaaatggccccgctatatcaggttgcagcggcagagagccatcctctataagcggctgaaagtgcctcctgcgattaaccagttcacccaggccctggaccgccaaacagctactcagctgcttaagctggcccacaagtacagaccagagacaaagcaagagaagaagcagagactgttggcccgggccgagaagaaggctgctggcaaaggggacgtcccaacgaagagaccacctgtccttcgagcaggagttaacaccgtcaccaccttggtggagaacaagaaagctcagctggtggtgattgcacacgacgtggatcccatcgagctggttgtcttcttgcctgccctgtgtcgtaaaatgggggtcccttactgcattatcaagggaaaggcaagactgggacgtctagtccacaggaagacctgcaccactgtcgccttcacacaggtgaactcggaagacaaaggcgctttggctaagctggtggaagctatcaggaccaattacaatgacagatacgatgagatccgccgtcactggggtggcaatgtcctgggtcctaagtctgtggctcgtatcgccaagctcgaaaaggcaaggtaaagaacttgccactaaactgggttaaatgtacactgttgagttttctgtacataaaaataattgaaataatacaaattttccttcaaaaa

SEQ ID NO: 343332 - DNA, 964 bp, Homo sapiens
  misc_feature (878)..(878): n is a, c, g, or t
  misc_feature (883)..(886): n is a, c, g, or t
  misc_feature (897)..(897): n is a, c, g, or t
  misc_feature (910)..(910): n is a, c, g, or t
  misc_feature (915)..(916): n is a, c, g, or t
  misc_feature (924)..(924): n is a, c, g, or t
  misc_feature (932)..(932): n is a, c, g, or t
  misc_feature (938)..(938): n is a, c, g, or t
ccgccgcccaagatgccgaaaggaaagaaggccaagggaaagaaggtggctccggccccagctgtcgtgaagaagcaggaggctaagaaagtggtgaatcccctgtttgagaaaaggcctaagaattttggcattggacaggacatccagcccaaaagagacctcacccgctttgtgaaatggccccgctatatcaggttgcagcggcagagagccatcctctataagcggctgaaagtgcctcctgcgattaaccagttcacccaggccctggaccgccaaacagctactcagctgcttaagctggcccacaagtacagaccagagacaaagcaagagaagaagcagagactgttggcccgggccgagaagaaggctgctggcaaaggggacgtcccaacgaagagaccacctgtccttcgagcaggagttaacaccgtcaccaccttggtggagaacaagaaagctcagctggtggtgattgcacacgacgtggatcccatcgagctggttgtcttcttgcctgccctgtgtcgtaaaatgggggtcccttactgcattatcaagggaaaggcaagactgggacgtctagtccacaggaagacctgcaccactgtcgccttcacacaggtgaactcggaagacaaaggcgctttggctaagctggtggaagctatcaggaccaattacaatgacagatacgatgagatccgccgtcactggggtggcaatgtcctgggtcctaagtctgtggctcgtatcgccaagctcgaaaaggcaaggtaaagaacttgccactaaactgggttaaatgtacactgttgagtttctggtcctaaaatattggattattccaattttccttcaaaaaaaaaatngggcnnnntgggggaaaangataaaggctggnagttnnaccttttnaagggaangggccnaaggagatatgagaatataaatatac

SEQ ID NO: 343333 - DNA, 545 bp, Homo sapiens
tattggagaaaacttagccctcattgaaaaaggctgccagagaaaagatatccacagggaaattcaggagttttgtttgtttttttttcttttaaggtggagttttgctcttgttgctcagtctggaatgcaatggcacgatctcagctcactgcatcctccgcctcctgggttcaagcaagtctcctgcctcagcctccctagtagctggggttacaggcatgcaccaccatgcccggctaatttttgtatttttagtagagatggggtttcaccatgttggtcaggctggtctcgaactcctgacctcaggtaatccacccgccctggcctcccaaagggctgagattacaggtgcgagctaccgcgcctggcttgttttgggttttggggttttttttgtgttttgtttgtttgtttgtttttggagacagtctctgtcacccaggctggagtgcagcagcgtgatctcggttgactgcaacctctgccttccaggttcaagtgattctcctgcctcagcctcccgaatagctgggattaca

SEQ ID NO: 343334 - DNA, 548 bp, Homo sapiens
ccattttcataatctattgccgccatttggaaatatctgttctcattagtaactatggcacttgcagcctaaatggtcatgaagtcactatccggaccatttttaggatgtccctgttggatgcaagtagtttaaagccatatgattcgtttttattagctgtgctgttcttaaccagggataataaaggctttgcaagtcaagtctgcatggcaaaaaaggtgtccacaagtgtgaatggctcatttttaatgactagccaacagccacttgtaaaagatgtaattgaaattgttcagagattaggttccgtctgctttgtcctccttctcaaaagttttcatggatccaagctattcttaagcattgtttaatactagaaataacctttatggactaataataagaaagaaaaaggcaaattttaaaagatattccaaattcaaagaaaataagtttggcagcctgacttttgattatctgtaaaaatcagggccaatagtttgaacggaagagtaaatatgaaggttttctaaacagttttttct

SEQ ID NO: 343335 - DNA, 241 bp, Homo sapiens
aagaggcagtagcattttgggccttaagaaaaggagaattggttgggagagtgtagacagagtgaacaggagactgcttaacagctcagaggtccatgctgggatcaggcagcaggatttttgggcagactcgggaatttcagataaagaatcccagcaggctgaagaagagctacttagagccacagggatgtaagcattgagaagactcagtggtgagtagaggtactttgcaaactgg

SEQ ID NO: 343336 - DNA, 1344 bp, Homo sapiens
ctctgaggatcccaacttcgacggacgcattcagcttacaattggagatggtctacaacatgacagtctggaatgtaaaaaggaagcaggatattgaagagggagcaccaccgcaagtgagaaaagagccagggagagagacgtcagtcaatacaccagaagagaaaatggacatagggaagcccaatgcccagatactcatcaatgaggcaagagcttcatgggcgcccactattattaactaggtagaataagaagtttaccaggtagggaaaaccagaaggtggggaagggaaggaggctgaggagtaactcttggaggtttaaaaaaaatgttagaaaaggtgagcatccggagtccatgacaaagcgaagattattcataggcctgggcaaagtcaagagatgaaggaaggaagtctttcttcctgtgcggggtggggagagcagcagcagcaaactttatcactaggttgaaaggggaaataacagaaacaaaactgctgtttgtattgatggcagtcacacaggggaaatctggttcctctttctatgagtgaagaaagaggtcaggggaggtacttggcactaaaggatgatataaccttgaaaggactggctcagggaggacaagagaatggtgtgtgtgtgtgtgtgtgtgtgtgtgtgtgtgtgtgtgtgtgtgaaggggagacctggtggagtgtgaatggcaatatgctatgggagtcgttttcactcaaaaaggaatagcaaaaccctctcatacagagaaaatgacagggcgcaaggagctcaaaaatgaagaggagccttccacttctaacaagaacacactagatgtaaattggcaatgctgaaagagcagtgagtcccagagccagaaggaactttcctaaggtatccagcccgtggatagtctaaatgtcccacgtagatgtgacaagccaggaatgatcccaatttacctagctccagaattgcctgatcttcttcttgactcaatgcccccaacctcacattcatccccttgcttcccatttctagctagtaggtaacagcactgagcccgttcaaatttctcacagacagtctctattcattctgacattatctctccagtaagtcctactctggttatcaaactttctgtagtctggagaacaaacaaatccctaatatggtcattcttttcatgctgagagatcaaactcatcctattactgggatcagtaatagtaaatgcaaccctgacaccgacaggagagagtcgtcaggtacattaccacttttcttcacagctgcccctatgaatgccatgaaggaccacggaattagggatgg

SEQ ID NO: 343337 - DNA, 1470 bp, Homo sapiens
ttgtgctgacagtggaaggttttttgacaacgtatggacagttctatagagcaaaatataagtatctagaaaaacaacatcaatataattaaaaatcagattaaaaattaggattcaaaacactaacaaagaggaaaatggcaaaatatcaagcactcagcttacaattggagatggtctacaacatgacagtctggaatgtaaaaaggaagcaggatattgaagagggagcaccaccgcaagtgagaaaagagccagggagagagacgtcagtcaatacaccagaagagaaaatggacatagggaagcccaatgcccagatactcatcaatgaggcaagagcttcatgggcgcccactattattaactaggtagaataagaagtttaccaggtagggaaaaccagaaggtggggaagggaaggaggctgaggagtaactcttggaggtttaaaaaaaatgttagaaaaggtgagcatccggagtccatgacaaagcgaagattattcataggcctgggcaaagtcaagagatgaaggaaggaagtctttcttcctgtgcggggtggggagagcagcagcagcaaactttatcactaggttgaaaggggaaataacagaaacaaaactgctgtttgtattgatggcagtcacacaggggaaatctggttcctctttctatgagtgaagaaagaggtcaggggaggtacttggcactaaaggatgatataaccttgaaaggactggctcagggaggacaagagaatggtgtgtgtgtgtgtgtgtgtgtgtgtgtgtgtgtgtgtgtgtgtgaaggggagacctggtggagtgtgaatggcaatatgctatgggagtcgttttcactcaaaaaggaatagcaaaaccctctcatacagagaaaatgacagggcgcaaggagctcaaaaatgaagaggagccttccacttctaacaagaacacactagatgtaaattggcaatgctgaaagagcagtgagtcccagagccagaaggaactttcctaaggtatccagcccgtggatagtctaaatgtcccacgtagatgtgacaagccaggaatgatcccaatttacctagctccagaattgcctgatcttcttcttgactcaatgcccccaacctcacattcatccccttgcttcccatttctagctagtaggtaacagcactgagcccgttcaaatttctcacagacagtctctattcattctgacattatctctccagtaagtcctactctggttatcaaactttctgtagtctggagaacaaacaaatccctaatatggtcattcttttcatgctgagagatcaaactcatcctattactgggatcagtaatagtaaatgcaaccctgacaccgacaggagagagtcgtcaggtacattaccacttttcttcacagctgcccctatgaatgccatgaaggaccacggaattagggatgg

SEQ ID NO: 343338 - DNA, 1028 bp, Homo sapiens
gaggctccactcacctgtccatttcaggcatcaacatttatgagccagcaccccctactggtcccacccagcgacccctggaaactctgggcaatttccgtggctggtacattagaactgaaaagctccagcagaaccaaagctggacagtgaagcagcagtgtgtggaccttctggccgagggcctgtgggaggagctgctggatgacgaacaaccagccattacggtcatggactggttcgaggacagccggctggatgcgtgcgtctatgagctgcatgtctggctgctggcggccgaccgccgcacggtcattgctcagcaccacgtggccccccgaacttctgggagaggaccccctggccgctgggtccaggtgtcccacgtattccgccattatggtcccggtgtgcgctttatccacttcctgcacaaggccaagaaccgcatggagcctggtgggctgcggcggacacgggtgaccgactcctccgtgtctgtgcagctccgggagtgactggctggctcctctgtcctgaccccacagcacctccctgacctttaggagccccaactcttagtcacctcctaggcctcttatttctccctggcccttggcttctcacttgatggacagcttcacacacccttaagcggtggactccagcattttcccagcactgtctgagccccatgagggcggagccactccttgtaaattcagtgcccgacagatgctctggcacagatgctttgtagatctctgttgagagaatgcatagacacctgtgcccaaggatgctgagggctggtctctgcttctttgaacttcactgaaactgaatgctcactgctgtgttgccagcaccacccagcccagggctgtgaacggagtgggtggcagcaaatgtgtgttgaaaggggaatgaagccattcacttcactcagttcctgtcccatttaaccgccccgatccttgatcttccattaccttcacatcccggggtccttctgaactgaccttgac

SEQ ID NO: 343339 - DNA, 809 bp, Homo sapiens
cgctgggtggggccggcgtcgggcggggccggcggggtcttcagggtaccgggctggttacagcagctctacccctcacgacgcaaacatggcagcgcagaaggaccagcagaaagatgccgaggcggaagggctgagcggcacgaccctgctgccgaagctgattccctccggtgcaggccgggagtggctggagcggcgccgcgcgaccatccggccctggagcaccttcgtggaccagcagcgcttctcacggccccgcaacctgggagagctgtgccagcgcctcgtacgcaacgtggagtactaccagagcaactatgtgttcgtgttcctgggcctcatcctgtactgtgtggtgacgtcccctatgttgctggtggctctggctgtctttttcggcgcctgttacattctctatctgcgcaccttggagtccaagcttgtgctctttggccgagaggtgagcccagcgcatcagtatgctctggctggaggcatctccttccccttcttctggctggctggtgcgggctcggccgtcttctgggtgctgggagccaccctggtggtcatcggctcccacgctgccttccaccagattgaggctgtggacggggaggagctgcagatggaacccgtgtgaggtgtcttctgggacctgccggcctcccgggccagctgccccacccctgcccatgcctgtcctgcacggctctgctgctcgggcccacagcgccgtcccatcacaagcccggggagggatcccgcctttgaaaataaagctgttatgggtgtcattcaggaaa

SEQ ID NO: 343340 - DNA, 783 bp, Homo sapiens
ccgggggtaaaaactaatggctaaggtcaggcctggtgttaactcggcaccgaggcgcaaacatggcagcgcagaaggaccagcagaaagatgccgaggcggaagggctgagcggcacgaccctgctgccgaagctgattccctccggtgcaggccgggagtggctggagcggcgccgcgcgaccatccggccctggagcaccttcgtggaccagcagcgcttctcacggccccgcaacctgggagagctgtgccagcgcctcgtacgcaacgtggagtactaccagagcaactatgtgttcgtgttcctgggcctcatcctgtactgtgtggtgacgtcccctatgttgctggtggctctggctgtctttttcggcgcctgttacattctctatctgcgcaccttggagtccaagcttgtgctctttggccgagaggtgagcccagcgcatcagtatgctctggctggaggcatctccttccccttcttctggctggctggtgcgggctcggccgtcttctgggtgctgggagccaccctggtggtcatcggctcccacgctgccttccaccagattgaggctgtggacggggaggagctgcagatggaacccgtgtgaggtgtcttctgggacctgccggcctcccgggccagctgccccacccctgcccatgcctgtcctgcacggctctgctgctcgggcccacagcgccgtcccatcacaagcccggggagggatcccgcctttgaaaataaagctgttatgggtgtcattcaggaaa

SEQ ID NO: 343341 - DNA, 167 bp, Homo sapiens
gcggccgcctactactactactgctcgaattcaagcttctaacgatgtacggggacatgcctgtcctgcacggctctgctgctcgggcccacagcgccgtcccatcacaagcccggggagggatcccgcctttgaaaataaagctgttatgggtgtcattcaggaaa

SEQ ID NO: 343342 - DNA, 905 bp, Homo sapiens
ccgggggtaaaaactaatggctaaggtcaggcctggtgttaactcggcaccgaggcgcaaacatggcagcgcagaaggaccagcagaaagatgccgaggcggaagggctgagcggcacgtgagcgagctggctctaggccctcggaccagagacccgggagtccgggcccccggccccctcctccctcctccctcgagagcctggagtcccagccccgagccgcagaagtgttggccccggaccctgctgccgaagctgattccctccggtgcaggccgggagtggctggagcggcgccgcgcgaccatccggccctggagcaccttcgtggaccagcagcgcttctcacggccccgcaacctgggagagctgtgccagcgcctcgtacgcaacgtggagtactaccagagcaactatgtgttcgtgttcctgggcctcatcctgtactgtgtggtgacgtcccctatgttgctggtggctctggctgtctttttcggcgcctgttacattctctatctgcgcaccttggagtccaagcttgtgctctttggccgagaggtgagcccagcgcatcagtatgctctggctggaggcatctccttccccttcttctggctggctggtgcgggctcggccgtcttctgggtgctgggagccaccctggtggtcatcggctcccacgctgccttccaccagattgaggctgtggacggggaggagctgcagatggaacccgtgtgaggtgtcttctgggacctgccggcctcccgggccagctgccccacccctgcccatgcctgtcctgcacggctctgctgctcgggcccacagcgccgtcccatcacaagcccggggagggatcccgcctttgaaaataaagctgttatgggtgtcattcaggaaa

SEQ ID NO: 343343 - DNA, 765 bp, Homo sapiens
cgctgggtggggccggcgtcgggcggggccggcggggtcttcagggtaccgggctggttacagcagctctacccctcacgacgcaaacatggcagcgcagaaggaccagcagaaagatgccgaggcggaagggctgagcggcacgaccctgctgccgaagctgattccctccggtgcaggccgggagtggctggagcggcgccgcgcgaccatccggccctggagcaccttcgtggaccagcagcgcttctcacggccccgcaacctgggagagctgtgccagcgcctcgtacgcaacgtggagtactaccagagcaactatgtgttcgtgttcctgggcctcatcctgtactgtgtggtgacgtcccctatgttgctggtggctctggctgtctttttcggcgcctgttacattctctatctgcgcaccttggagtccaagcttgtgctctttggccgagaggtgagcccagcgcatcagtatgctctggctggaggcatctccttccccttcttctggctggctggtgcgggctcggccgtcttctgggtgctggattgaggctgtggacggggaggagctgcagatggaacccgtgtgaggtgtcttctgggacctgccggcctcccgggccagctgccccacccctgcccatgcctgtcctgcacggctctgctgctcgggcccacagcgccgtcccatcacaagcccggggagggatcccgcctttgaaaataaagctgttatgggtgtcattcaggaaa

SEQ ID NO: 343344 - DNA, 681 bp, Homo sapiens
ccgggggtaaaaactaatggctaaggtcaggcctggtgttaactcggcaccgaggcgcaaacatggcagcgcagaaggaccagcagaaagatgccgaggcggaagggctgagcggcacgaccctgctgccgaagctgattccctccggtgcaggccgggagtggctggagcggcgccgcgcgaccatccggccctggagcaccttcgtggaccagcagcgcttctcacggccccgcaacctgggagagctgtgccagcgcctcgtacgcaacgtggagtactaccagagcaactatgtgttcgtgttcctgggcctcatcctgtactgtgtggtgacgtcccctatgttgctggtggctctggctgtctttttcggcgcctgttacattctctatctgcgcaccttggagtccaagcttgtgctctttggagccaccctggtggtcatcggctcccacgctgccttccaccagattgaggctgtggacggggaggagctgcagatggaacccgtgtgaggtgtcttctgggacctgccggcctcccgggccagctgccccacccctgcccatgcctgtcctgcacggctctgctgctcgggcccacagcgccgtcccatcacaagcccggggagggatcccgcctttgaaaataaagctgttatgggtgtcattcaggaaa

SEQ ID NO: 343345 - DNA, 1237 bp, Homo sapiens
ccgggggtaaaaactaatggctaaggtcaggcctggtgttaactcggcaccgaggcgcaaacatggcagcgcagaaggaccagcagaaagatgccgaggcggaagggctgagcggcacgtgagcgagctggctctaggccctcggaccagagacccgggagtccgggcccccggccccctcctccctcctccctcgagagcctggagtcccagccccgagccgcagaagtgttggccccggtctcctctaatgggaccctggagtctgggcccctagtcccctccctgcctgctgtacaggaatctggggtcccgggagggagtccaggcacccttagtccccttcttttgcgggggtctggggctccatcccggtccaccactgacccggccccaccccccgcaggaccctgctgccgaagctgattccctccggtgcaggccgggagtggctggagcggcgccgcgcgaccatccggccctggagcaccttcgtggaccagcagcgcttctcacggccccgcaacctgggagagctgtgccagcgcctcgtacgcaacgtggagtactaccagagcaactatgtgttcgtgttcctgggcctcatcctgtactgtgtggtgacgtcccctatgttgctggtggctctggctgtctttttcggcgcctgttacattctctatctgcgcaccttggagtccaagcttgtgctctttggtgagaaaccccctgcccagatgaatccttggtccctcaaatcttggtcttttggaatgcagacagacctcagaccccaaatccaagtccttcaaaacccaagtccgcccaagcctagatgtacactagatcccccaaacctgatcccttaaaatctcagacacaaccgatccttccatcgagtctcagccccctcaaattgctattcctcaaacccaggatccacctggctgctgtgccttaaacctactccttttcaaaccacatgactcctcccctctctctcctccccttgccgctctctgcggccaacatcagctgcaggtgcccacactggacaccaggtggccaccttacactggcctagatctgttcccgtttcttttcctgctttctggggtgtgaccagaaagaacttggaacttagagagggaagccgaggagtatgtttcatgtggttcccagactagtagtaccaaggaccactgggaaaacaaaatgccaggggaaattcccccca

SEQ ID NO: 343346 - DNA, 953 bp, Homo sapiens
  misc_feature (862)..(862): n is a, c, g, or t
ccgggggtaaaaactaatggctaaggtcaggcctggtgttaactcggcaccgaggcgcaaacatggcagcgcagaaggaccagcagaaagatgccgaggcggaagggctgagcggcacgaccctgctgccgaagctgattccctccggtgcaggccgggagtggctggagcggcgccgcgcgaccatccggccctggagcaccttcgtggaccagcagcgcttctcacggccccgcaacctgggagagctgtgccagcgcctcgtacgcaacgtggagtactaccagagcaactatgtgttcgtgttcctgggcctcatcctgtactgtgtggtgacgtcccctatgttgctggtggctctggctgtctttttcggcgcctgttacattctctatctgcgcaccttggagtccaagcttgtgctctttggccgagaggtgagcccagcgcatcagtatgctctggctggaggcatctccttccccttcttctggctggctggtgcgggctcggccgtcttctgggtgctgggagccaccctggtggtcatcggctcccacgctgccttccaccagattgaggctgtggacggggaggagctgcagatggaacccgtgtgaggtgtcttctgggacctgccggcctcccgggccagctgccccacccctgcccatgcctgtcctgcacggctctgctgctcgggcccacagcgccgtcccatcacaagcccggggagggatcccgcctttgaaaataaagctgttatgggtgtcattcaggaaaaaaaaacatccccccaaaaaacaaaaaactcgagggggggccccgtacccaattcggcctatagggggccgattacaantcactgcccgccgtttacaaggccggactggaaaaccctgcgttcccaacttattgccttgagacatccccttcggcaggtgcgtaaaacg

SEQ ID NO: 343347 - DNA, 628 bp, Homo sapiens
  misc_feature (28)..(28): n is a, c, g, or t
gcagcctgactcttgaggatcccccganattggtggctctggctgtctttttcggcgcctgttacattctctatctgcgcaccttggagtccaagcttgtgctctttggtgagaaaccccctgcccagatgaatccttggtccctcaaatcttggtcttttggaatgcagacagacctcagaccccaaatccaagtccttcaaaacccaagtccgcccaagcctagatgtacactagatcccccaaacctgatcccttaaaatctcagacacaaccgatccttccatcgagtctcagccccctcaaattgctattcctcaaacccaggatccacctggctgctgtgccttaaacctactccttttcaaaccacatgactcctcccctctctctcctccccttgccgctctctgcggccaacatcagctgcaggtgcccacactggacaccaggtggccaccttacactggcctagatctgttcccgtttcttttcctgctttctggggtgtgaccagaaagaacttggaacttagagagggaagccgaggagtatgtttcatgtggttcccagactagtagtaccaaggaccactgggaaaacaaaatgccaggggaaattcccccca

SEQ ID NO: 343348 - DNA, 979 bp, Homo sapiens
  misc_feature (888)..(888): n is a, c, g, or t
cgctgggtggggccggcgtcgggcggggccggcggggtcttcagggtaccgggctggttacagcagctctacccctcacgacgcaaacatggcagcgcagaaggaccagcagaaagatgccgaggcggaagggctgagcggcacgaccctgctgccgaagctgattccctccggtgcaggccgggagtggctggagcggcgccgcgcgaccatccggccctggagcaccttcgtggaccagcagcgcttctcacggccccgcaacctgggagagctgtgccagcgcctcgtacgcaacgtggagtactaccagagcaactatgtgttcgtgttcctgggcctcatcctgtactgtgtggtgacgtcccctatgttgctggtggctctggctgtctttttcggcgcctgttacattctctatctgcgcaccttggagtccaagcttgtgctctttggccgagaggtgagcccagcgcatcagtatgctctggctggaggcatctccttccccttcttctggctggctggtgcgggctcggccgtcttctgggtgctgggagccaccctggtggtcatcggctcccacgctgccttccaccagattgaggctgtggacggggaggagctgcagatggaacccgtgtgaggtgtcttctgggacctgccggcctcccgggccagctgccccacccctgcccatgcctgtcctgcacggctctgctgctcgggcccacagcgccgtcccatcacaagcccggggagggatcccgcctttgaaaataaagctgttatgggtgtcattcaggaaaaaaaaacatccccccaaaaaacaaaaaactcgagggggggccccgtacccaattcggcctatagggggccgattacaantcactgcccgccgtttacaaggccggactggaaaaccctgcgttcccaacttattgccttgagacatccccttcggcaggtgcgtaaaacg

SEQ ID NO: 343349 - DNA, 685 bp, Homo sapiens
ccgggggtaaaaactaatggctaaggtcaggcctggtgttaactcggcaccgaggcgcaaacatggcagcgcagaaggaccagcagaaagatgccgaggcggaagggctgagcggcacgaccctgctgccgaagctgattccctccggtgcaggccgggagtggctggagcggcgccgcgcgaccatccggccctggagcaccttcgtggaccagcagcgcttctcacggccccgcaacctgggagagctgtgccagcgcctcgtacgcaacgtggagtactaccagagcaactatgtgttcgtgttcctgggcctcatcctgtactgtgtgccgagaggtgagcccagcgcatcagtatgctctggctggaggcatctccttccccttcttctggctggctggtgcgggctcggccgtcttctgggtgctgggagccaccctggtggtcatcggctcccacgctgccttccaccagattgaggctgtggacggggaggagctgcagatggaacccgtgtgaggtgtcttctgggacctgccggcctcccgggccagctgccccacccctgcccatgcctgtcctgcacggctctgctgctcgggcccacagcgccgtcccatcacaagcccggggagggatcccgcctttgaaaataaagctgttatgggtgtcattcaggaaa

SEQ ID NO: 343350 - DNA, 949 bp, Homo sapiens
ccgggggtaaaaactaatggctaaggtcaggcctggtgttaactcggcaccgaggcgcaaacatggcagcgcagaaggaccagcagaaagatgccgaggcggaagggctgagcggcacgaccctgctgccgaagctgattccctccggtgcaggccgggagtggctggagcggcgccgcgcgaccatccggccctggagcaccttcgtggaccagcagcgcttctcacggccccgcaacctgggagagctgtgccagcgcctcgtacgcaacgtggagtactaccagagcaactatgtgttcgtgttcctgggcctcatcctgtactgtgtggtgacgtcccctatgttgctggtggctctggctgtctttttcggcgcctgttacattctctatctgcgcaccttggagtccaagcttgtgctctttggtgagaaaccccctgcccagatgaatccttggtccctcaaatcttggtcttttggaatgcagacagacctcagaccccaaatccaagtccttcaaaacccaagtccgcccaagcctagatgtacactagatcccccaaacctgatcccttaaaatctcagacacaaccgatccttccatcgagtctcagccccctcaaattgctattcctcaaacccaggatccacctggctgctgtgccttaaacctactccttttcaaaccacatgactcctcccctctctctcctccccttgccgctctctgcggccaacatcagctgcaggtgcccacactggacaccaggtggccaccttacactggcctagatctgttcccgtttcttttcctgctttctggggtgtgaccagaaagaacttggaacttagagagggaagccgaggagtatgtttcatgtggttcccagactagtagtaccaaggaccactgggaaaacaaaatgccaggggaaattcccccca

SEQ ID NO: 343351 - DNA, 425 bp, Homo sapiens
gagcccagcgcatcagtatgctctggctggaggcatctccttccccttcttctggctggctggtgcgggctcggccgtcttctgggtgctgggtgagtacagggtctgagcagctggggtggatggtgggagccaggtgcaggagtgtggccctgagctgccggctttcctgcaggagccaccctggtggtcatcggctcccacgctgccttccaccagattgaggctgtggacggggaggagctgcagatggaacccgtgtgaggtgtcttctgggacctgccggcctcccgggccagctgccccacccctgcccatgcctgtcctgcacggctctgctgctcgggcccacagcgccgtcccatcacaagcccggggagggatcccgcctttgaaaataaagctgttatgggtgtcattcagga

SEQ ID NO: 343352 - DNA, 383 bp, Homo sapiens
  misc_feature (365)..(365): n is a, c, g, or t
  misc_feature (371)..(371): n is a, c, g, or t
ccgggaaaggtacctgttatacatataagaattcgtgcaaagagccagggaatggccttaagtcttggagataaaatcaacttgtcacagaagaaaactagtatataaaaataaacaaaaagtccttgaagctttacagttaatttaggtatgggcttactggactccaacatcttttgtactctttcatgcttatatagaatctgagttcatgctgaatacttttcagccaataatttatagcctttcccttaaatcaagattgagtttaaaattatagtttgtcttttgtcttaacagttctgaatgctgtcctcaaagtatataatgtttcatgtaccaagacccttttcacagtaacagcnaccttnccgtccggcccc

SEQ ID NO: 343353 - DNA, 304 bp, Homo sapiens
actactaaattcgcggccgtcgacgtttcccagcgtctgattgtgctttccttttggcctttactttcattgggggtgattgaggtagtctgattttttagctaagtctaaacttaaggctattatttgtctaccagctagggttcaggctgcattccctgtgagtccttagataaggtctgtgaaagactgaaagcatctcctatttcattaagaatgaaatgatttgtttggagtataaggagattgataccttgtatgatgtcataaactgtgaagccacttgcttttaaaaaaaaaaaaa

SEQ ID NO: 343354 - DNA, 315 bp, Homo sapiens
acgtcagccaaggactctggagccgccgccgccgctgctgcggttcatatccggagtagacggagccgcagtagacggatccgcggctgcaccaaaccactgcccctcggagcctggtagtgggccacaagcccccagtcccagaggcgtggtgggtcgggcagagtcggaagaactggctttctagctggaagatgcggaaggggagcgactaggccgcttgcgtctgggcctggcagaagggaccgggtgggggtacgggtgggggtgcgggtcggggtgggggcggagggctaggaagctccgggtcggacg

SEQ ID NO: 343355 - DNA, 4702 bp, Homo sapiens
acgtcagccaaggactctggagccgccgccgccgctgctgcggttcatatccggagtagacggagccgcagtagacggatccgcggctgcaccaaaccactgcccctcggagcctggtagtgggccacaagcccccagtcccagaggcgtgattttctggcatccttaaatcttgtgtcaaggattggttataatataaccagaaaccatgacggcggctgagaacgtatgctacacgttaattaacgtgccaatggattcagaaccaccatctgaaattagcttaaaaaatgatctagaaaaaggagatgtaaagtcaaagactgaagctttgaagaaagtaatcattatgattctgaatggtgaaaaacttcctggacttctgatgaccatcattcgttttgtgctacctcttcaggatcacactatcaagaaattacttctggtattttgggaaattgttcctaaaacaactccagatgggagacttttacatgagatgatccttgtatgtgatgcatacagaaaggatcttcaacatcctaatgaatttattcgaggatctactcttcgttttctttgcaaattgaaagaagcagaattgctagaacctttaatgccagctattcgtgcatgtttggagcatcgacacagctatgttagaagaaatgctgttttggccatctataccatctatagaaattttgaacatcttatacctgatgctcctgaactgatacatgattttctggtgaatgagaaggatgcaagttgcaaaaggaatgcatttatgatgctaattcatgcagatcaggatcgagctttggattacttaagtacttgcattgatcaagttcaaacatttggagacattctgcagctggttattgttgaactgatttataaggtctgtcatgctaatccatcagaaagagctcgttttattcgctgcatctataacttattacagtcatccagccctgctgtaaaatatgaagctgctgggacattagtgacactctctagtgcaccaactgcaatcaaggctgctgctcagtgttacattgatttaattattaaggagagcgacaacaatgtaaaactcatagttttggatcgcttgatagaattaaaagagcatcctgctcatgaacgagtactacaggatctggttatggatatcctaagagtattgagcacaccagacttagaagtacgaaagaaaactctgcagttagcactggatcttgtctcttctagaaatgttgaagagctggttattgtcctgaagaaggaagtgataaaaacaaataatgtgtctgagcatgaagatactgacaaatacagacaactcctagtgcgaacattgcattcctgttctgtccgatttccagatatggctgcaaatgttattcctgtgttaatggaatttctcagtgacaacaacgaagcagcagctgctgatgtcttggagtttgttcgtgaagccattcagcgctttgataacctgagaatgcttattgttgagaagatgcttgaagtctttcatgctattaaatctgtcaagatttaccgaggagcattatggatcctgggagaatactgtagtaccaaggaagacattcagagtgtgatgactgagatccgcaggtcccttggagagatcccaattgtagagtcagaaataaagaaagaagctggtgaattaaaacctgaagaagaaataactgtagggccagttcagaaattggttactgaaatgggtacctatgcaactcagagtgcccttagcagttctagacccaccaagaaagaggaagacagacctcccttgagaggattccttctggatggagatttctttgttgctgcctcccttgccacaactctgaccaagattgcattgcgctatgtagctttggttcaggagaagaaaaagcaaaattcttttgttgctgaggctatgttgctcatggctactatcctgcatttgggaaaatcctctcttcctaagaagccaattactgatgatgatgtggatcgaatttccctgtgcctcaaggtcttgtctgaatgttcacctttaatgaatgacattttcaataaggaatgcagacagtccctttctcacatgttatctgctaaactagaagaagagaaattatcccaaaagaaagaatctgaaaagaggaatgtgacagtacagcctgatgaccccatttccttcatgcaactaactgctaagaatgaaatgaactgcaaggaagatcagtttcagctgagtttactggcagcaatgggtaacacacagaggaaagaggcagcagatcccctagcatctaaacttaacaaggtcacccaattgacaggtttctcagatcctgtatatgcagaagcttacgttcatgtcaaccaatatgatattgtcctggatgtacttgttgtgaaccaaaccagtgatactttgcagaattgcacattagaactagctacactaggggatctgaaacttgtggaaaagccgtctcctttgactcttgctcctcatgacttcgcaaatattaaagctaacgtcaaagtagcatcaacagaaaatggaataatttttggtaatatagtttatgatgtctctggagcagcaagtgacagaaattgtgtggttctcagtgatattcacatcgacatcatggactatatccagcctgcaacttgcactgatgcagaattccgtcagatgtgggccgaatttgaatgggaaaacaaagtgacagttaacaccaacatggttgatttaaatgactacttacagcacatattaaagtcaaccaatatgaaatgcctgactccagaaaaggccctttctggttactgtggctttatggcagccaacctttatgctcgttccatatttggtgaagatgcacttgcaaatgtcagcattgagaagccaattcaccagggaccagatgctgctgttaccggccatataagaattcgtgcaaagagccagggaatggccttaagtcttggagataaaatcaacttgtcacagaagaaaactagtatataaaaataaacaaaaagtccttgaagctttacagttaatttaggtatgggcttactggactccaacatcttttgtactctttcatgcttatatagaatctgagttcatgctgaatacttttcagccaataatttatagcctttcccttaaatcaagattgagtttaaaattatagtttgtcttttgtcttaacagttctgaatgctgtcctcaaagtatataatgtttcatgtaccaagacccttttcacagtacaataaacagatctattcataaatttttgttattttataaataaatgattacataattttagttatatggcaatggatttcttttagttgggttataaatttctattataaatttaaattactgagttgtgaatatatgcagctttattaagagaatttacaaattcaatgatataaaataaggtaggccttgattcacttggttgttttttacttatttaatattccaacattgctatctctaaaaatgcattatcatgttttgaagggatttgctcttgaatttagctccagggagaaagtatcaaaataacttttttttttttttttgagatggagtctggctctgtcacccaggctggagtgcagtggcgtgatcttggctcactgcaagctccacctcccgggtttacaccattctcctgcctcagcctcccaagtagctgggactacaggtgcccgccaccacgcctggctaattttttgtatttttagtagagacgggctttcaccatgttggccaggatggtctcgatctcctgacctcgtgatccgcccgcctcagcctcccggagtgttgggattacaggcatgagccaccgcacccggcccaaaataacttgagaaaacagatcgctctgcagtttaaagaagtattatgtacccgaactgaaatagatatactgttcttaattatcctgaatcataatgaagagtagataatccaaaatagattttttaatcattcacatttagtttggggtgttctatgtttgttaggaataaaactggttctaaccaattactgaagctggtactgggaggattcaactagagaggattcaaaaagctgcctttttctctgttgcctccgtgccttactcacatttagtttagggtgttctatgtttgttaggaataaaactggttctaaccaattactgaagctggtactgggaggattcaactagagaggattcaaaaagctgcctttttctctgttgcctctgtgccttactcactcgtctccttttcctcacttcacactaggactgggtaccatcacactgcagtataattccaaatgcatttccaagctaagtttcccagcgtctgattgtgctttccttttggcctttactttcattgggggtgattgaggtagtctgattttttagctaagtctaaacttaaggctattatttgtctaccagctagggttcaggctgcattccctgtgagtccttagataaggtctgtgaaagactgaaagcatctcctatttcattaagaatgaaatgatttgtttggagtataaggagattgataccttgtatgatgtcataaactgtgaagccacttgcttttaaaaaaaaaaaaa

SEQ ID NO: 343356 - DNA, 4800 bp, Homo sapiens
acgtcagccaaggactctggagccgccgccgccgctgctgcggttcatatccggagtagacggagccgcagtagacggatccgcggctgcaccaaaccactgcccctcggagcctggtagtgggccacaagcccccagtcccagaggcgtggtgggtcgggcagagtcggaagaactggctttctagctggaagatgcggaaggggagcgactaggccgcttgcgtctgggcctggcagaagggaccggattttctggcatccttaaatcttgtgtcaaggattggttataatataaccagaaaccatgacggcggctgagaacgtatgctacacgttaattaacgtgccaatggattcagaaccaccatctgaaattagcttaaaaaatgatctagaaaaaggagatgtaaagtcaaagactgaagctttgaagaaagtaatcattatgattctgaatggtgaaaaacttcctggacttctgatgaccatcattcgttttgtgctacctcttcaggatcacactatcaagaaattacttctggtattttgggaaattgttcctaaaacaactccagatgggagacttttacatgagatgatccttgtatgtgatgcatacagaaaggatcttcaacatcctaatgaatttattcgaggatctactcttcgttttctttgcaaattgaaagaagcagaattgctagaacctttaatgccagctattcgtgcatgtttggagcatcgacacagctatgttagaagaaatgctgttttggccatctataccatctatagaaattttgaacatcttatacctgatgctcctgaactgatacatgattttctggtgaatgagaaggatgcaagttgcaaaaggaatgcatttatgatgctaattcatgcagatcaggatcgagctttggattacttaagtacttgcattgatcaagttcaaacatttggagacattctgcagctggttattgttgaactgatttataaggtctgtcatgctaatccatcagaaagagctcgttttattcgctgcatctataacttattacagtcatccagccctgctgtaaaatatgaagctgctgggacattagtgacactctctagtgcaccaactgcaatcaaggctgctgctcagtgttacattgatttaattattaaggagagcgacaacaatgtaaaactcatagttttggatcgcttgatagaattaaaagagcatcctgctcatgaacgagtactacaggatctggttatggatatcctaagagtattgagcacaccagacttagaagtacgaaagaaaactctgcagttagcactggatcttgtctcttctagaaatgttgaagagctggttattgtcctgaagaaggaagtgataaaaacaaataatgtgtctgagcatgaagatactgacaaatacagacaactcctagtgcgaacattgcattcctgttctgtccgatttccagatatggctgcaaatgttattcctgtgttaatggaatttctcagtgacaacaacgaagcagcagctgctgatgtcttggagtttgttcgtgaagccattcagcgctttgataacctgagaatgcttattgttgagaagatgcttgaagtctttcatgctattaaatctgtcaagatttaccgaggagcattatggatcctgggagaatactgtagtaccaaggaagacattcagagtgtgatgactgagatccgcaggtcccttggagagatcccaattgtagagtcagaaataaagaaagaagctggtgaattaaaacctgaagaagaaataactgtagggccagttcagaaattggttactgaaatgggtacctatgcaactcagagtgcccttagcagttctagacccaccaagaaagaggaagacagacctcccttgagaggattccttctggatggagatttctttgttgctgcctcccttgccacaactctgaccaagattgcattgcgctatgtagctttggttcaggagaagaaaaagcaaaattcttttgttgctgaggctatgttgctcatggctactatcctgcatttgggaaaatcctctcttcctaagaagccaattactgatgatgatgtggatcgaatttccctgtgcctcaaggtcttgtctgaatgttcacctttaatgaatgacattttcaataaggaatgcagacagtccctttctcacatgttatctgctaaactagaagaagagaaattatcccaaaagaaagaatctgaaaagaggaatgtgacagtacagcctgatgaccccatttccttcatgcaactaactgctaagaatgaaatgaactgcaaggaagatcagtttcagctgagtttactggcagcaatgggtaacacacagaggaaagaggcagcagatcccctagcatctaaacttaacaaggtcacccaattgacaggtttctcagatcctgtatatgcagaagcttacgttcatgtcaaccaatatgatattgtcctggatgtacttgttgtgaaccaaaccagtgatactttgcagaattgcacattagaactagctacactaggggatctgaaacttgtggaaaagccgtctcctttgactcttgctcctcatgacttcgcaaatattaaagctaacgtcaaagtagcatcaacagaaaatggaataatttttggtaatatagtttatgatgtctctggagcagcaagtgacagaaattgtgtggttctcagtgatattcacatcgacatcatggactatatccagcctgcaacttgcactgatgcagaattccgtcagatgtgggccgaatttgaatgggaaaacaaagtgacagttaacaccaacatggttgatttaaatgactacttacagcacatattaaagtcaaccaatatgaaatgcctgactccagaaaaggccctttctggttactgtggctttatggcagccaacctttatgctcgttccatatttggtgaagatgcacttgcaaatgtcagcattgagaagccaattcaccagggaccagatgctgctgttaccggccatataagaattcgtgcaaagagccagggaatggccttaagtcttggagataaaatcaacttgtcacagaagaaaactagtatataaaaataaacaaaaagtccttgaagctttacagttaatttaggtatgggcttactggactccaacatcttttgtactctttcatgcttatatagaatctgagttcatgctgaatacttttcagccaataatttatagcctttcccttaaatcaagattgagtttaaaattatagtttgtcttttgtcttaacagttctgaatgctgtcctcaaagtatataatgtttcatgtaccaagacccttttcacagtacaataaacagatctattcataaatttttgttattttataaataaatgattacataattttagttatatggcaatggatttcttttagttgggttataaatttctattataaatttaaattactgagttgtgaatatatgcagctttattaagagaatttacaaattcaatgatataaaataaggtaggccttgattcacttggttgttttttacttatttaatattccaacattgctatctctaaaaatgcattatcatgttttgaagggatttgctcttgaatttagctccagggagaaagtatcaaaataacttttttttttttttttgagatggagtctggctctgtcacccaggctggagtgcagtggcgtgatcttggctcactgcaagctccacctcccgggtttacaccattctcctgcctcagcctcccaagtagctgggactacaggtgcccgccaccacgcctggctaattttttgtatttttagtagagacgggctttcaccatgttggccaggatggtctcgatctcctgacctcgtgatccgcccgcctcagcctcccggagtgttgggattacaggcatgagccaccgcacccggcccaaaataacttgagaaaacagatcgctctgcagtttaaagaagtattatgtacccgaactgaaatagatatactgttcttaattatcctgaatcataatgaagagtagataatccaaaatagattttttaatcattcacatttagtttggggtgttctatgtttgttaggaataaaactggttctaaccaattactgaagctggtactgggaggattcaactagagaggattcaaaaagctgcctttttctctgttgcctccgtgccttactcacatttagtttagggtgttctatgtttgttaggaataaaactggttctaaccaattactgaagctggtactgggaggattcaactagagaggattcaaaaagctgcctttttctctgttgcctctgtgccttactcactcgtctccttttcctcacttcacactaggactgggtaccatcacactgcagtataattccaaatgcatttccaagctaagtttcccagcgtctgattgtgctttccttttggcctttactttcattgggggtgattgaggtagtctgattttttagctaagtctaaacttaaggctattatttgtctaccagctagggttcaggctgcattccctgtgagtccttagataaggtctgtgaaagactgaaagcatctcctatttcattaagaatgaaatgatttgtttggagtataaggagattgataccttgtatgatgtcataaactgtgaagccacttgcttttaaaaaaaaaaaaa

SEQ ID NO: 343357 - DNA, 4963 bp, Homo sapiens
gacccgcggacatagagtcggaacccaccaaggaccgcgataaagcgctttagggttttggcagagtattcaggcacaaggtctcttaacttgagcatgcagattgtgtgttgtgtaaaaaccatacggtccataacattgtggggtgtggctggggggactgtcactgttctgtgggccttcattcggctatacagcattctcaaacactggaccgggatgcgatgagggagtgatagataatataccttatgccagagctgataatgtggtttttactagaatttatttttatgggaacacgatatagattgacctgccctttctaatactttaaaaggtcactataggtacttgtttgtgggttttttttttttaatttgtaatgatatgtctgtgtttatttttctagattttctggcatccttaaatcttgtgtcaaggattggttataatataaccagaaaccatgacggcggctgagaacgtatgctacacgttaattaacgtgccaatggattcagaaccaccatctgaaattagcttaaaaaatgatctagaaaaaggagatgtaaagtcaaagactgaagctttgaagaaagtaatcattatgattctgaatggtgaaaaacttcctggacttctgatgaccatcattcgttttgtgctacctcttcaggatcacactatcaagaaattacttctggtattttgggaaattgttcctaaaacaactccagatgggagacttttacatgagatgatccttgtatgtgatgcatacagaaaggatcttcaacatcctaatgaatttattcgaggatctactcttcgttttctttgcaaattgaaagaagcagaattgctagaacctttaatgccagctattcgtgcatgtttggagcatcgacacagctatgttagaagaaatgctgttttggccatctataccatctatagaaattttgaacatcttatacctgatgctcctgaactgatacatgattttctggtgaatgagaaggatgcaagttgcaaaaggaatgcatttatgatgctaattcatgcagatcaggatcgagctttggattacttaagtacttgcattgatcaagttcaaacatttggagacattctgcagctggttattgttgaactgatttataaggtctgtcatgctaatccatcagaaagagctcgttttattcgctgcatctataacttattacagtcatccagccctgctgtaaaatatgaagctgctgggacattagtgacactctctagtgcaccaactgcaatcaaggctgctgctcagtgttacattgatttaattattaaggagagcgacaacaatgtaaaactcatagttttggatcgcttgatagaattaaaagagcatcctgctcatgaacgagtactacaggatctggttatggatatcctaagagtattgagcacaccagacttagaagtacgaaagaaaactctgcagttagcactggatcttgtctcttctagaaatgttgaagagctggttattgtcctgaagaaggaagtgataaaaacaaataatgtgtctgagcatgaagatactgacaaatacagacaactcctagtgcgaacattgcattcctgttctgtccgatttccagatatggctgcaaatgttattcctgtgttaatggaatttctcagtgacaacaacgaagcagcagctgctgatgtcttggagtttgttcgtgaagccattcagcgctttgataacctgagaatgcttattgttgagaagatgcttgaagtctttcatgctattaaatctgtcaagatttaccgaggagcattatggatcctgggagaatactgtagtaccaaggaagacattcagagtgtgatgactgagatccgcaggtcccttggagagatcccaattgtagagtcagaaataaagaaagaagctggtgaattaaaacctgaagaagaaataactgtagggccagttcagaaattggttactgaaatgggtacctatgcaactcagagtgcccttagcagttctagacccaccaagaaagaggaagacagacctcccttgagaggattccttctggatggagatttctttgttgctgcctcccttgccacaactctgaccaagattgcattgcgctatgtagctttggttcaggagaagaaaaagcaaaattcttttgttgctgaggctatgttgctcatggctactatcctgcatttgggaaaatcctctcttcctaagaagccaattactgatgatgatgtggatcgaatttccctgtgcctcaaggtcttgtctgaatgttcacctttaatgaatgacattttcaataaggaatgcagacagtccctttctcacatgttatctgctaaactagaagaagagaaattatcccaaaagaaagaatctgaaaagaggaatgtgacagtacagcctgatgaccccatttccttcatgcaactaactgctaagaatgaaatgaactgcaaggaagatcagtttcagctgagtttactggcagcaatgggtaacacacagaggaaagaggcagcagatcccctagcatctaaacttaacaaggtcacccaattgacaggtttctcagatcctgtatatgcagaagcttacgttcatgtcaaccaatatgatattgtcctggatgtacttgttgtgaaccaaaccagtgatactttgcagaattgcacattagaactagctacactaggggatctgaaacttgtggaaaagccgtctcctttgactcttgctcctcatgacttcgcaaatattaaagctaacgtcaaagtagcatcaacagaaaatggaataatttttggtaatatagtttatgatgtctctggagcagcaagtgacagaaattgtgtggttctcagtgatattcacatcgacatcatggactatatccagcctgcaacttgcactgatgcagaattccgtcagatgtgggccgaatttgaatgggaaaacaaagtgacagttaacaccaacatggttgatttaaatgactacttacagcacatattaaagtcaaccaatatgaaatgcctgactccagaaaaggccctttctggttactgtggctttatggcagccaacctttatgctcgttccatatttggtgaagatgcacttgcaaatgtcagcattgagaagccaattcaccagggaccagatgctgctgttaccggccatataagaattcgtgcaaagagccagggaatggccttaagtcttggagataaaatcaacttgtcacagaagaaaactagtatataaaaataaacaaaaagtccttgaagctttacagttaatttaggtatgggcttactggactccaacatcttttgtactctttcatgcttatatagaatctgagttcatgctgaatacttttcagccaataatttatagcctttcccttaaatcaagattgagtttaaaattatagtttgtcttttgtcttaacagttctgaatgctgtcctcaaagtatataatgtttcatgtaccaagacccttttcacagtacaataaacagatctattcataaatttttgttattttataaataaatgattacataattttagttatatggcaatggatttcttttagttgggttataaatttctattataaatttaaattactgagttgtgaatatatgcagctttattaagagaatttacaaattcaatgatataaaataaggtaggccttgattcacttggttgttttttacttatttaatattccaacattgctatctctaaaaatgcattatcatgttttgaagggatttgctcttgaatttagctccagggagaaagtatcaaaataacttttttttttttttttgagatggagtctggctctgtcacccaggctggagtgcagtggcgtgatcttggctcactgcaagctccacctcccgggtttacaccattctcctgcctcagcctcccaagtagctgggactacaggtgcccgccaccacgcctggctaattttttgtatttttagtagagacgggctttcaccatgttggccaggatggtctcgatctcctgacctcgtgatccgcccgcctcagcctcccggagtgttgggattacaggcatgagccaccgcacccggcccaaaataacttgagaaaacagatcgctctgcagtttaaagaagtattatgtacccgaactgaaatagatatactgttcttaattatcctgaatcataatgaagagtagataatccaaaatagattttttaatcattcacatttagtttggggtgttctatgtttgttaggaataaaactggttctaaccaattactgaagctggtactgggaggattcaactagagaggattcaaaaagctgcctttttctctgttgcctccgtgccttactcacatttagtttagggtgttctatgtttgttaggaataaaactggttctaaccaattactgaagctggtactgggaggattcaactagagaggattcaaaaagctgcctttttctctgttgcctctgtgccttactcactcgtctccttttcctcacttcacactaggactgggtaccatcacactgcagtataattccaaatgcatttccaagctaagtttcccagcgtctgattgtgctttccttttggcctttactttcattgggggtgattgaggtagtctgattttttagctaagtctaaacttaaggctattatttgtctaccagctagggttcaggctgcattccctgtgagtccttagataaggtctgtgaaagactgaaagcatctcctatttcattaagaatgaaatgatttgtttggagtataaggagattgataccttgtatgatgtcataaactgtgaagccacttgcttttaaaaaaaaaaaaa

SEQ ID NO: 343358 - DNA, 4648 bp, Homo sapiens
acgtcagccaaggactctggagccgccgccgccgctgctgcggttcatatccggagtagacggagccgcagtagacggatccgcggctgcaccaaaccactgcccctcggagcctggtagtgggccacaagcccccagtcccagaggcgtgattttctggcatccttaaatcttgtgtcaaggattggttataatataaccagaaaccatgacggcggctgagaacgtatgctacacgttaattaacgtgccaatggattcagaaccaccatctgaaattagcttaaaaaatgatctagaaaaaggagatgtaaagtcaaagactgaagctttgaagaaagtaatcattatgattctgaatggtgaaaaacttcctggacttctgatgaccatcattcgttttgtgctacctcttcaggatcacactatcaagaaattacttctggtattttgggaaattgttcctaaaacaactccagatgggagacttttacatgagatgatccttgtatgtgatgcatacagaaaggatcttcaacatcctaatgaatttattcgaggatctactcttcgttttctttgcaaattgaaagaagcagaattgctagaacctttaatgccagctattcgtgcatgtttggagcatcgacacagctatgttagaagaaatgctgttttggccatctataccatctatagaaattttgaacatcttatacctgatgctcctgaactgatacatgattttctggtgaatgagaaggatgcaagttgcaaaaggaatgcatttatgatgctaattcatgcagatcaggatcgagctttggattacttaagtacttgcattgatcaagttcaaacatttggagacattctgcagctggttattgttgaactgatttataaggtctgtcatgctaatccatcagaaagagctcgttttattcgctgcatctataacttattacagtcatccagccctgctgtaaaatatgaagctgctgggacattagtgacactctctagtgcaccaactgcaatcaaggctgctgctcagtgttacattgatttaattattaaggagagcgacaacaatgtaaaactcatagttttggatcgcttgatagaattaaaagagcatcctgctcatgaacgagtactacaggatctggttatggatatcctaagagtattgagcacaccagacttagaagtacgaaagaaaactctgcagttagcactggatcttgtctcttctagaaatgttgaagagctggttattgtcctgaagaaggaagtgataatgcgaacattgcattcctgttctgtccgatttccagatatggctgcaaatgttattcctgtgttaatggaatttctcagtgacaacaacgaagcagcagctgctgatgtcttggagtttgttcgtgaagccattcagcgctttgataacctgagaatgcttattgttgagaagatgcttgaagtctttcatgctattaaatctgtcaagatttaccgaggagcattatggatcctgggagaatactgtagtaccaaggaagacattcagagtgtgatgactgagatccgcaggtcccttggagagatcccaattgtagagtcagaaataaagaaagaagctggtgaattaaaacctgaagaagaaataactgtagggccagttcagaaattggttactgaaatgggtacctatgcaactcagagtgcccttagcagttctagacccaccaagaaagaggaagacagacctcccttgagaggattccttctggatggagatttctttgttgctgcctcccttgccacaactctgaccaagattgcattgcgctatgtagctttggttcaggagaagaaaaagcaaaattcttttgttgctgaggctatgttgctcatggctactatcctgcatttgggaaaatcctctcttcctaagaagccaattactgatgatgatgtggatcgaatttccctgtgcctcaaggtcttgtctgaatgttcacctttaatgaatgacattttcaataaggaatgcagacagtccctttctcacatgttatctgctaaactagaagaagagaaattatcccaaaagaaagaatctgaaaagaggaatgtgacagtacagcctgatgaccccatttccttcatgcaactaactgctaagaatgaaatgaactgcaaggaagatcagtttcagctgagtttactggcagcaatgggtaacacacagaggaaagaggcagcagatcccctagcatctaaacttaacaaggtcacccaattgacaggtttctcagatcctgtatatgcagaagcttacgttcatgtcaaccaatatgatattgtcctggatgtacttgttgtgaaccaaaccagtgatactttgcagaattgcacattagaactagctacactaggggatctgaaacttgtggaaaagccgtctcctttgactcttgctcctcatgacttcgcaaatattaaagctaacgtcaaagtagcatcaacagaaaatggaataatttttggtaatatagtttatgatgtctctggagcagcaagtgacagaaattgtgtggttctcagtgatattcacatcgacatcatggactatatccagcctgcaacttgcactgatgcagaattccgtcagatgtgggccgaatttgaatgggaaaacaaagtgacagttaacaccaacatggttgatttaaatgactacttacagcacatattaaagtcaaccaatatgaaatgcctgactccagaaaaggccctttctggttactgtggctttatggcagccaacctttatgctcgttccatatttggtgaagatgcacttgcaaatgtcagcattgagaagccaattcaccagggaccagatgctgctgttaccggccatataagaattcgtgcaaagagccagggaatggccttaagtcttggagataaaatcaacttgtcacagaagaaaactagtatataaaaataaacaaaaagtccttgaagctttacagttaatttaggtatgggcttactggactccaacatcttttgtactctttcatgcttatatagaatctgagttcatgctgaatacttttcagccaataatttatagcctttcccttaaatcaagattgagtttaaaattatagtttgtcttttgtcttaacagttctgaatgctgtcctcaaagtatataatgtttcatgtaccaagacccttttcacagtacaataaacagatctattcataaatttttgttattttataaataaatgattacataattttagttatatggcaatggatttcttttagttgggttataaatttctattataaatttaaattactgagttgtgaatatatgcagctttattaagagaatttacaaattcaatgatataaaataaggtaggccttgattcacttggttgttttttacttatttaatattccaacattgctatctctaaaaatgcattatcatgttttgaagggatttgctcttgaatttagctccagggagaaagtatcaaaataacttttttttttttttttgagatggagtctggctctgtcacccaggctggagtgcagtggcgtgatcttggctcactgcaagctccacctcccgggtttacaccattctcctgcctcagcctcccaagtagctgggactacaggtgcccgccaccacgcctggctaattttttgtatttttagtagagacgggctttcaccatgttggccaggatggtctcgatctcctgacctcgtgatccgcccgcctcagcctcccggagtgttgggattacaggcatgagccaccgcacccggcccaaaataacttgagaaaacagatcgctctgcagtttaaagaagtattatgtacccgaactgaaatagatatactgttcttaattatcctgaatcataatgaagagtagataatccaaaatagattttttaatcattcacatttagtttggggtgttctatgtttgttaggaataaaactggttctaaccaattactgaagctggtactgggaggattcaactagagaggattcaaaaagctgcctttttctctgttgcctccgtgccttactcacatttagtttagggtgttctatgtttgttaggaataaaactggttctaaccaattactgaagctggtactgggaggattcaactagagaggattcaaaaagctgcctttttctctgttgcctctgtgccttactcactcgtctccttttcctcacttcacactaggactgggtaccatcacactgcagtataattccaaatgcatttccaagctaagtttcccagcgtctgattgtgctttccttttggcctttactttcattgggggtgattgaggtagtctgattttttagctaagtctaaacttaaggctattatttgtctaccagctagggttcaggctgcattccctgtgagtccttagataaggtctgtgaaagactgaaagcatctcctatttcattaagaatgaaatgatttgtttggagtataaggagattgataccttgtatgatgtcataaactgtgaagccacttgcttttaaaaaaaaaaaaa

SEQ ID NO: 343359 - DNA, 4648 bp, Homo sapiens
acgtcagccaaggactctggagccgccgccgccgctgctgcggttcatatccggagtagacggagccgcagtagacggatccgcggctgcaccaaaccactgcccctcggagcctggtagtgggccacaagcccccagtcccagaggcgtgattttctggcatccttaaatcttgtgtcaaggattggttataatataaccagaaaccatgacggcggctgagaacgtatgctacacgttaattaacgtgccaatggattcagaaccaccatctgaaattagcttaaaaaatgatctagaaaaaggagatgtaaagtcaaagactgaagctttgaagaaagtaatcattatgattctgaatggtgaaaaacttcctggacttctgatgaccatcattcgttttgtgctacctcttcaggatcacactatcaagaaattacttctggtattttgggaaattgttcctaaaacaactccagatgggagacttttacatgagatgatccttgtatgtgatgcatacagaaaggatcttcaacatcctaatgaatttattcgaggatctactcttcgttttctttgcaaattgaaagaagcagaattgctagaacctttaatgccagctattcgtgcatgtttggagcatcgacacagctatgttagaagaaatgctgttttggccatctataccatctatagaaattttgaacatcttatacctgatgctcctgaactgatacatgattttctggtgaatgagaaggatgcaagttgcaaaaggaatgcatttatgatgctaattcatgcagatcaggatcgagctttggattacttaagtacttgcattgatcaagttcaaacatttggagacattctgcagctggttattgttgaactgatttataaggtctgtcatgctaatccatcagaaagagctcgttttattcgctgcatctataacttattacagtcatccagccctgctgtaaaatatgaagctgctgggacattagtgacactctctagtgcaccaactgcaatcaaggctgctgctcagtgttacattgatttaattattaaggagagcgacaacaatgtaaaactcatagttttggatcgcttgatagaattaaaagagcatcctgctcatgaacgagtactacaggatctggttatggatatcctaagagtattgagcacaccagacttagaagtacgaaagaaaactctgcagttagcactggatcttgtctcttctagaaatgttgaagagctggttattgtcctgaagaaggaagtgataaaaacaaataatgtgtctgagcatgaagatactgacaaatacagacaactcctagtgcgaacattgcattcctgttctgtccgatttccagatatggctgcaaatgttattcctgtgttaatggaatttctcagtgacaacaacgaagcagcagctgctgatgtcttggagtttgttcgtgaagccattcagcgctttgataacctgagaatgcttattgttgagaagatgcttgaagtctttcatgctattaaatctgtcaagatttaccgaggagcattatggatcctgggagaatactgtagtaccaaggaagacattcagagtgtgatgactgagatccgcaggtcccttggagagatcccaattgtagagtcagaaataaagaaagaagctggtgaattaaaacctgaagaagaaataactgtagggccagttcagaaattggttactgaaatgggtacctatgcaactcagagtgcccttagcagttctagacccaccaagaaagaggaagacagacctcccttgagaggattccttctggatggagatttctttgttgctgcctcccttgccacaactctgaccaagattgcattgcgctatgtagctttggttcaggagaagaaaaagcaaaattcttttgttgctgaggctatgttgctcatggctactatcctgcatttgggaaaatcctctcttcctaagaagccaattactgatgatgatgtggatcgaatttccctgtgcctcaaggtcttgtctgaatgttcacctttaatgaatgacattttcaataaggaatgcagacagtccctttctcacatgttatctgctaaactagaagaagagaaattatcccaaaagatgcaactaactgctaagaatgaaatgaactgcaaggaagatcagtttcagctgagtttactggcagcaatgggtaacacacagaggaaagaggcagcagatcccctagcatctaaacttaacaaggtcacccaattgacaggtttctcagatcctgtatatgcagaagcttacgttcatgtcaaccaatatgatattgtcctggatgtacttgttgtgaaccaaaccagtgatactttgcagaattgcacattagaactagctacactaggggatctgaaacttgtggaaaagccgtctcctttgactcttgctcctcatgacttcgcaaatattaaagctaacgtcaaagtagcatcaacagaaaatggaataatttttggtaatatagtttatgatgtctctggagcagcaagtgacagaaattgtgtggttctcagtgatattcacatcgacatcatggactatatccagcctgcaacttgcactgatgcagaattccgtcagatgtgggccgaatttgaatgggaaaacaaagtgacagttaacaccaacatggttgatttaaatgactacttacagcacatattaaagtcaaccaatatgaaatgcctgactccagaaaaggccctttctggttactgtggctttatggcagccaacctttatgctcgttccatatttggtgaagatgcacttgcaaatgtcagcattgagaagccaattcaccagggaccagatgctgctgttaccggccatataagaattcgtgcaaagagccagggaatggccttaagtcttggagataaaatcaacttgtcacagaagaaaactagtatataaaaataaacaaaaagtccttgaagctttacagttaatttaggtatgggcttactggactccaacatcttttgtactctttcatgcttatatagaatctgagttcatgctgaatacttttcagccaataatttatagcctttcccttaaatcaagattgagtttaaaattatagtttgtcttttgtcttaacagttctgaatgctgtcctcaaagtatataatgtttcatgtaccaagacccttttcacagtacaataaacagatctattcataaatttttgttattttataaataaatgattacataattttagttatatggcaatggatttcttttagttgggttataaatttctattataaatttaaattactgagttgtgaatatatgcagctttattaagagaatttacaaattcaatgatataaaataaggtaggccttgattcacttggttgttttttacttatttaatattccaacattgctatctctaaaaatgcattatcatgttttgaagggatttgctcttgaatttagctccagggagaaagtatcaaaataacttttttttttttttttgagatggagtctggctctgtcacccaggctggagtgcagtggcgtgatcttggctcactgcaagctccacctcccgggtttacaccattctcctgcctcagcctcccaagtagctgggactacaggtgcccgccaccacgcctggctaattttttgtatttttagtagagacgggctttcaccatgttggccaggatggtctcgatctcctgacctcgtgatccgcccgcctcagcctcccggagtgttgggattacaggcatgagccaccgcacccggcccaaaataacttgagaaaacagatcgctctgcagtttaaagaagtattatgtacccgaactgaaatagatatactgttcttaattatcctgaatcataatgaagagtagataatccaaaatagattttttaatcattcacatttagtttggggtgttctatgtttgttaggaataaaactggttctaaccaattactgaagctggtactgggaggattcaactagagaggattcaaaaagctgcctttttctctgttgcctccgtgccttactcacatttagtttagggtgttctatgtttgttaggaataaaactggttctaaccaattactgaagctggtactgggaggattcaactagagaggattcaaaaagctgcctttttctctgttgcctctgtgccttactcactcgtctccttttcctcacttcacactaggactgggtaccatcacactgcagtataattccaaatgcatttccaagctaagtttcccagcgtctgattgtgctttccttttggcctttactttcattgggggtgattgaggtagtctgattttttagctaagtctaaacttaaggctattatttgtctaccagctagggttcaggctgcattccctgtgagtccttagataaggtctgtgaaagactgaaagcatctcctatttcattaagaatgaaatgatttgtttggagtataaggagattgataccttgtatgatgtcataaactgtgaagccacttgcttttaaaaaaaaaaaaa

SEQ ID NO: 343360 - DNA, 4654 bp, Homo sapiens
acgtcagccaaggactctggagccgccgccgccgctgctgcggttcatatccggagtagacggagccgcagtagacggatccgcggctgcaccaaaccactgcccctcggagcctggtagtgggccacaagcccccagtcccagaggcgtgattttctggcatccttaaatcttgtgtcaaggattggttataatataaccagaaaccatgacggcggctgagaacgtatgctacacgttaattaacgtgccaatggattcagaaccaccatctgaaattagcttaaaaaatgatctagaaaaaggagatgtaaagtcaaagactgaagctttgaagaaagtaatcattatgattctgaatggtgaaaaacttcctggacttctgatgaccatcattcgttttgtgctacctcttcaggatcacactatcaagaaattacttctggtattttgggaaattgttcctaaaacaactccagatgggagacttttacatgagatgatccttgtatgtgatgcatacagaaaggatcttcaacatcctaatgaatttattcgaggatctactcttcgttttctttgcaaattgaaagaagcagaattgctagaacctttaatgccagctattcgtgcatgtttggagcatcgacacagctatgttagaagaaatgctgttttggccatctataccatctatagaaattttgaacatcttatacctgatgctcctgaactgatacatgattttctggtgaatgagaaggatgcaagttgcaaaaggaatgcatttatgatgctaattcatgcagatcaggatcgagctttggattacttaagtacttgcattgatcaagttcaaacatttggagacattctgcagctggttattgttgaactgatttataaggtctgtcatgctaatccatcagaaagagctcgttttattcgctgcatctataacttattacagtcatccagccctgctgtaaaatatgaagctgctgggacattagtgacactctctagtgcaccaactgcaatcaaggctgctgctcagtgttacattgatttaattattaaggagagcgacaacaatgtaaaactcatagttttggatcgcttgatagaattaaaagagcatcctgctcatgaacgagtactacaggatctggttatggatatcctaagagtattgagcacaccagacttagaagtacgaaagaaaactctgcagttagcactggatcttgtctcttctagaaatgttgaagagctggttattgtcctgaagaaggaagtgataaaaacaaataatgtgtctgagcatgaagatactgacaaatacagacaactcctagtgcgaacattgcattcctgttctgtccgatttccagatatggctgcaaatgttattcctgtgttaatggaatttctcagtgacaacaacgaagcagcagctgctgatgtcttggagtttgttcgtgaagccattcagcgctttgataacctgagaatgcttattgttgagaagatgcttgaagtctttcatgctattaaatctgtcaagatttaccgaggagcattatggatcctgggagaatactgtagtaccaaggaagacattcagagtgtgatgactgagatccgcaggtcccttggagagatcccaattgtagagtcagaaataaagaaagaagctggtgaattaaaacctgaagaagaaataactgtagggccagttcagaaattggttactgaaatgggtacctatgcaactcagagtgcccttagcagttctagacccaccaagaaagaggaagacagacctcccttgagaggattccttctggatggagatttctttgttgctgcctcccttgccacaactctgaccaagattgcattgcgctatgtagctttggttcaggagaagaaaaagcaaaattcttttgttgctgaggctatgttgctcatggctactatcctgcatttgggaaaatcctctcttcctaagaagccaattactgatgatgatgtggatcgaatttccctgtgcctcaaggtcttgtctgaatgttcacctttaatgaatgacattttcaataaggaatgcagacagtccctttctcacatgttatctgctaaactagaagaagagaaattatcccaaaagaaagaatctgaaaagaggaatgtgacagtacagcctgatgaccccatttccttcatgcaactaactgctaagaatgaaatgaactgcaaggaagatcagtttcagctgagtttactggcagcaatgggtaacacacagaggaaagaggcagcagatcccctagcatctaaacttaacaaggtcacccaattgacaggtttctcagatcctgtatatgcagaagcttacgttcatgtcaaccaatatgatattgtcctggatgtacttgttgtgaaccaaaccagtgatactttgcagaattgcacattagaactagctacactaggggatctgaaacttgtggaaaagccgtctcctttgactcttgctcctcatgacttcgcaaatattaaagctaacgtcaaagtagcatcaacagaaaatggaataatttttggtaatatagtttatgatgtctctggagcagcaagtgacagaaattgtgtggttctcagtgatattcacatcgacatcatggactatatccagcctgcaacttgcactgatgcagaattccgtcagatgtgggccgaatttgaatgggaaaacaaaatattaaagtcaaccaatatgaaatgcctgactccagaaaaggccctttctggttactgtggctttatggcagccaacctttatgctcgttccatatttggtgaagatgcacttgcaaatgtcagcattgagaagccaattcaccagggaccagatgctgctgttaccggccatataagaattcgtgcaaagagccagggaatggccttaagtcttggagataaaatcaacttgtcacagaagaaaactagtatataaaaataaacaaaaagtccttgaagctttacagttaatttaggtatgggcttactggactccaacatcttttgtactctttcatgcttatatagaatctgagttcatgctgaatacttttcagccaataatttatagcctttcccttaaatcaagattgagtttaaaattatagtttgtcttttgtcttaacagttctgaatgctgtcctcaaagtatataatgtttcatgtaccaagacccttttcacagtacaataaacagatctattcataaatttttgttattttataaataaatgattacataattttagttatatggcaatggatttcttttagttgggttataaatttctattataaatttaaattactgagttgtgaatatatgcagctttattaagagaatttacaaattcaatgatataaaataaggtaggccttgattcacttggttgttttttacttatttaatattccaacattgctatctctaaaaatgcattatcatgttttgaagggatttgctcttgaatttagctccagggagaaagtatcaaaataacttttttttttttttttgagatggagtctggctctgtcacccaggctggagtgcagtggcgtgatcttggctcactgcaagctccacctcccgggtttacaccattctcctgcctcagcctcccaagtagctgggactacaggtgcccgccaccacgcctggctaattttttgtatttttagtagagacgggctttcaccatgttggccaggatggtctcgatctcctgacctcgtgatccgcccgcctcagcctcccggagtgttgggattacaggcatgagccaccgcacccggcccaaaataacttgagaaaacagatcgctctgcagtttaaagaagtattatgtacccgaactgaaatagatatactgttcttaattatcctgaatcataatgaagagtagataatccaaaatagattttttaatcattcacatttagtttggggtgttctatgtttgttaggaataaaactggttctaaccaattactgaagctggtactgggaggattcaactagagaggattcaaaaagctgcctttttctctgttgcctccgtgccttactcacatttagtttagggtgttctatgtttgttaggaataaaactggttctaaccaattactgaagctggtactgggaggattcaactagagaggattcaaaaagctgcctttttctctgttgcctctgtgccttactcactcgtctccttttcctcacttcacactaggactgggtaccatcacactgcagtataattccaaatgcatttccaagctaagtttcccagcgtctgattgtgctttccttttggcctttactttcattgggggtgattgaggtagtctgattttttagctaagtctaaacttaaggctattatttgtctaccagctagggttcaggctgcattccctgtgagtccttagataaggtctgtgaaagactgaaagcatctcctatttcattaagaatgaaatgatttgtttggagtataaggagattgataccttgtatgatgtcataaactgtgaagccacttgcttttaaaaaaaaaaaaa

SEQ ID NO: 343361 - DNA, 3294 bp, Homo sapiens
acgtcagccaaggactctggagccgccgccgccgctgctgcggttcatatccggagtagacggagccgcagtagacggatccgcggctgcaccaaaccactgcccctcggagcctggtagtgggccacaagcccccagtcccagaggcgtgattttctggcatccttaaatcttgtgtcaaggattggttataatataaccagaaaccatgacggcggctgagaacgtatgctacacgttaattaacgtgccaatggattcagaaccaccatctgaaattagcttaaaaaatgatctagaaaaaggagatgtaaagtcaaagactgaagctttgaagaaagtaatcattatgattctgaatggtgaaaaacttcctggacttctgatgaccatcattcgttttgtgctacctcttcaggatcacactatcaagaaattacttctggtattttgggaaattgttcctaaaacaactccagatgggagacttttacatgagatgatccttgtatgtgatgcatacagaaaggatcttcaacatcctaatgaatttattcgaggatctactcttcgttttctttgcaaattgaaagaagcagaattgctagaacctttaatgccagctattcgtgcatgtttggagcatcgacacagctatgttagaagaaatgctgttttggccatctataccatctatagaaattttgaacatcttatacctgatgctcctgaactgatacatgattttctggtgaatgagaaggatgcaagttgcaaaaggaatgcatttatgatgctaattcatgcagatcaggatcgagctttggattacttaagtacttgcattgatcaagttcaaacatttggagacattctgcagctggttattgttgaactgatttataaggtctgtcatgctaatccatcagaaagagctcgttttattcgctgcatctataacttattacagtcatccagccctgctgtaaaatatgaagctgctgggacattagtgacactctctagtgcaccaactgcaatcaaggctgctgctcagtgttacattgatttaattattaaggagagcgacaacaatgtaaaactcatagttttggatcgcttgatagaattaaaagagcatcctgctcatgaacgagtactacaggatctggttatggatatcctaagagtattgagcacaccagacttagaagtacgaaagaaaactctgcagttagcactggatcttgtctcttctagaaatgttgaagagctggttattgtcctgaagaaggaagtgataaaaacaaataatgtgtctgagcatgaagatactgacaaatacagacaactcctagtgcgaacattgcattcctgttctgtccgatttccagatatggctgcaaatgttattcctgtgttaatggaatttctcagtgacaacaacgaagcagcagctgctgatgtcttggagtttgttcgtgaagccattcagcgctttgataacctgagaatgcttattgttgagaagatgcttgaagtctttcatgctattaaatctgtcaagatttaccgaggagcattatggatcctgggagaatactgtagtaccaaggaagacattcagagtgtgatgactgagatccgcaggtcccttggagagatcccaattgtagagtcagaaataaagaaagaagctggtgaattaaaacctgaagaagaaataactgtagggccagttcagaaattggttactgaaatgggtacctatgcaactcagagtgcccttagcagttctagacccaccaagaaagaggaagacagacctcccttgagaggattccttctggatggagatttctttgttgctgcctcccttgccacaactctgaccaagattgcattgcgctatgtagctttggttcaggagaagaaaaagcaaaattcttttgttgctgaggctatgttgctcatggctactatcctgcatttgggaaaatcctctcttcctaagaagccaattactgatgatgatgtggatcgaatttccctgtgcctcaaggtcttgtctgaatgttcacctttaatgaatgacattttcaataaggaatgcagacagtccctttctcacatgttatctgctaaactagaagaagagaaattatcccaaaagaaagaatctgaaaagaggaatgtgacagtacagcctgatgaccccatttccttcatgcaactaactgctaagaatgaaatgaactgcaaggaagatcagtttcagctgagtttactggcagcaatgggtaacacacagaggaaagaggcagcagatcccctagcatctaaacttaacaaggtcacccaattgacaggtttctcagatcctgtatatgcagaagcttacgttcatgtcaaccaatatgatattgtcctggatgtacttgttgtgaaccaaaccagtgatactttgcagaattgcacattagaactagctacactaggggatctgaaacttgtggaaaagccgtctcctttgactcttgctcctcatgacttcgcaaatattaaagctaacgtcaaagtagcatcaacagaaaatggaataatttttggtaatatagtttatgatgtctctggagcagcaagtgacagaaattgtgtggttctcagtgatattcacatcgacatcatggactatatccagcctgcaacttgcactgatgcagaattccgtcagatgtgggccgaatttgaatgggaaaacaaagtgacagttaacaccaacatggttgatttaaatgactacttacagcacatattaaagtcaaccaatatgaaatgcctgactccagaaaaggccctttctggttactgtggctttatggcagccaacctttatgctcgttccatatttggtgaagatgcacttgcaaatgtcagcattgagaagccaattcaccagggaccagatgctgctgttaccggccatataagaattcgtgcaaagagccagggaatggccttaagtcttggagataaaatcaacttgtcacagaagaaaactagtatataaaaataaacaaaaagtccttgaagctttacagttaatttagattctcagtacaccatcactgttactgtccccagctccattctctacctccaggatctcaggagcctacagaagtaaccagcaatggcagaatctctgagaagtcagtcatgcagtgacaaaagaatgcaagtgggatttgtgtcttttatctgggctctgtatataattataggattctgaga

SEQ ID NO: 343362 - DNA, 3102 bp, Homo sapiens
acgtcagccaaggactctggagccgccgccgccgctgctgcggttcatatccggagtagacggagccgcagtagacggatccgcggctgcaccaaaccactgcccctcggagcctggtagtgggccacaagcccccagtcccagaggcgtgattttctggcatccttaaatcttgtgtcaaggattggttataatataaccagaaaccatgacggcggctgagaacgtatgctacacgttaattaacgtgccaatggattcagaaccaccatctgaaattagcttaaaaaatgatctagaaaaaggagatgtaaagtcaaagactgaagctttgaagaaagtaatcattatgattctgaatggtgaaaaacttcctggacttctgatgaccatcattcgttttgtgctacctcttcaggatcacactatcaagaaattacttctggtattttgggaaattgttcctaaaacaactccagatgggagacttttacatgagatgatccttgtatgtgatgcatacagaaaggatcttcaacatcctaatgaatttattcgaggatctactcttcgttttctttgcaaattgaaagaagcagaattgctagaacctttaatgccagctattcgtgcatgtttggagcatcgacacagctatgttagaagaaatgctgttttggccatctataccatctatagaaattttgaacatcttatacctgatgctcctgaactgatacatgattttctggtgaatgagaaggatgcaagttgcaaaaggaatgcatttatgatgctaattcatgcagatcaggatcgagctttggattacttaagtacttgcattgatcaagttcaaacatttggagacattctgcagctggttattgttgaactgatttataaggtctgtcatgctaatccatcagaaagagctcgttttattcgctgcatctataacttattacagtcatccagccctgctgtaaaatatgaagctgctgggacattagtgacactctctagtgcaccaactgcaatcaaggctgctgctcagtgttacattgatttaattattaaggagagcgacaacaatgtaaaactcatagttttggatcgcttgatagaattaaaagagcatcctgctcatgaacgagtactacaggatctggttatggatatcctaagagtattgagcacaccagacttagaagtacgaaagaaaactctgcagttagcactggatcttgtctcttctagaaatgttgaagagctggttattgtcctgaagaaggaagtgataaaaacaaataatgtgtctgagcatgaagatactgacaaatacagacaactcctagtgcgaacattgcattcctgttctgtccgatttccagatatggctgcaaatgttattcctgtgttaatggaatttctcagtgacaacaacgaagcagcagctgctgatgtcttggagtttgttcgtgaagccattcagcgctttgataacctgagaatgcttattgttgagaagatgcttgaagtctttcatgctattaaatctgtcaagatttaccgaggagcattatggatcctgggagaatactgtagtaccaaggaagacattcagagtgtgatgactgagatccgcaggtcccttggagagatcccaattgtagagtcagaaataaagaaagaagctggtgaattaaaacctgaagaagaaataactgtagggccagttcagaaattggttactgaaatgggtacctatgcaactcagagtgcccttagcagttctagacccaccaagaaagaggaagacagacctcccttgagaggattccttctggatggagatttctttgttgctgcctcccttgccacaactctgaccaagattgcattgcgctatgtagctttggttcaggagaagaaaaagcaaaattcttttgttgctgaggctatgttgctcatggctactatcctgcatttgggaaaatcctctcttcctaagaagccaattactgatgatgatgtggatcgaatttccctgtgcctcaaggtcttgtctgaatgttcacctttaatgaatgacattttcaataaggaatgcagacagtccctttctcacatgttatctgctaaactagaagaagagaaattatcccaaaagaaagaatctgaaaagaggaatgtgacagtacagcctgatgaccccatttccttcatgcaactaactgctaagaatgaaatgaactgcaaggaagatcagtttcagctgagtttactggcagcaatgggtaacacacagaggaaagaggcagcagatcccctagcatctaaacttaacaaggtcacccaattgacaggtttctcagatcctgtatatgcagaagcttacgttcatgtcaaccaatatgatattgtcctggatgtacttgttgtgaaccaaaccagtgatactttgcagaattgcacattagaactagctacactaggggatctgaaacttgtggaaaagccgtctcctttgactcttgctcctcatgacttcgcaaatattaaagctaacgtcaaagtagcatcaacagaaaatggaataatttttggtaatatagtttatgatgtctctggagcagcaagtgacagaaattgtgtggttctcagtgatattcacatcgacatcatggactatatccagcctgcaacttgcactgatgcagaattccgtcagatgtgggccgaatttgaatgggaaaacaaagtgacagttaacaccaacatggttgatttaaatgactacttacagcacatattaaagtcaaccaatatgaaatgcctgactccagaaaaggccctttctggttactgtggctttatggcagccaacctttatgctcgttccatatttggtgaagatgcacttgcaaatgtcagcattgagaagccaattcaccagggaccagatgctgctgttaccggccatataagaattcgtgcaaagagccaggtaacagttcctttttttttgagagtatctctggactgacaaaggggggaggaatttatgactttattatttctatatgtagtatcttttta

SEQ ID NO: 343363 - DNA, 3046 bp, Homo sapiens
acgtcagccaaggactctggagccgccgccgccgctgctgcggttcatatccggagtagacggagccgcagtagacggatccgcggctgcaccaaaccactgcccctcggagcctggtagtgggccacaagcccccagtcccagaggcgtgattttctggcatccttaaatcttgtgtcaaggattggttataatataaccagaaaccatgacggcggctgagaacgtatgctacacgttaattaacgtgccaatggattcagaaccaccatctgaaattagcttaaaaaatgatctagaaaaaggagatgtaaagtcaaagactgaagctttgaagaaagtaatcattatgattctgaatggtgaaaaacttcctggacttctgatgaccatcattcgttttgtgctacctcttcaggatcacactatcaagaaattacttctggtattttgggaaattgttcctaaaacaactccagatgggagacttttacatgagatgatccttgtatgtgatgcatacagaaaggatcttcaacatcctaatgaatttattcgaggatctactcttcgttttctttgcaaattgaaagaagcagaattgctagaacctttaatgccagctattcgtgcatgtttggagcatcgacacagctatgttagaagaaatgctgttttggccatctataccatctatagaaattttgaacatcttatacctgatgctcctgaactgatacatgattttctggtgaatgagaaggatgcaagttgcaaaaggaatgcatttatgatgctaattcatgcagatcaggatcgagctttggattacttaagtacttgcattgatcaagttcaaacatttggagacattctgcagctggttattgttgaactgatttataaggtctgtcatgctaatccatcagaaagagctcgttttattcgctgcatctataacttattacagtcatccagccctgctgtaaaatatgaagctgctgggacattagtgacactctctagtgcaccaactgcaatcaaggctgctgctcagtgttacattgatttaattattaaggagagcgacaacaatgtaaaactcatagttttggatcgcttgatagaattaaaagagcatcctgctcatgaacgagtactacaggatctggttatggatatcctaagagtattgagcacaccagacttagaagtacgaaagaaaactctgcagttagcactggatcttgtctcttctagaaatgttgaagagctggttattgtcctgaagaaggaagtgataaaaacaaataatgtgtctgagcatgaagatactgacaaatacagacaactcctagtgcgaacattgcattcctgttctgtccgatttccagatatggctgcaaatgttattcctgtgttaatggaatttctcagtgacaacaacgaagcagcagctgctgatgtcttggagtttgttcgtgaagccattcagcgctttgataacctgagaatgcttattgttgagaagatgcttgaagtctttcatgctattaaatctgtcaagatttaccgaggagcattatggatcctgggagaatactgtagtaccaaggaagacattcagagtgtgatgactgagatccgcaggtcccttggagagatcccaattgtagagtcagaaataaagaaagaagctggtgaattaaaacctgaagaagaaataactgtagggccagttcagaaattggttactgaaatgggtacctatgcaactcagagtgcccttagcagttctagacccaccaagaaagaggaagacagacctcccttgagaggattccttctggatggagatttctttgttgctgcctcccttgccacaactctgaccaagattgcattgcgctatgtagctttggttcaggagaagaaaaagcaaaattcttttgttgctgaggctatgttgctcatggctactatcctgcatttgggaaaatcctctcttcctaagaagccaattactgatgatgatgtggatcgaatttccctgtgcctcaaggtcttgtctgaatgttcacctttaatgaatgacattttcaataaggaatgcagacagtccctttctcacatgttatctgctaaactagaagaagagaaattatcccaaaagaaagaatctgaaaagaggaatgtgacagtacagcctgatgaccccatttccttcatgcaactaactgctaagaatgaaatgaactgcaaggaagatcagtttcagctgagtttactggcagcaatgggtaacacacagaggaaagaggcagcagatcccctagcatctaaacttaacaaggtcacccaattgacaggtttctcagatcctgtatatgcagaagcttacgttcatgtcaaccaatatgatattgtcctggatgtacttgttgtgaaccaaaccagtgatactttgcagaattgcacattagaactagctacactaggggatctgaaacttgtggaaaagccgtctcctttgactcttgctcctcatgacttcgcaaatattaaagctaacgtcaaagtagcatcaacagaaaatggaataatttttggtaatatagtttatgatgtctctggagcagcaagtgacagaaattgtgtggttctcagtgatattcacatcgacatcatggactatatccagcctgcaacttgcactgatgcagaattccgtcagatgtgggccgaatttgaatgggaaaacaaagtgacagttaacaccaacatggttgatttaaatgactacttacagcacatattaaagtcaaccaatatgaaatgcctgactccagaaaaggtaaaatttgactaggaaattcagaaatctgatggaatggtagagtaggttcctggccttcctgtatttcctctagcacatttttgttattcaatatgcagtaccattctaggctatctaaaagatgttatcccatagaatgttggaatctgcttacctctttctattggactataccatcctactttttcc

SEQ ID NO: 343364 - DNA, 1740 bp, Homo sapiens
ccgggaaaggtacctgttatacatataagaattcgtgcaaagagccagggaatggccttaagtcttggagataaaatcaacttgtcacagaagaaaactagtatataaaaataaacaaaaagtccttgaagctttacagttaatttaggtatgggcttactggactccaacatcttttgtactctttcatgcttatatagaatctgagttcatgctgaatacttttcagccaataatttatagcctttcccttaaatcaagattgagtttaaaattatagtttgtcttttgtcttaacagttctgaatgctgtcctcaaagtatataatgtttcatgtaccaagacccttttcacagtacaataaacagatctattcataaatttttgttattttataaataaatgattacataattttagttatatggcaatggatttcttttagttgggttataaatttctattataaatttaaattactgagttgtgaatatatgcagctttattaagagaatttacaaattcaatgatataaaataaggtaggccttgattcacttggttgttttttacttatttaatattccaacattgctatctctaaaaatgcattatcatgttttgaagggatttgctcttgaatttagctccagggagaaagtatcaaaataacttttttttttttttttgagatggagtctggctctgtcacccaggctggagtgcagtggcgtgatcttggctcactgcaagctccacctcccgggtttacaccattctcctgcctcagcctcccaagtagctgggactacaggtgcccgccaccacgcctggctaattttttgtatttttagtagagacgggctttcaccatgttggccaggatggtctcgatctcctgacctcgtgatccgcccgcctcagcctcccggagtgttgggattacaggcatgagccaccgcacccggcccaaaataacttgagaaaacagatcgctctgcagtttaaagaagtattatgtacccgaactgaaatagatatactgttcttaattatcctgaatcataatgaagagtagataatccaaaatagattttttaatcattcacatttagtttggggtgttctatgtttgttaggaataaaactggttctaaccaattactgaagctggtactgggaggattcaactagagaggattcaaaaagctgcctttttctctgttgcctccgtgccttactcacatttagtttagggtgttctatgtttgttaggaataaaactggttctaaccaattactgaagctggtactgggaggattcaactagagaggattcaaaaagctgcctttttctctgttgcctctgtgccttactcactcgtctccttttcctcacttcacactaggactgggtaccatcacactgcagtataattccaaatgcatttccaagctaagtttcccagcgtctgattgtgctttccttttggcctttactttcattgggggtgattgaggtagtctgattttttagctaagtctaaacttaaggctattatttgtctaccagctagggttcaggctgcattccctgtgagtccttagataaggtctgtgaaagactgaaagcatctcctatttcattaagaatgaaatgatttgtttggagtataaggagattgataccttgtatgatgtcataaactgtgaagccacttgcttttaaaaaaaaaaaaa

SEQ ID NO: 343365 - DNA, 1629 bp, Homo sapiens
cttaaatcaagattgagtttaagggaaaggctataaattattggctgaaaagtattcagcatgaactcagattctatataagcatgaaagagtacaaaagatgttggagtccagtaagccaataatttatagcctttcccttaaatcaagattgagtttaaaattatagtttgtcttttgtcttaacagttctgaatgctgtcctcaaagtatataatgtttcatgtaccaagacccttttcacagtacaataaacagatctattcataaatttttgttattttataaataaatgattacataattttagttatatggcaatggatttcttttagttgggttataaatttctattataaatttaaattactgagttgtgaatatatgcagctttattaagagaatttacaaattcaatgatataaaataaggtaggccttgattcacttggttgttttttacttatttaatattccaacattgctatctctaaaaatgcattatcatgttttgaagggatttgctcttgaatttagctccagggagaaagtatcaaaataacttttttttttttttttgagatggagtctggctctgtcacccaggctggagtgcagtggcgtgatcttggctcactgcaagctccacctcccgggtttacaccattctcctgcctcagcctcccaagtagctgggactacaggtgcccgccaccacgcctggctaattttttgtatttttagtagagacgggctttcaccatgttggccaggatggtctcgatctcctgacctcgtgatccgcccgcctcagcctcccggagtgttgggattacaggcatgagccaccgcacccggcccaaaataacttgagaaaacagatcgctctgcagtttaaagaagtattatgtacccgaactgaaatagatatactgttcttaattatcctgaatcataatgaagagtagataatccaaaatagattttttaatcattcacatttagtttggggtgttctatgtttgttaggaataaaactggttctaaccaattactgaagctggtactgggaggattcaactagagaggattcaaaaagctgcctttttctctgttgcctccgtgccttactcacatttagtttagggtgttctatgtttgttaggaataaaactggttctaaccaattactgaagctggtactgggaggattcaactagagaggattcaaaaagctgcctttttctctgttgcctctgtgccttactcactcgtctccttttcctcacttcacactaggactgggtaccatcacactgcagtataattccaaatgcatttccaagctaagtttcccagcgtctgattgtgctttccttttggcctttactttcattgggggtgattgaggtagtctgattttttagctaagtctaaacttaaggctattatttgtctaccagctagggttcaggctgcattccctgtgagtccttagataaggtctgtgaaagactgaaagcatctcctatttcattaagaatgaaatgatttgtttggagtataaggagattgataccttgtatgatgtcataaactgtgaagccacttgcttttaaaaaaaaaaaaa

SEQ ID NO: 343366 - DNA, 187 bp, Homo sapiens
aaggaagacattcagagtgtgatgactgagatccgcaggtcccttggagaggtatgttttactttagtaaatgttagtttatatggtaatttttcctttaggaaaatctgactttttatagtgatttgcttacattatttacacttctgagttagattttgtttgaacaaaatgttctgtgtttatt

SEQ ID NO: 343367 - DNA, 343 bp, Homo sapiens
caaattttatgatagatgaataacttcttaaaatgtatttctttttttatataggctgctgctcagtgttacattgatttaattattaaggagagcgacaacaatgtaaaactcatagttttggatcgcttgatagaattaaaagagcatcctgctcatgaacgagtactacaggtaagtgttatctgaaaaagagagatcctaaataaaatgtttttcaaatttaggtcattctcaagctttgcccatcttggttaacctaaatgcttggaaactgagcagtttatattttgatcagctaaagtgttaactattgagtcatcatagccttttggggtattat

SEQ ID NO: 343368 - DNA, 1723 bp, Homo sapiens
acgtcagccaaggactctggagccgccgccgccgctgctgcggttcatatccggagtagacggagccgcagtagacggatccgcggctgcaccaaaccactgcccctcggagcctgattttctggcatccttaaatcttgtgtcaaggattggttataatataaccagaaaccatgacggcggctgagaacgtatgctacacgttaattaacgtgccaatggattcagaaccaccatctgaaattagcttaaaaaatgatctagaaaaaggagatgtaaagtcaaagactgaagctttgaagaaagtaatcattatgattctgaatggtgaaaaacttcctggacttctgatgaccatcattcgttttgtgctacctcttcaggatcacactatcaagaaattacttctggtattttgggaaattgttcctaaaacaactccagatgggagacttttacatgagatgatccttgtatgtgatgcatacagaaaggatcttcaacatcctaatgaatttattcgaggatctactcttcgttttctttgcaaattgaaagaagcagaattgctagaacctttaatgccagctattcgtgcatgtttggagcatcgacacagctatgttagaagaaatgctgttttggccatctataccatctatagaaattttgaacatcttatacctgatgctcctgaactgatacatgattttctggtgaatgagaaggatgcaagttgcaaaaggaatgcatttatgatgctaattcatgcagatcaggatcgagctttggattacttaagtacttgcattgatcaagttcaaacatttggagacattctgcagctggttattgttgaactgatttataaggtctgtcatgctaatccatcagaaagagctcgttttattcgctgcatctataacttattacagtcatccagccctgctgtaaaatatgaagctgctgggacattagtgacactctctagtgcaccaactgcaatcaaggctgctgctcagtgttacattgatttaattattaaggagagcgacaacaatgtaaaactcatagttttggatcgcttgatagaattaaaagagcatcctgctcatgaacgagtactacaggatctggttatggatatcctaagagtattgagcacaccagacttagaagtacgaaagaaaactctgcagttagcactggatcttgtctcttctagaaatgttgaagagctggttattgtcctgaagaaggaagtgataaaaacaaataatgtgtctgagcatgaagatactgacaaatacagacaactcctagtgcgaacattgcattcctgttctgtccgatttccagatatggctgcaaatgttattcctgtgttaatggaatttctcagtgacaacaacgaagcagcagctgctgatgtcttggagtttgttcgtgaagccattcagcgctttgataacctgagaatgcttattgttgagaagatgcttgaagtctttcatgctattaaatctgtcaagatttaccgaggagcattatggatcctgggagaatactgtagtaccaaggaagacattcagagtgtgatgactgagatccgcaggtcccttggagagatcccaattgtagagtcagaaataaagaaagatgtggaaagtaactgaagcagcatcaggtaccaactgtagtgacgttcctcatcaagatcctg

SEQ ID NO: 343369 - DNA, 3666 bp, Homo sapiens
acgtcagccaaggactctggagccgccgccgccgctgctgcggttcatatccggagtagacggagccgcagtagacggatccgcggctgcaccaaaccactgcccctcggagcctggtagtgggccacaagcccccagtcccagaggcgtgattttctggcatccttaaatcttgtgtcaaggattggttataatataaccagaaaccatgacggcggctgagaacgtatgctacacgttaattaacgtgccaatggattcagaaccaccatctgaaattagcttaaaaaatgatctagaaaaaggagatgtaaagtcaaagactgaagctttgaagaaagtaatcattatgattctgaatggtgaaaaacttcctggacttctgatgaccatcattcgttttgtgctacctcttcaggatcacactatcaagaaattacttctggtattttgggaaattgttcctaaaacaactccagatgggagacttttacatgagatgatccttgtatgtgatgcatacagaaaggatcttcaacatcctaatgaatttattcgaggatctactcttcgttttctttgcaaattgaaagaagcagaattgctagaacctttaatgccagctattcgtgcatgtttggagcatcgacacagctatgttagaagaaatgctgttttggccatctataccatctatagaaattttgaacatcttatacctgatgctcctgaactgatacatgattttctggtgaatgagaaggatgcaagttgcaaaaggaatgcatttatgatgctaattcatgcagatcaggatcgagctttggattacttaagtacttgcattgatcaagttcaaacatttggagacattctgcagctggttattgttgaactgatttataaggtctgtcatgctaatccatcagaaagagctcgttttattcgctgcatctataacttattacagtcatccagccctgctgtaaaatatgaagctgctgggacattagtgacactctctagtgcaccaactgcaatcaaggctgctgctcagtgttacattgatttaattattaaggagagcgacaacaatgtaaaactcatagttttggatcgcttgatagaattaaaagagcatcctgctcatgaacgagtactacaggatctggttatggatatcctaagagtattgagcacaccagacttagaagtacgaaagaaaactctgcagttagcactggatcttgtctcttctagaaatgttgaagagctggttattgtcctgaagaaggaagtgataaaaacaaataatgtgtctgagcatgaagatactgacaaatacagacaactcctagtgcgaacattgcattcctgttctgtccgatttccagatatggctgcaaatgttattcctgtgttaatggaatttctcagtgacaacaacgaagcagcagctgctgatgtcttggagtttgttcgtgaagccattcagcgctttgataacctgagaatgcttattgttgagaagatgcttgaagtctttcatgctattaaatctgtcaagatttaccgaggagcattatggatcctgggagaatactgtagtaccaaggaagacattcagagtgtgatgactgagatccgcaggtcccttggagagatcccaattgtagagtcagaaataaagaaagaagctggtgaattaaaacctgaagaagaaataactgtagggccagttcagaaattggttactgaaatgggtacctatgcaactcagagtgcccttagcagttctagacccaccaagaaagaggaagacagacctcccttgagaggattccttctggatggagatttctttgttgctgcctcccttgccacaactctgaccaagattgcattgcgctatgtagctttggttcaggagaagaaaaagcaaaattcttttgttgctgaggctatgttgctcatggctactatcctgcatttgggaaaatcctctcttcctaagaagccaattactgatgatgatgtggatcgaatttccctgtgcctcaaggtcttgtctgaatgttcacctttaatgaatgacattttcaataaggaatgcagacagtccctttctcacatgttatctgctaaactagaagaagagaaattatcccaaaagaaagaatctgaaaagaggaatgtgacagtacagcctgatgaccccatttccttcatgcaactaactgctaagaatgaaatgaactgcaaggaagatcagtttcagctgagtttactggcagcaatgggtaacacacagaggaaagaggcagcagatcccctagcatctaaacttaacaaggtcacccaattgacaggtttctcagatcctgtatatgcagaagcttacgttcatgtcaaccaatatgatattgtcctggatgtacttgttgtgaaccaaaccagtgatactttgcagaattgcacattagaactagctacactaggggatctgaaacttgtggaaaagccgtctcctttgactcttgctcctcatgacttcgcaaatattaaagctaacgtcaaagtagcatcaacagaaaatggaataatttttggtaatatagtttatgatgtctctggagcagcaagtgacagaaattgtgtggttctcagtgatattcacatcgacatcatggactatatccagcctgcaacttgcactgatgcagaattccgtcagatgtgggccgaatttgaatgggaaaacaaagtgacagttaacaccaacatggttgatttaaatgactacttacagcacatattaaagtcaaccaatatgaaatgcctgactccagaaaaggccctttctggttactgtggctttatggcagccaacctttatgctcgttccatatttggtgaagatgcacttgcaaatgtcagcattgagaagccaattcaccagggaccagatgctgctgttaccggccatataagaattcgtgcaaagagccagggaatggccttaagtcttggagataaaatcaacttgtcacagaagaaaactagtatataaaaataaacaaaaagtccttgaagctttacagttaatttaggtatgggcttactggactccaacatcttttgtactctttcatgcttatatagaatctgagttcatgctgaatacttttcagccaataatttatagcctttcccttaaatcaagattgagtttaaaattatagtttgtcttttgtcttaacagttctgaatgctgtcctcaaagtatataatgtttcatgtaccaagacccttttcacagtacaataaacagatctattcataaatttttgttattttataaataaatgattacataaattccaaaaaaaaaaaaaaaaaaaaaaaaaaaaacgggtggtgggcgcgcgccccggggcccccagaaaaagttttctcaaaaaccatcgcgtgggggcgcgcgcggggccccagttgggttaggtgaacgtgggccaaaaggcgtggccccaaggaaaaatcggcccacgaaacagggggcgggggttccccccaaaataaaaaggccggggggaaacggaggttctggaacaatcccaaggggtcggggggcctcggttctacacggggtcccaggagcgaaaaaac

SEQ ID NO: 343370 - DNA, 4667 bp, Homo sapiens
acgtcagccaaggactctggagccgccgccgccgctgctgcggttcatatccggagtagacggagccgcagtagacggatccgcggctgcaccaaaccactgcccctcggagcctgattttctggcatccttaaatcttgtgtcaaggattggttataatataaccagaaaccatgacggcggctgagaacgtatgctacacgttaattaacgtgccaatggattcagaaccaccatctgaaattagcttaaaaaatgatctagaaaaaggagatgtaaagtcaaagactgaagctttgaagaaagtaatcattatgattctgaatggtgaaaaacttcctggacttctgatgaccatcattcgttttgtgctacctcttcaggatcacactatcaagaaattacttctggtattttgggaaattgttcctaaaacaactccagatgggagacttttacatgagatgatccttgtatgtgatgcatacagaaaggatcttcaacatcctaatgaatttattcgaggatctactcttcgttttctttgcaaattgaaagaagcagaattgctagaacctttaatgccagctattcgtgcatgtttggagcatcgacacagctatgttagaagaaatgctgttttggccatctataccatctatagaaattttgaacatcttatacctgatgctcctgaactgatacatgattttctggtgaatgagaaggatgcaagttgcaaaaggaatgcatttatgatgctaattcatgcagatcaggatcgagctttggattacttaagtacttgcattgatcaagttcaaacatttggagacattctgcagctggttattgttgaactgatttataaggtctgtcatgctaatccatcagaaagagctcgttttattcgctgcatctataacttattacagtcatccagccctgctgtaaaatatgaagctgctgggacattagtgacactctctagtgcaccaactgcaatcaaggctgctgctcagtgttacattgatttaattattaaggagagcgacaacaatgtaaaactcatagttttggatcgcttgatagaattaaaagagcatcctgctcatgaacgagtactacaggatctggttatggatatcctaagagtattgagcacaccagacttagaagtacgaaagaaaactctgcagttagcactggatcttgtctcttctagaaatgttgaagagctggttattgtcctgaagaaggaagtgataaaaacaaataatgtgtctgagcatgaagatactgacaaatacagacaactcctagtgcgaacattgcattcctgttctgtccgatttccagatatggctgcaaatgttattcctgtgttaatggaatttctcagtgacaacaacgaagcagcagctgctgatgtcttggagtttgttcgtgaagccattcagcgctttgataacctgagaatgcttattgttgagaagatgcttgaagtctttcatgctattaaatctgtcaagatttaccgaggagcattatggatcctgggagaatactgtagtaccaaggaagacattcagagtgtgatgactgagatccgcaggtcccttggagagatcccaattgtagagtcagaaataaagaaagaagctggtgaattaaaacctgaagaagaaataactgtagggccagttcagaaattggttactgaaatgggtacctatgcaactcagagtgcccttagcagttctagacccaccaagaaagaggaagacagacctcccttgagaggattccttctggatggagatttctttgttgctgcctcccttgccacaactctgaccaagattgcattgcgctatgtagctttggttcaggagaagaaaaagcaaaattcttttgttgctgaggctatgttgctcatggctactatcctgcatttgggaaaatcctctcttcctaagaagccaattactgatgatgatgtggatcgaatttccctgtgcctcaaggtcttgtctgaatgttcacctttaatgaatgacattttcaataaggaatgcagacagtccctttctcacatgttatctgctaaactagaagaagagaaattatcccaaaagaaagaatctgaaaagaggaatgtgacagtacagcctgatgaccccatttccttcatgcaactaactgctaagaatgaaatgaactgcaaggaagatcagtttcagctgagtttactggcagcaatgggtaacacacagaggaaagaggcagcagatcccctagcatctaaacttaacaaggtcacccaattgacaggtttctcagatcctgtatatgcagaagcttacgttcatgtcaaccaatatgatattgtcctggatgtacttgttgtgaaccaaaccagtgatactttgcagaattgcacattagaactagctacactaggggatctgaaacttgtggaaaagccgtctcctttgactcttgctcctcatgacttcgcaaatattaaagctaacgtcaaagtagcatcaacagaaaatggaataatttttggtaatatagtttatgatgtctctggagcagcaagtgacagaaattgtgtggttctcagtgatattcacatcgacatcatggactatatccagcctgcaacttgcactgatgcagaattccgtcagatgtgggccgaatttgaatgggaaaacaaagtgacagttaacaccaacatggttgatttaaatgactacttacagcacatattaaagtcaaccaatatgaaatgcctgactccagaaaaggccctttctggttactgtggctttatggcagccaacctttatgctcgttccatatttggtgaagatgcacttgcaaatgtcagcattgagaagccaattcaccagggaccagatgctgctgttaccggccatataagaattcgtgcaaagagccagggaatggccttaagtcttggagataaaatcaacttgtcacagaagaaaactagtatataaaaataaacaaaaagtccttgaagctttacagttaatttaggtatgggcttactggactccaacatcttttgtactctttcatgcttatatagaatctgagttcatgctgaatacttttcagccaataatttatagcctttcccttaaatcaagattgagtttaaaattatagtttgtcttttgtcttaacagttctgaatgctgtcctcaaagtatataatgtttcatgtaccaagacccttttcacagtacaataaacagatctattcataaatttttgttattttataaataaatgattacataattttagttatatggcaatggatttcttttagttgggttataaatttctattataaatttaaattactgagttgtgaatatatgcagctttattaagagaatttacaaattcaatgatataaaataaggtaggccttgattcacttggttgttttttacttatttaatattccaacattgctatctctaaaaatgcattatcatgttttgaagggatttgctcttgaatttagctccagggagaaagtatcaaaataacttttttttttttttttgagatggagtctggctctgtcacccaggctggagtgcagtggcgtgatcttggctcactgcaagctccacctcccgggtttacaccattctcctgcctcagcctcccaagtagctgggactacaggtgcccgccaccacgcctggctaattttttgtatttttagtagagacgggctttcaccatgttggccaggatggtctcgatctcctgacctcgtgatccgcccgcctcagcctcccggagtgttgggattacaggcatgagccaccgcacccggcccaaaataacttgagaaaacagatcgctctgcagtttaaagaagtattatgtacccgaactgaaatagatatactgttcttaattatcctgaatcataatgaagagtagataatccaaaatagattttttaatcattcacatttagtttggggtgttctatgtttgttaggaataaaactggttctaaccaattactgaagctggtactgggaggattcaactagagaggattcaaaaagctgcctttttctctgttgcctccgtgccttactcacatttagtttagggtgttctatgtttgttaggaataaaactggttctaaccaattactgaagctggtactgggaggattcaactagagaggattcaaaaagctgcctttttctctgttgcctctgtgccttactcactcgtctccttttcctcacttcacactaggactgggtaccatcacactgcagtataattccaaatgcatttccaagctaagtttcccagcgtctgattgtgctttccttttggcctttactttcattgggggtgattgaggtagtctgattttttagctaagtctaaacttaaggctattatttgtctaccagctagggttcaggctgcattccctgtgagtccttagataaggtctgtgaaagactgaaagcatctcctatttcattaagaatgaaatgatttgtttggagtataaggagattgataccttgtatgatgtcataaactgtgaagccacttgcttttaaaaaaaaaaaaa

SEQ ID NO: 343371 - DNA, 3565 bp, Homo sapiens
ctcggtgaactgtcgatctgacacacagtgaaagaggtatatcctatagattactggatcacatgagagtagaattacgaaaagaaaactctgtattacgcactaggatcttgtctctgctagaagtggtgaacagctggttattgtcctgaagaaggaagtgataaaaacaaataatgtgtctgagcatgaagatactgacaaatacagacaactcctagtgcgaacattgcattcctgttctgtccgatttccagatatggctgcaaatgttattcctgtgttaatggaatttctcagtgacaacaacgaagcagcagctgctgatgtcttggagtttgttcgtgaagccattcagcgctttgataacctgagaatgcttattgttgagaagatgcttgaagtctttcatgctattaaatctgtcaagatttaccgaggagcattatggatcctgggagaatactgtagtaccaaggaagacattcagagtgtgatgactgagatccgcaggtcccttggagagatcccaattgtagagtcagaaataaagaaagaagctggtgaattaaaacctgaagaagaaataactgtagggccagttcagaaattggttactgaaatgggtacctatgcaactcagagtgcccttagcagttctagacccaccaagaaagaggaagacagacctcccttgagaggattccttctggatggagatttctttgttgctgcctcccttgccacaactctgaccaagattgcattgcgctatgtagctttggttcaggagaagaaaaagcaaaattcttttgttgctgaggctatgttgctcatggctactatcctgcatttgggaaaatcctctcttcctaagaagccaattactgatgatgatgtggatcgaatttccctgtgcctcaaggtcttgtctgaatgttcacctttaatgaatgacattttcaataaggaatgcagacagtccctttctcacatgttatctgctaaactagaagaagagaaattatcccaaaagaaagaatctgaaaagaggaatgtgacagtacagcctgatgaccccatttccttcatgcaactaactgctaagaatgaaatgaactgcaaggaagatcagtttcagctgagtttactggcagcaatgggtaacacacagaggaaagaggcagcagatcccctagcatctaaacttaacaaggtcacccaattgacaggtttctcagatcctgtatatgcagaagcttacgttcatgtcaaccaatatgatattgtcctggatgtacttgttgtgaaccaaaccagtgatactttgcagaattgcacattagaactagctacactaggggatctgaaacttgtggaaaagccgtctcctttgactcttgctcctcatgacttcgcaaatattaaagctaacgtcaaagtagcatcaacagaaaatggaataatttttggtaatatagtttatgatgtctctggagcagcaagtgacagaaattgtgtggttctcagtgatattcacatcgacatcatggactatatccagcctgcaacttgcactgatgcagaattccgtcagatgtgggccgaatttgaatgggaaaacaaagtgacagttaacaccaacatggttgatttaaatgactacttacagcacatattaaagtcaaccaatatgaaatgcctgactccagaaaaggccctttctggttactgtggctttatggcagccaacctttatgctcgttccatatttggtgaagatgcacttgcaaatgtcagcattgagaagccaattcaccagggaccagatgctgctgttaccggccatataagaattcgtgcaaagagccagggaatggccttaagtcttggagataaaatcaacttgtcacagaagaaaactagtatataaaaataaacaaaaagtccttgaagctttacagttaatttaggtatgggcttactggactccaacatcttttgtactctttcatgcttatatagaatctgagttcatgctgaatacttttcagccaataatttatagcctttcccttaaatcaagattgagtttaaaattatagtttgtcttttgtcttaacagttctgaatgctgtcctcaaagtatataatgtttcatgtaccaagacccttttcacagtacaataaacagatctattcataaatttttgttattttataaataaatgattacataattttagttatatggcaatggatttcttttagttgggttataaatttctattataaatttaaattactgagttgtgaatatatgcagctttattaagagaatttacaaattcaatgatataaaataaggtaggccttgattcacttggttgttttttacttatttaatattccaacattgctatctctaaaaatgcattatcatgttttgaagggatttgctcttgaatttagctccagggagaaagtatcaaaataacttttttttttttttttgagatggagtctggctctgtcacccaggctggagtgcagtggcgtgatcttggctcactgcaagctccacctcccgggtttacaccattctcctgcctcagcctcccaagtagctgggactacaggtgcccgccaccacgcctggctaattttttgtatttttagtagagacgggctttcaccatgttggccaggatggtctcgatctcctgacctcgtgatccgcccgcctcagcctcccggagtgttgggattacaggcatgagccaccgcacccggcccaaaataacttgagaaaacagatcgctctgcagtttaaagaagtattatgtacccgaactgaaatagatatactgttcttaattatcctgaatcataatgaagagtagataatccaaaatagattttttaatcattcacatttagtttggggtgttctatgtttgttaggaataaaactggttctaaccaattactgaagctggtactgggaggattcaactagagaggattcaaaaagctgcctttttctctgttgcctccgtgccttactcacatttagtttagggtgttctatgtttgttaggaataaaactggttctaaccaattactgaagctggtactgggaggattcaactagagaggattcaaaaagctgcctttttctctgttgcctctgtgccttactcactcgtctccttttcctcacttcacactaggactgggtaccatcacactgcagtataattccaaatgcatttccaagctaagtttcccagcgtctgattgtgctttccttttggcctttactttcattgggggtgattgaggtagtctgattttttagctaagtctaaacttaaggctattatttgtctaccagctagggttcaggctgcattccctgtgagtccttagataaggtctgtgaaagactgaaagcatctcctatttcattaagaatgaaatgatttgtttggagtataaggagattgataccttgtatgatgtcataaactgtgaagccacttgcttttaaaaaaaaaaaaa

SEQ ID NO: 343372 - DNA, 4363 bp, Homo sapiens
acgtcagccaaggactctggagccgccgccgccgctgctgcggttcatatccggagtagacggagccgcagtagacggatccgcggctgcaccaaaccactgcccctcggagcctggtagtgggccacaagcccccagtcccagaggcgtgattttctggcatccttaaatcttgtgtcaaggattggttataatataaccagaaaccatgacggcggctgagaacgtatgctacacgttaattaacgtgccaatggattcagaaccaccatctgaaattagcttaaaaaatgatctagaaaaaggagatgtaaagtcaaagactgaagctttgaagaaagtaatcattatgattctgaatggtgaaaaacttcctggacttctgatgaccatcattcgttttgtgctacctcttcaggatcacactatcaagaaattacttctggtattttgggaaattgttcctaaaacaactccagatgggagacttttacatgagatgatccttgtatgtgatgcatacagaaaggatcttcaacatcctaatgaatttattcgaggatctactcttcgttttctttgcaaattgaaagaagcagaattgctagaacctttaatgccagctattcgtgcatgtttggagcatcgacacagctatgttagaagaaatgctgttttggccatctataccatctatagaaattttgaacatcttatacctgatgctcctgaactgatacatgattttctggtgaatgagaaggatgcaagttgcaaaaggaatgcatttatgatgctaattcatgcagatcaggatcgagctttggattacttaagtacttgcattgatcaagttcaaacatttggagacattctgcagctggttattgttgaactgatttataaggtctgtcatgctaatccatcagaaagagctcgttttattcgctgcatctataacttattacagtcatccagccctgctgtaaaatatgaagctgctgggacattagtgacactctctagtgcaccaactgcaatcaaggctgctgctcagtgttacattgatttaattattaaggagagcgacaacaatgtaaaactcatagttttggatcgcttgatagaattaaaagagcatcctgctcatgaacgagtactacaggatctggttatggatatcctaagagtattgagcacaccagacttagaagtacgaaagaaaactctgcagttagcactggatcttgtctcttctagaaatgttgaagagctggttattgtcctgaagaaggaagtgataaaaacaaataatgtgtctgagcatgaagatactgacaaatacagacaactcctagtgcgaacattgcattcctgttctgtccgatttccagatatggctgcaaatgttattcctgtgttaatggaatttctcagtgacaacaacgaagcagcagctgctgatgtcttggagtttgttcgtgaagccattcagcgctttgataacctgagaatgcttattgttgagaagatgcttgaagtctttcatgctattaaatctgtcaagatttaccgaggagcattatggatcctgggagaatactgtagtaccaaggaagacattcagagtgtgatgactgagatccgcaggtcccttggagagatcccaattgtagagtcagaaataaagaaagaagctggtgaattaaaacctgaagaagaaataactgtagggccagttcagaaattggttactgaaatgggtacctatgcaactcagagtgcccttagcagttctagacccaccaagaaagaggaagacagacctcccttgagaggattccttctggatggagatttctttgttgctgcctcccttgccacaactatgcaactaactgctaagaatgaaatgaactgcaaggaagatcagtttcagctgagtttactggcagcaatgggtaacacacagaggaaagaggcagcagatcccctagcatctaaacttaacaaggtcacccaattgacaggtttctcagatcctgtatatgcagaagcttacgttcatgtcaaccaatatgatattgtcctggatgtacttgttgtgaaccaaaccagtgatactttgcagaattgcacattagaactagctacactaggggatctgaaacttgtggaaaagccgtctcctttgactcttgctcctcatgacttcgcaaatattaaagctaacgtcaaagtagcatcaacagaaaatggaataatttttggtaatatagtttatgatgtctctggagcagcaagtgacagaaattgtgtggttctcagtgatattcacatcgacatcatggactatatccagcctgcaacttgcactgatgcagaattccgtcagatgtgggccgaatttgaatgggaaaacaaagtgacagttaacaccaacatggttgatttaaatgactacttacagcacatattaaagtcaaccaatatgaaatgcctgactccagaaaaggccctttctggttactgtggctttatggcagccaacctttatgctcgttccatatttggtgaagatgcacttgcaaatgtcagcattgagaagccaattcaccagggaccagatgctgctgttaccggccatataagaattcgtgcaaagagccagggaatggccttaagtcttggagataaaatcaacttgtcacagaagaaaactagtatataaaaataaacaaaaagtccttgaagctttacagttaatttaggtatgggcttactggactccaacatcttttgtactctttcatgcttatatagaatctgagttcatgctgaatacttttcagccaataatttatagcctttcccttaaatcaagattgagtttaaaattatagtttgtcttttgtcttaacagttctgaatgctgtcctcaaagtatataatgtttcatgtaccaagacccttttcacagtacaataaacagatctattcataaatttttgttattttataaataaatgattacataattttagttatatggcaatggatttcttttagttgggttataaatttctattataaatttaaattactgagttgtgaatatatgcagctttattaagagaatttacaaattcaatgatataaaataaggtaggccttgattcacttggttgttttttacttatttaatattccaacattgctatctctaaaaatgcattatcatgttttgaagggatttgctcttgaatttagctccagggagaaagtatcaaaataacttttttttttttttttgagatggagtctggctctgtcacccaggctggagtgcagtggcgtgatcttggctcactgcaagctccacctcccgggtttacaccattctcctgcctcagcctcccaagtagctgggactacaggtgcccgccaccacgcctggctaattttttgtatttttagtagagacgggctttcaccatgttggccaggatggtctcgatctcctgacctcgtgatccgcccgcctcagcctcccggagtgttgggattacaggcatgagccaccgcacccggcccaaaataacttgagaaaacagatcgctctgcagtttaaagaagtattatgtacccgaactgaaatagatatactgttcttaattatcctgaatcataatgaagagtagataatccaaaatagattttttaatcattcacatttagtttggggtgttctatgtttgttaggaataaaactggttctaaccaattactgaagctggtactgggaggattcaactagagaggattcaaaaagctgcctttttctctgttgcctccgtgccttactcacatttagtttagggtgttctatgtttgttaggaataaaactggttctaaccaattactgaagctggtactgggaggattcaactagagaggattcaaaaagctgcctttttctctgttgcctctgtgccttactcactcgtctccttttcctcacttcacactaggactgggtaccatcacactgcagtataattccaaatgcatttccaagctaagtttcccagcgtctgattgtgctttccttttggcctttactttcattgggggtgattgaggtagtctgattttttagctaagtctaaacttaaggctattatttgtctaccagctagggttcaggctgcattccctgtgagtccttagataaggtctgtgaaagactgaaagcatctcctatttcattaagaatgaaatgatttgtttggagtataaggagattgataccttgtatgatgtcataaactgtgaagccacttgcttttaaaaaaaaaaaaa

SEQ ID NO: 343373 - DNA, 3345 bp, Homo sapiens
  misc_feature (3327)..(3327): n is a, c, g, or t
  misc_feature (3333)..(3333): n is a, c, g, or t
acgtcagccaaggactctggagccgccgccgccgctgctgcggttcatatccggagtagacggagccgcagtagacggatccgcggctgcaccaaaccactgcccctcggagcctggtagtgggccacaagcccccagtcccagaggcgtgattttctggcatccttaaatcttgtgtcaaggattggttataatataaccagaaaccatgacggcggctgagaacgtatgctacacgttaattaacgtgccaatggattcagaaccaccatctgaaattagcttaaaaaatgatctagaaaaaggagatgtaaagtcaaagactgaagctttgaagaaagtaatcattatgattctgaatggtgaaaaacttcctggacttctgatgaccatcattcgttttgtgctacctcttcaggatcacactatcaagaaattacttctggtattttgggaaattgttcctaaaacaactccagatgggagacttttacatgagatgatccttgtatgtgatgcatacagaaaggatcttcaacatcctaatgaatttattcgaggatctactcttcgttttctttgcaaattgaaagaagcagaattgctagaacctttaatgccagctattcgtgcatgtttggagcatcgacacagctatgttagaagaaatgctgttttggccatctataccatctatagaaattttgaacatcttatacctgatgctcctgaactgatacatgattttctggtgaatgagaaggatgcaagttgcaaaaggaatgcatttatgatgctaattcatgcagatcaggatcgagctttggattacttaagtacttgcattgatcaagttcaaacatttggagacattctgcagctggttattgttgaactgatttataaggtctgtcatgctaatccatcagaaagagctcgttttattcgctgcatctataacttattacagtcatccagccctgctgtaaaatatgaagctgctgggacattagtgacactctctagtgcaccaactgcaatcaaggctgctgctcagtgttacattgatttaattattaaggagagcgacaacaatgtaaaactcatagttttggatcgcttgatagaattaaaagagcatcctgctcatgaacgagtactacaggatctggttatggatatcctaagagtattgagcacaccagacttagaagtacgaaagaaaactctgcagttagcactggatcttgtctcttctagaaatgttgaagagctggttattgtcctgaagaaggaagtgataaaaacaaataatgtgtctgagcatgaagatactgacaaatacagacaactcctagtgcgaacattgcattcctgttctgtccgatttccagatatggctgcaaatgttattcctgtgttaatggaatttctcagtgacaacaacgaagcagcagctgctgatgtcttggagtttgttcgtgaagccattcagcgctttgataacctgagaatgcttattgttgagaagatgcttgaagtctttcatgctattaaatctgtcaagatttaccgaggagcattatggatcctgggagaatactgtagtaccaaggaagacattcagagtgtgatgactgagatccgcaggtcccttggagagatcccaattgtagagtcagaaataaagaaagaagctggtgaattaaaacctgaagaagaaataactgtagggccagttcagaaattggttactgaaatgggtacctatgcaactcagagtgcccttagcagttctagacccaccaagaaagaggaagacagacctcccttgagaggattccttctggatggagatttctttgttgctgcctcccttgccacaactctgaccaagattgcattgcgctatgtagctttggttcaggagaagaaaaagcaaaattcttttgttgctgaggctatgttgctcatggctactatcctgcatttgggaaaatcctctcttcctaagaagccaattactgatgatgatgtggatcgaatttccctgtgcctcaaggtcttgtctgaatgttcacctttaatgaatgacattttcaataaggaatgcagacagtccctttctcacatgttatctgctaaactagaagaagagaaattatcccaaaagaaagaatctgaaaagaggaatgtgacagtacagcctgatgaccccatttccttcatgcaactaactgctaagaatgaaatgaactgcaaggaagatcagtttcagctgagtttactggcagcaatgggtaacacacagaggaaagaggcagcagatcccctagcatctaaacttaacaaggtcacccaattgacaggtttctcagatcctgtatatgcagaagcttacgttcatgtcaaccaatatgatattgtcctggatgtacttgttgtgaaccaaaccagtgatactttgcagaattgcacattagaactagctacactaggggatctgaaacttgtggaaaagccgtctcctttgactcttgctcctcatgacttcgcaaatattaaagctaacgtcaaagtagcatcaacagaaaatggaataatttttggtaatatagtttatgatgtctctggagcagcaagtgacagaaattgtgtggttctcagtgatattcacatcgacatcatggactatatccagcctgcaacttgcactgatgcagaattccgtcagatgtgggccgaatttgaatgggaaaacaaagtgacagttaacaccaacatggttgatttaaatgactacttacagcacatattaaagtcaaccaatatgaaatgcctgactccagaaaaggccctttctggttactgtggctttatggcagccaacctttatgctcgttccatatttggtgaagatgcacttgcaaatgtcagcattgagaagccaattcaccagggaccagatgctgctgttaccggccatataagaattcgtgcaaagagccagggaatggccttaagtcttggagataaaatcaacttgtcacagaagaaaactagtatataaaaataaacaaaaagtccttgaagctttacagttaatttaggtatgggcttactggactccaacatcttttgtactctttcatgcttatatagaatctgagttcatgctgaatacttttcagccaataatttatagcctttcccttaaatcaagattgagtttaaaattatagtttgtcttttgtcttaacagttctgaatgctgtcctcaaagtatataatgtttcatgtaccaagacccttttcacagtaacagcnaccttnccgtccggcccc

SEQ ID NO: 343374 - DNA, 2021 bp, Homo sapiens
  misc_feature (17)..(17): n is a, c, g, or t
  misc_feature (27)..(27): n is a, c, g, or t
aaggacggtagaggatnccccacggcnggtgtactgatgcagaattccgtcagatgtgggccgaatttgaatgggaaaacaaagtgacagttaacaccaacatggttgatttaaatgactacttacagcacatattaaagtcaaccaatatgaaatgcctgactccagaaaaggccctttctggttactgtggctttatggcagccaacctttatgctcgttccatatttggtgaagatgcacttgcaaatgtcagcattgagaagccaattcaccagggaccagatgctgctgttaccggccatataagaattcgtgcaaagagccagggaatggccttaagtcttggagataaaatcaacttgtcacagaagaaaactagtatataaaaataaacaaaaagtccttgaagctttacagttaatttaggtatgggcttactggactccaacatcttttgtactctttcatgcttatatagaatctgagttcatgctgaatacttttcagccaataatttatagcctttcccttaaatcaagattgagtttaaaattatagtttgtcttttgtcttaacagttctgaatgctgtcctcaaagtatataatgtttcatgtaccaagacccttttcacagtacaataaacagatctattcataaatttttgttattttataaataaatgattacataattttagttatatggcaatggatttcttttagttgggttataaatttctattataaatttaaattactgagttgtgaatatatgcagctttattaagagaatttacaaattcaatgatataaaataaggtaggccttgattcacttggttgttttttacttatttaatattccaacattgctatctctaaaaatgcattatcatgttttgaagggatttgctcttgaatttagctccagggagaaagtatcaaaataacttttttttttttttttgagatggagtctggctctgtcacccaggctggagtgcagtggcgtgatcttggctcactgcaagctccacctcccgggtttacaccattctcctgcctcagcctcccaagtagctgggactacaggtgcccgccaccacgcctggctaattttttgtatttttagtagagacgggctttcaccatgttggccaggatggtctcgatctcctgacctcgtgatccgcccgcctcagcctcccggagtgttgggattacaggcatgagccaccgcacccggcccaaaataacttgagaaaacagatcgctctgcagtttaaagaagtattatgtacccgaactgaaatagatatactgttcttaattatcctgaatcataatgaagagtagataatccaaaatagattttttaatcattcacatttagtttggggtgttctatgtttgttaggaataaaactggttctaaccaattactgaagctggtactgggaggattcaactagagaggattcaaaaagctgcctttttctctgttgcctccgtgccttactcacatttagtttagggtgttctatgtttgttaggaataaaactggttctaaccaattactgaagctggtactgggaggattcaactagagaggattcaaaaagctgcctttttctctgttgcctctgtgccttactcactcgtctccttttcctcacttcacactaggactgggtaccatcacactgcagtataattccaaatgcatttccaagctaagtttcccagcgtctgattgtgctttccttttggcctttactttcattgggggtgattgaggtagtctgattttttagctaagtctaaacttaaggctattatttgtctaccagctagggttcaggctgcattccctgtgagtccttagataaggtctgtgaaagactgaaagcatctcctatttcattaagaatgaaatgatttgtttggagtataaggagattgataccttgtatgatgtcataaactgtgaagccacttgcttttaaaaaaaaaaaaa

SEQ ID NO: 343375 - DNA, 2049 bp, Homo sapiens
caaacaaaaagtcaaaaatttgtggttcccatgtatttccactcgattcgtgcataacccgcctccatctgccaaacaaaaatccgaccattggggccattttaaatggaacacaaggtccctttacccccaacgtggttgattaagtgtctcctcacggcacatttaaggtcaccatatataaaagcctgtctcaaaaaagccctttctggttactgtggctttatggcagccaacctttatgctcgttccatatttggtgaagatgcacttgcaaatgtcagcattgagaagccaattcaccagggaccagatgctgctgttaccggccatataagaattcgtgcaaagagccagggaatggccttaagtcttggagataaaatcaacttgtcacagaagaaaactagtatataaaaataaacaaaaagtccttgaagctttacagttaatttaggtatgggcttactggactccaacatcttttgtactctttcatgcttatatagaatctgagttcatgctgaatacttttcagccaataatttatagcctttcccttaaatcaagattgagtttaaaattatagtttgtcttttgtcttaacagttctgaatgctgtcctcaaagtatataatgtttcatgtaccaagacccttttcacagtacaataaacagatctattcataaatttttgttattttataaataaatgattacataattttagttatatggcaatggatttcttttagttgggttataaatttctattataaatttaaattactgagttgtgaatatatgcagctttattaagagaatttacaaattcaatgatataaaataaggtaggccttgattcacttggttgttttttacttatttaatattccaacattgctatctctaaaaatgcattatcatgttttgaagggatttgctcttgaatttagctccagggagaaagtatcaaaataacttttttttttttttttgagatggagtctggctctgtcacccaggctggagtgcagtggcgtgatcttggctcactgcaagctccacctcccgggtttacaccattctcctgcctcagcctcccaagtagctgggactacaggtgcccgccaccacgcctggctaattttttgtatttttagtagagacgggctttcaccatgttggccaggatggtctcgatctcctgacctcgtgatccgcccgcctcagcctcccggagtgttgggattacaggcatgagccaccgcacccggcccaaaataacttgagaaaacagatcgctctgcagtttaaagaagtattatgtacccgaactgaaatagatatactgttcttaattatcctgaatcataatgaagagtagataatccaaaatagattttttaatcattcacatttagtttggggtgttctatgtttgttaggaataaaactggttctaaccaattactgaagctggtactgggaggattcaactagagaggattcaaaaagctgcctttttctctgttgcctccgtgccttactcacatttagtttagggtgttctatgtttgttaggaataaaactggttctaaccaattactgaagctggtactgggaggattcaactagagaggattcaaaaagctgcctttttctctgttgcctctgtgccttactcactcgtctccttttcctcacttcacactaggactgggtaccatcacactgcagtataattccaaatgcatttccaagctaagtttcccagcgtctgattgtgctttccttttggcctttactttcattgggggtgattgaggtagtctgattttttagctaagtctaaacttaaggctattatttgtctaccagctagggttcaggctgcattccctgtgagtccttagataaggtctgtgaaagactgaaagcatctcctatttcattaagaatgaaatgatttgtttggagtataaggagattgataccttgtatgatgtcataaactgtgaagccacttgcttttaaaaaaaaaaaaa

SEQ ID NO: 343376 - DNA, 7701 bp, Homo sapiens
  misc_feature (3489)..(3489): n is a, c, g, or t
atcgaggtccgcgggaggctcggagcgcgccaggcggacactcctctcggctcctccccggcagcggcggcggctcggagcgggctccggggctcgggtgcagcggccagcgggcgcctggcggcgaggattacccggggaagtggttgtctcctggctggagccgcgagacgggcgctcagggcgcggggccggcggcggcgaacgagaggacggactctggcggccgggtcgttggccgcggggagcgcgggcaccgggcgagcaggccgcgtcgcgctcaccatggtcagctactgggacaccggggtcctgctgtgcgcgctgctcagctgtctgcttctcacaggatctagttcaggttcaaaattaaaagatcctgaactgagtttaaaaggcacccagcacatcatgcaagcaggccagacactgcatctccaatgcaggggggaagcagcccataaatggtctttgcctgaaatggtgagtaaggaaagcgaaaggctgagcataactaaatctgcctgtggaagaaatggcaaacaattctgcagtactttaaccttgaacacagctcaagcaaaccacactggcttctacagctgcaaatatctagctgtacctacttcaaagaagaaggaaacagaatctgcaatctatatatttattagtgatacaggtagacctttcgtagagatgtacagtgaaatccccgaaattatacacatgactgaaggaagggagctcgtcattccctgccgggttacgtcacctaacatcactgttactttaaaaaagtttccacttgacactttgatccctgatggaaaacgcataatctgggacagtagaaagggcttcatcatatcaaatgcaacgtacaaagaaatagggcttctgacctgtgaagcaacagtcaatgggcatttgtataagacaaactatctcacacatcgacaaaccaatacaatcatagatgtccaaataagcacaccacgcccagtcaaattacttagaggccatactcttgtcctcaattgtactgctaccactcccttgaacacgagagttcaaatgacctggagttaccctgatgaaaaaaataagagagcttccgtaaggcgacgaattgaccaaagcaattcccatgccaacatattctacagtgttcttactattgacaaaatgcagaacaaagacaaaggactttatacttgtcgtgtaaggagtggaccatcattcaaatctgttaacacctcagtgcatatatatgataaagcattcatcactgtgaaacatcgaaaacagcaggtgcttgaaaccgtagctggcaagcggtcttaccggctctctatgaaagtgaaggcatttccctcgccggaagttgtatggttaaaagatgggttacctgcgactgagaaatctgctcgctatttgactcgtggctactcgttaattatcaaggacgtaactgaagaggatgcagggaattatacaatcttgctgagcataaaacagtcaaatgtgtttaaaaacctcactgccactctaattgtcaatgtgaaaccccagatttacgaaaaggccgtgtcatcgtttccagacccggctctctacccactgggcagcagacaaatcctgacttgtaccgcatatggtatccctcaacctacaatcaagtggttctggcacccctgtaaccataatcattccgaagcaaggtgtgacttttgttccaataatgaagagtcctttatcctggatgctgacagcaacatgggaaacagaattgagagcatcactcagcgcatggcaataatagaaggaaagaataagatggctagcaccttggttgtggctgactctagaatttctggaatctacatttgcatagcttccaataaagttgggactgtgggaagaaacataagcttttatatcacagatgtgccaaatgggtttcatgttaacttggaaaaaatgccgacggaaggagaggacctgaaactgtcttgcacagttaacaagttcttatacagagacgttacttggattttactgcggacagttaataacagaacaatgcactacagtattagcaagcaaaaaatggccatcactaaggagcactccatcactcttaatcttaccatcatgaatgtttccctgcaagattcaggcacctatgcctgcagagccaggaatgtatacacaggggaagaaatcctccagaagaaagaaattacaatcagagatcaggaagcaccatacctcctgcgaaacctcagtgatcacacagtggccatcagcagttccaccactttagactgtcatgctaatggtgtccccgagcctcagatcacttggtttaaaaacaaccacaaaatacaacaagagcctggaattattttaggaccaggaagcagcacgctgtttattgaaagagtcacagaagaggatgaaggtgtctatcactgcaaagccaccaaccagaagggctctgtggaaagttcagcatacctcactgttcaaggaacctcggacaagtctaatctggagctgatcactctaacatgcacctgtgtggctgcgactctcttctggctcctattaaccctctttatccgaaaaatgaaaaggtcttcttctgaaataaagactgactacctatcaattataatggacccagatgaagttcctttggatgagcagtgtgagcggctcccttatgatgccagcaagtgggagtttgcccgggagagacttaaactgggcaaatcacttggaagaggggcttttggaaaagtggttcaagcatcagcatttggcattaagaaatcacctacgtgccggactgtggctgtgaaaatgctgaaagagggggccacggccagcgagtacaaagctctgatgactgagctaaaaatcttgacccacattggccaccatctgaacgtggttaacctgctgggagcctgcaccaagcaaggagggcctctgatggtgattgttgaatactgcaaatatggaaatctctccaactacctcaagagcaaacgtgacttattttttctcaacaaggatgcagcactacacatggagcctaagaaagaaaaaatggagccaggcctggaacaaggcaagaaaccaagactagatagcgtcaccagcagcgaaagctttgcgagctccggctttcaggaagataaaagtctgagtgatgttgaggaagaggaggattctgacggtttctacaaggagcccatcactatggaagatctgatttcttacagttttcaagtggccagaggcatggagttcctgtcttccagaaagtgcattcatcgggacctggcagcgagaaacattcttttatctgagaacaacgtggtgaagatttgtgattttggccttgcccgggatatttataagaaccccgattatgtgagaaaaggagatactcgacttcctctgaaatggatggctccngaatctatctttgacaaaatctacagcaccaagagcgacgtgtggtcttacggagtattgctgtgggaaatcttctccttaggtgggtctccatacccaggagtacaaatggatgaggacttttgcagtcgcctgagggaaggcatgaggatgagagctcctgagtactctactcctgaaatctatcagatcatgctggactgctggcacagagacccaaaagaaaggccaagatttgcagaacttgtggaaaaactaggtgatttgcttcaagcaaatgtacaacaggatggtaaagactacatcccaatcaatgccatactgacaggaaatagtgggtttacatactcaactcctgccttctctgaggacttcttcaaggaaagtatttcagctccgaagtttaattcaggaagctctgatgatgtcagatatgtaaatgctttcaagttcatgagcctggaaagaatcaaaacctttgaagaacttttaccgaatgccacctccatgtttgatgactaccagggcgacagcagcactctgttggcctctcccatgctgaagcgcttcacctggactgacagcaaacccaaggcctcgctcaagattgacttgagagtaaccagtaaaagtaaggagtcggggctgtctgatgtcagcaggcccagtttctgccattccagctgtgggcacgtcagcgaaggcaagcgcaggttcacctacgaccacgctgagctggaaaggaaaatcgcgtgctgctccccgcccccagactacaactcggtggtcctgtactccaccccacccatctagagtttgacacgaagccttatttctagaagcacatgtgtatttatacccccaggaaactagcttttgccagtattatgcatatataagtttacacctttatctttccatgggagccagctgctttttgtgatttttttaatagtgctttttttttttgactaacaagaatgtaactccagatagagaaatagtgacaagtgaagaacactactgctaaatcctcatgttactcagtgttagagaaatccttcctaaacccaatgacttccctgctccaacccccgccacctcagggcacgcaggaccagtttgattgaggagctgcactgatcacccaatgcatcacgtaccccactgggccagccctgcagcccaaaacccagggcaacaagcccgttagccccagggatcactggctggcctgagcaacatctcgggagtcctctagcaggcctaagacatgtgaggaggaaaaggaaaaaaagcaaaaagcaagggagaaaagagaaaccgggagaaggcatgagaaagaatttgagacgcaccatgtgggcacggagggggacggggctcagcaatgccatttcagtggcttcccagctctgacccttctacatttgagggcccagccaggagcagatggacagcgatgaggggacattttctggattctgggaggcaagaaaaggacaaatatcttttttggaactaaagcaaattttagaactttacctatggaagtggttctatgtccattctcattcgtggcatgttttgatttgtagcactgagggtggcactcaactctgagcccatacttttggctcctctagtaagatgcactgaaaacttagccagagttaggttgtctccaggccatgatggccttacactgaaaatgtcacattctattttgggtattaatatatagtccagacacttaactcaatttcttggtattattctgttttgcacagttagttgtgaaagaaagctgagaagaatgaaaatgcagtcctgaggagaggagttttctccatatcaaaacgagggctgatggaggaaaaaggtcaataaggtcaagggaaaaccccgtctctataccaaccaaaccaattcaccaacacagttgggacccaaaacacaggaagtcagtcacgtttccttttcatttaatggggattccactatctcacactaatctgaaaggatgtggaagagcattagctggcgcatattaagcactttaagctccttgagtaaaaaggtggtatgtaatttatgcaaggtatttctccagttgggactcaggatattagttaatgagccatcactagaagaaaagcccattttcaactgctttgaaacttgcctggggtctgagcatgatgggaatagggagacagggtaggaaagggcgcctactcttcagggtctaaagatcaagtgggccttggatcgctaagctggctctgtttgatgctatttatgcaagttagggtctatgtatttaggatgcgcctactcttcagggtctaaagatcaagtgggccttggatcgctaagctggctctgtttgatgctatttatgcaagttagggtctatgtatttaggatgtctgcaccttctgcagccagtcagaagctggagaggcaacagtggattgctgcttcttggggagaagagtatgcttccttttatccatgtaatttaactgtagaacctgagctctaagtaaccgaagaatgtatgcctctgttcttatgtgccacatccttgtttaaaggctctctgtatgaagagatgggaccgtcatcagcacattccctagtgagcctactggctcctggcagcggcttttgtggaagactcactagccagaagagaggagtgggacagtcctctccaccaagatctaaatccaaacaaaagcaggctagagccagaagagaggacaaatctttgttcttcctcttctttacatacgcaaaccacctgtgacagctggcaattttataaatcaggtaactggaaggaggttaaacacagaaaaaagaagacctcagtcaattctctactttttttttttttttccaaatcagataatagcccagcaaatagtgataacaaataaaaccttagctattcatgtcttgatttcaataattaattcttaatcattaagagaccataataaatactccttttcaagagaaaagcaaaaccattagaattgttactcagctccttcaaactcaggtttgtagcatacatgagtccatccatcagtcaaagaatggttccatctggagtcttaatgtagaaagaaaaatggagacttgtaataatgagctagttacaaagtgcttgttcattaaaatagcactgaaaattgaaacatgaattaactgataatattccaatcatttgccatttatgacaaaaatggttggcactaacaaagaacgagcacttcctttcagagtttctgagataatgtacgtggaacagtctgggtggaatggggctgaaaccatgtgcaagtctgtgtcttgtcagtccaagaagtgacaccgagatgttaattttagggacccgtgccttgtttcctagcccacaagaatgcaaacatcaaacagatactcgctagcctcatttaaattgattaaaggaggagtgcatctttggccgacagtggtgtaactgtatgtgtgtgtgtgtgtgtgtgtgtgtgtgtgggtgtatgtgtgttttgtgcataactatttaaggaaactggaattttaaagttacttttatacaaaccaagaatatatgctacagatataagacagacatggtttggtcctatatttctagtcatgatgaatgtattttgtataccatcttcatataataaacttaaaaatatttcttaattgggatttgtaatcgtaccaacttaattgataaacttggcaactgcttttatgttctgtctccttccataaatttttcaaaatactaattcaacaaagaaaaagctcttttttttcctaaaataaactcaaatttatccttgtttagagcagagaaaaattaagaaaaactttgaaatggtctcaaaaaattgctaaatattttcaatggaaaactaaatgttagtttagctgattgtatggggttttcgaacctttcactttttgtttgttttacctatttcacaactgtgtaaattgccaataattcctgtccatgaaaatgcaaattatccagtgtagatatatttgaccatcaccctatggatattggctagttttgcctttattaagcaaattcatttcagcctgaatgtctgcctatatattctctgctctttgtattctcctttgaacccgttaaaacatcctgtggcactc

SEQ ID NO: 343377 - DNA, 1090 bp, Homo sapiens
atcgaggtccgcgggaggctcggagcgcgccaggcggacactcctctcggctcctccccggcagcggcggcggctcggagcgggctccggggctcgggtgcagcggccagcgggcgcctggcggcgaggattacccggggaagtggttgtctcctggctggagccgcgagacgggcgctcagggcgcggggccggcggcggcgaacgagaggacggactctggcggccgggtcgttggccgcggggagcgcgggcaccgggcgagcaggccgcgtcgcgctcaccatggtcagctactgggacaccggggtcctgctgtgcgcgctgctcagctgtctgcttctcacaggatctagttcaggttcaaaattaaaagatcctgaactgagtttaaaaggcacccagcacatcatgcaagcaggccagacactgcatctccaatgcaggggggaagcagcccataaatggtctttgcctgaaatggtgagtaaggaaagcgaaaggctgagcataactaaatctgcctgtggaagaaatggcaaacaattctgcagtactttaaccttgaacacagctcaagcaaaccacactggcttctacagctgcaaatatctagctgtacctacttcaaagaagaaggaaacagaatctgcaatctatatatttattagtggtaagacttccattttctacattctgtttgcttttgctttgcaaatgagtcataaatctaccctgatccattggaaaggttgctttcctagtgagtatgaaagaaacgggttaggaaagagattccatcctagttgtagacactttcgtggatgtcaattttaaccagaattgtcaaggcccagttagtcactatgtgctccacaaagagagagactggtctgtataggtcacctctgtacccacagctcctagcacagtatgtggcccatagttggatgaataagtgaataaaaggattttagttctatttcttagttattgagaagcccaaaatagaatacatgatttttgtcatttaacacagctgcattctcttatatgttggaactgtaaaatactgttgtttctactaaat

SEQ ID NO: 343378 - DNA, 1792 bp, Homo sapiens
atcgaggtccgcgggaggctcggagcgcgccaggcggacactcctctcggctcctccccggcagcggcggcggctcggagcgggctccggggctcgggtgcagcggccagcgggcgcctggcggcgaggattacccggggaagtggttgtctcctggctggagccgcgagacgggcgctcagggcgcggggccggcggcggcgaacgagaggacggactctggcggccgggtcgttggccgcggggagcgcgggcaccgggcgagcaggccgcgtcgcgctcaccatggtcagctactgggacaccggggtcctgctgtgcgcgctgctcagctgtctgcttctcacaggtgaggcgcggctgggggccggggcctgaggcgggctgcgatggggcggccggagggcagagcctccgaggccagggcggggtgcacgcggggagacgaggctgtagcccggagaagctggctacggcgagaacctgggacactagttgcagcgggcacgcttggggccgctgcgccctttctccgagggagcgcctcgaggagtggctggcctggacccgcgagcatcagcgctcagaccgggtccgcgctggggctgtccgtttgcgacaggatcgctgatcccttatccagctgtcgggttggggtctcactgccgaggccctgggcacttaggagcagcacgcaccgggacctgcctggcacccagagcccattcccagaggacctggggcaggtacgcagggtcccccggagccgggagcagagggtcctgaaaggcctgcccaggtggccgggggttggctgaggcccggggtcttttggtatttggtactggccgcgacctcgcgtcctcacggagagtgtaggaggggagccgatttggaggggactcgtgcctgcgggggagcaggaggatctcaggagagggccagcgccggcattcccatgacccgcttgagtccccaagccggactgtcccggggaacgcttcggcgagcgcccggctcctcccccgccgctctcggaccgcggggccccagtgcgctgcgctcagccacccgggtggggcctctgccgggagcaggcgtggtgcgcggtccagtccgtgtcgcggacatcagtgaccctgacccacaagggcagcccagggcccaaataccgttaacttactgacttacaagcctagcctttaaaatccgagcgaagagagggcgggcgattttgaccaaacgatgtggtttgaggaatcgatgaggtccgcccgccacctaagtcagccttcgctgggcgtttgggagacgggcggtggaacagtcaggggccgggggttttaccagcagttagaccgccgccattgaggggtcaaagccccgaggaacttgagggttcggactcgcagtctctgctcagtggggctgagtggcggagatttgtgcctcgttcccctgggcgcagagagccagatttcggagcgcctttcttttaagcatcgtggagaaaaggtaaaatatgaaataaaatatagtaatataaaataagtcattgcaatgattcccgggaagaaaagtcaataggatggagcgtagtacaacaacaacaacaacaaaaagcttgttaaacccaaaaagcagtaataattaaatattctttctcagtgggaagactaactagaccgtcagtttccaagtaacaagtaatagttccaattagattggagaaactactaaacccggagacagggcgaagtggtaacttctaagaacctcgctgtaggttggg

SEQ ID NO: 343379 - DNA, 973 bp, Homo sapiens
tgatcagctacacacaggaaccttgctcacagccccggaaactccacactgtgggcttcaccttctggaagtgacaaagtcatgtacgcaggaccttccccaccagtctccactgctgagcccataaagggaggtgtgaggacttggaaatgccacatgctttttaagaagccagctcaaaccaacctttgttacaactcgagaatgaaataagtactacaaactattcagccattgatatttatggctgtatgactttttttttttttaactttaaggacatcgtcctacttctgtaagtgtggggaggagtactccacttcacattgaactgcagtgagcggtggggtttcctttccgaattgctgtgtttcattcacagaactcagaccttccatctgcagaggccacaggcacaacaaagaacctgggtatccatgagctctggtgggttggttagtctgccttggtagacgtgttttccactgaccacaggacctggcccagacagccttttaagtgctggtgctataaacccaaacctaaaaatgaagcagggtcacatagtacagaaagcttgggctttatgcggatgatgacagccctccctttgtagtacgtaaggcaatgcataggatgatcactgctctccaactatttctgttgctgttttccccaccagctatcagatcatgctggactgctggcacagagacccaaaagaaaggccaagatttgcagaacttgtggaaaaactaggtgatttgcttcaagcaaatgtacaacaggatggtaaagactacatcccaatcaatgccatactgacaggaaatagtgggtttacatactcaactcctgccttctctgaggacttcttcaaggaaagtatttcagctccgaagtttaattcaggaagctctgatgatgtcaggtaagatttctttctcaaactttatatcacagaattttccaa

SEQ ID NO: 343380 - DNA, 296 bp, Homo sapiens
  misc_feature (170)..(170): n is a, c, g, or t
  misc_feature (230)..(230): n is a, c, g, or t
  misc_feature (234)..(234): n is a, c, g, or t
  misc_feature (244)..(244): n is a, c, g, or t
  misc_feature (248)..(248): n is a, c, g, or t
  misc_feature (265)..(265): n is a, c, g, or t
  misc_feature (279)..(279): n is a, c, g, or t
  misc_feature (293)..(293): n is a, c, g, or t
atcgaggtccgcgggaggctcggagcgcgccaggcggacactcctctcggctcctccccggcagcggcggcggctcggagcgggctccggggctcgggtgcagcggccagcgggcgcctggcggcgaggattacccggggaagtggttgtctcctttctttatcctctanactttctctcatttctcttttccttcttcttctaactatattacttactctttcttccgnttcnttgtccgcgnttancgcttgcacctttctancattcctcttctcnctcaccattttcancta

SEQ ID NO: 343381 - DNA, 6510 bp, Homo sapiens
  misc_feature (3489)..(3489): n is a, c, g, or t
atcgaggtccgcgggaggctcggagcgcgccaggcggacactcctctcggctcctccccggcagcggcggcggctcggagcgggctccggggctcgggtgcagcggccagcgggcgcctggcggcgaggattacccggggaagtggttgtctcctggctggagccgcgagacgggcgctcagggcgcggggccggcggcggcgaacgagaggacggactctggcggccgggtcgttggccgcggggagcgcgggcaccgggcgagcaggccgcgtcgcgctcaccatggtcagctactgggacaccggggtcctgctgtgcgcgctgctcagctgtctgcttctcacaggatctagttcaggttcaaaattaaaagatcctgaactgagtttaaaaggcacccagcacatcatgcaagcaggccagacactgcatctccaatgcaggggggaagcagcccataaatggtctttgcctgaaatggtgagtaaggaaagcgaaaggctgagcataactaaatctgcctgtggaagaaatggcaaacaattctgcagtactttaaccttgaacacagctcaagcaaaccacactggcttctacagctgcaaatatctagctgtacctacttcaaagaagaaggaaacagaatctgcaatctatatatttattagtgatacaggtagacctttcgtagagatgtacagtgaaatccccgaaattatacacatgactgaaggaagggagctcgtcattccctgccgggttacgtcacctaacatcactgttactttaaaaaagtttccacttgacactttgatccctgatggaaaacgcataatctgggacagtagaaagggcttcatcatatcaaatgcaacgtacaaagaaatagggcttctgacctgtgaagcaacagtcaatgggcatttgtataagacaaactatctcacacatcgacaaaccaatacaatcatagatgtccaaataagcacaccacgcccagtcaaattacttagaggccatactcttgtcctcaattgtactgctaccactcccttgaacacgagagttcaaatgacctggagttaccctgatgaaaaaaataagagagcttccgtaaggcgacgaattgaccaaagcaattcccatgccaacatattctacagtgttcttactattgacaaaatgcagaacaaagacaaaggactttatacttgtcgtgtaaggagtggaccatcattcaaatctgttaacacctcagtgcatatatatgataaagcattcatcactgtgaaacatcgaaaacagcaggtgcttgaaaccgtagctggcaagcggtcttaccggctctctatgaaagtgaaggcatttccctcgccggaagttgtatggttaaaagatgggttacctgcgactgagaaatctgctcgctatttgactcgtggctactcgttaattatcaaggacgtaactgaagaggatgcagggaattatacaatcttgctgagcataaaacagtcaaatgtgtttaaaaacctcactgccactctaattgtcaatgtgaaaccccagatttacgaaaaggccgtgtcatcgtttccagacccggctctctacccactgggcagcagacaaatcctgacttgtaccgcatatggtatccctcaacctacaatcaagtggttctggcacccctgtaaccataatcattccgaagcaaggtgtgacttttgttccaataatgaagagtcctttatcctggatgctgacagcaacatgggaaacagaattgagagcatcactcagcgcatggcaataatagaaggaaagaataagatggctagcaccttggttgtggctgactctagaatttctggaatctacatttgcatagcttccaataaagttgggactgtgggaagaaacataagcttttatatcacagatgtgccaaatgggtttcatgttaacttggaaaaaatgccgacggaaggagaggacctgaaactgtcttgcacagttaacaagttcttatacagagacgttacttggattttactgcggacagttaataacagaacaatgcactacagtattagcaagcaaaaaatggccatcactaaggagcactccatcactcttaatcttaccatcatgaatgtttccctgcaagattcaggcacctatgcctgcagagccaggaatgtatacacaggggaagaaatcctccagaagaaagaaattacaatcagagatcaggaagcaccatacctcctgcgaaacctcagtgatcacacagtggccatcagcagttccaccactttagactgtcatgctaatggtgtccccgagcctcagatcacttggtttaaaaacaaccacaaaatacaacaagagcctggaattattttaggaccaggaagcagcacgctgtttattgaaagagtcacagaagaggatgaaggtgtctatcactgcaaagccaccaaccagaagggctctgtggaaagttcagcatacctcactgttcaaggaacctcggacaagtctaatctggagctgatcactctaacatgcacctgtgtggctgcgactctcttctggctcctattaaccctctttatccgaaaaatgaaaaggtcttcttctgaaataaagactgactacctatcaattataatggacccagatgaagttcctttggatgagcagtgtgagcggctcccttatgatgccagcaagtgggagtttgcccgggagagacttaaactgggcaaatcacttggaagaggggcttttggaaaagtggttcaagcatcagcatttggcattaagaaatcacctacgtgccggactgtggctgtgaaaatgctgaaagagggggccacggccagcgagtacaaagctctgatgactgagctaaaaatcttgacccacattggccaccatctgaacgtggttaacctgctgggagcctgcaccaagcaaggagggcctctgatggtgattgttgaatactgcaaatatggaaatctctccaactacctcaagagcaaacgtgacttattttttctcaacaaggatgcagcactacacatggagcctaagaaagaaaaaatggagccaggcctggaacaaggcaagaaaccaagactagatagcgtcaccagcagcgaaagctttgcgagctccggctttcaggaagataaaagtctgagtgatgttgaggaagaggaggattctgacggtttctacaaggagcccatcactatggaagatctgatttcttacagttttcaagtggccagaggcatggagttcctgtcttccagaaagtgcattcatcgggacctggcagcgagaaacattcttttatctgagaacaacgtggtgaagatttgtgattttggccttgcccgggatatttataagaaccccgattatgtgagaaaaggagatactcgacttcctctgaaatggatggctccngaatctatctttgacaaaatctacagcaccaagagcgacgtgtggtcttacggagtattgctgtgggaaatcttctccttaggtgggtctccatacccaggagtacaaatggatgaggacttttgcagtcgcctgagggaaggcatgaggatgagagctcctgagtactctactcctgaaatctatcagatcatgctggactgctggcacagagacccaaaagaaaggccaagatttgcagaacttgtggaaaaactaggtgatttgcttcaagcaaatgtacaacaggatggtaaagactacatcccaatcaatgccatactgacaggaaatagtgggtttacatactcaactcctgccttctctgaggacttcttcaaggaaagtatttcagctccgaagtttaattcaggaagctctgatgatgtcagatatgtaaatgctttcaagttcatgagcctggaaagaatcaaaacctttgaagaacttttaccgaatgccacctccatgtttgatgactaccagggcgacagcagcactctgttggcctctcccatgctgaagcgcttcacctggactgacagcaaacccaaggcctcgctcaagattgacttgagagtaaccagtaaaagtaaggagtcggggctgtctgatgtcagcaggcccagtttctgccattccagctgtgggcacgtcagcgaaggcaagcgcaggttcacctacgaccacgctgagctggaaaggaaaatcgcgtgctgctccccgcccccagactacaactcggtggtcctgtactccaccccacccatctagagtttgacacgaagccttatttctagaagcacatgtgtatttatacccccaggaaactagcttttgccagtattatgcatatataagtttacacctttatctttccatgggagccagctgctttttgtgatttttttaatagtgctttttttttttgactaacaagaatgtaactccagatagagaaatagtgacaagtgaagaacactactgctaaatcctcatgttactcagtgttagagaaatccttcctaaacccaatgacttccctgctccaacccccgccacctcagggcacgcaggaccagtttgattgaggagctgcactgatcacccaatgcatcacgtaccccactgggccagccctgcagcccaaaacccagggcaacaagcccgttagccccagggatcactggctggcctgagcaacatctcgggagtcctctagcaggcctaagacatgtgaggaggaaaaggaaaaaaagcaaaaagcaagggagaaaagagaaaccgggagaaggcatgagaaagaatttgagacgcaccatgtgggcacggagggggacggggctcagcaatgccatttcagtggcttcccagctctgacccttctacatttgagggcccagccaggagcagatggacagcgatgaggggacattttctggattctgggaggcaagaaaaggacaaatatcttttttggaactaaagcaaattttagaactttacctatggaagtggttctatgtccattctcattcgtggcatgttttgatttgtagcactgagggtggcactcaactctgagcccatacttttggctcctctagtaagatgcactgaaaacttagccagagttaggttgtctccaggccatgatggccttacactgaaaatgtcacattctattttgggtattaatatatagtccagacacttaactcaatttcttggtattattctgttttgcacagttagttgtgaaagaaagctgagaagaatgaaaatgcagtcctgaggagaggagttttctccatatcaaaacgagggctgatggaggaaaaaggctctctgtatgaagagatgggaccgtcatcagcacattccctagtgagcctactggctcctggcagcggcttttgtggaagactcactagccagaagagaggagtgggacagtcctctccaccaagatctaaatccaaacaaaagcaggctagagccagaagagaggacaaatctttgttcttcctcttctttacatacgcaaaccacctgtgacagctggcaattttataaatcaggtaactggaaggaggttaaacacagaaaaaagaagacctcagtcaattctctactttttttttttttttccaaatcagataatagcccagcaaatagtgataacaaataaaaccttagctattcatgtcttgatttcaataattaattcttaatcattaagagaccataataaatactccttttcaagagaaaagcaaaaccattagaattgttactcagctccttcaaactcaggtttgtagcatacatgagtccatccatcagtcaaagaatggttccatctggagtcttaatgtagaaagaaaaatggagacttgtaataatgagctagttacaaagtgcttgttcattaaaatagcactgaaaattgaaacatgaattaactgataatattccaatcatttgccatttatgacaaaaatggttggcactaacaaagaacgagcacttcctttcagagtttctgagataatgtacgtggaacagtctgggtggaatggggctgaaaccatgtgcaagtctgtgtcttgtcagtccaagaagtgacaccgagatgttaattttagggacccgtgccttgtttcctagcccacaagaatgcaaacatcaaacagatactcgctagcctcatttaaattgattaaaggaggagtgcatctttggccgacagtggtgtaactgtatgtgtgtgtgtgtgtgtgtgtgtgtgtgtgggtgtatgtgtgttttgtgcataactatttaaggaaactggaattttaaagttacttttatacaaaccaagaatatatgctacagatataagacagacatggtttggtcctatatttctagtcatgatgaatgtattttgtataccatcttcatataataaacttccaaaaacacaaaaaaaaaaac

SEQ ID NO: 343382 - DNA, 7094 bp, Homo sapiens
  misc_feature (3489)..(3489): n is a, c, g, or t
atcgaggtccgcgggaggctcggagcgcgccaggcggacactcctctcggctcctccccggcagcggcggcggctcggagcgggctccggggctcgggtgcagcggccagcgggcgcctggcggcgaggattacccggggaagtggttgtctcctggctggagccgcgagacgggcgctcagggcgcggggccggcggcggcgaacgagaggacggactctggcggccgggtcgttggccgcggggagcgcgggcaccgggcgagcaggccgcgtcgcgctcaccatggtcagctactgggacaccggggtcctgctgtgcgcgctgctcagctgtctgcttctcacaggatctagttcaggttcaaaattaaaagatcctgaactgagtttaaaaggcacccagcacatcatgcaagcaggccagacactgcatctccaatgcaggggggaagcagcccataaatggtctttgcctgaaatggtgagtaaggaaagcgaaaggctgagcataactaaatctgcctgtggaagaaatggcaaacaattctgcagtactttaaccttgaacacagctcaagcaaaccacactggcttctacagctgcaaatatctagctgtacctacttcaaagaagaaggaaacagaatctgcaatctatatatttattagtgatacaggtagacctttcgtagagatgtacagtgaaatccccgaaattatacacatgactgaaggaagggagctcgtcattccctgccgggttacgtcacctaacatcactgttactttaaaaaagtttccacttgacactttgatccctgatggaaaacgcataatctgggacagtagaaagggcttcatcatatcaaatgcaacgtacaaagaaatagggcttctgacctgtgaagcaacagtcaatgggcatttgtataagacaaactatctcacacatcgacaaaccaatacaatcatagatgtccaaataagcacaccacgcccagtcaaattacttagaggccatactcttgtcctcaattgtactgctaccactcccttgaacacgagagttcaaatgacctggagttaccctgatgaaaaaaataagagagcttccgtaaggcgacgaattgaccaaagcaattcccatgccaacatattctacagtgttcttactattgacaaaatgcagaacaaagacaaaggactttatacttgtcgtgtaaggagtggaccatcattcaaatctgttaacacctcagtgcatatatatgataaagcattcatcactgtgaaacatcgaaaacagcaggtgcttgaaaccgtagctggcaagcggtcttaccggctctctatgaaagtgaaggcatttccctcgccggaagttgtatggttaaaagatgggttacctgcgactgagaaatctgctcgctatttgactcgtggctactcgttaattatcaaggacgtaactgaagaggatgcagggaattatacaatcttgctgagcataaaacagtcaaatgtgtttaaaaacctcactgccactctaattgtcaatgtgaaaccccagatttacgaaaaggccgtgtcatcgtttccagacccggctctctacccactgggcagcagacaaatcctgacttgtaccgcatatggtatccctcaacctacaatcaagtggttctggcacccctgtaaccataatcattccgaagcaaggtgtgacttttgttccaataatgaagagtcctttatcctggatgctgacagcaacatgggaaacagaattgagagcatcactcagcgcatggcaataatagaaggaaagaataagatggctagcaccttggttgtggctgactctagaatttctggaatctacatttgcatagcttccaataaagttgggactgtgggaagaaacataagcttttatatcacagatgtgccaaatgggtttcatgttaacttggaaaaaatgccgacggaaggagaggacctgaaactgtcttgcacagttaacaagttcttatacagagacgttacttggattttactgcggacagttaataacagaacaatgcactacagtattagcaagcaaaaaatggccatcactaaggagcactccatcactcttaatcttaccatcatgaatgtttccctgcaagattcaggcacctatgcctgcagagccaggaatgtatacacaggggaagaaatcctccagaagaaagaaattacaatcagagatcaggaagcaccatacctcctgcgaaacctcagtgatcacacagtggccatcagcagttccaccactttagactgtcatgctaatggtgtccccgagcctcagatcacttggtttaaaaacaaccacaaaatacaacaagagcctggaattattttaggaccaggaagcagcacgctgtttattgaaagagtcacagaagaggatgaaggtgtctatcactgcaaagccaccaaccagaagggctctgtggaaagttcagcatacctcactgttcaaggaacctcggacaagtctaatctggagctgatcactctaacatgcacctgtgtggctgcgactctcttctggctcctattaaccctctttatccgaaaaatgaaaaggtcttcttctgaaataaagactgactacctatcaattataatggacccagatgaagttcctttggatgagcagtgtgagcggctcccttatgatgccagcaagtgggagtttgcccgggagagacttaaactgggcaaatcacttggaagaggggcttttggaaaagtggttcaagcatcagcatttggcattaagaaatcacctacgtgccggactgtggctgtgaaaatgctgaaagagggggccacggccagcgagtacaaagctctgatgactgagctaaaaatcttgacccacattggccaccatctgaacgtggttaacctgctgggagcctgcaccaagcaaggagggcctctgatggtgattgttgaatactgcaaatatggaaatctctccaactacctcaagagcaaacgtgacttattttttctcaacaaggatgcagcactacacatggagcctaagaaagaaaaaatggagccaggcctggaacaaggcaagaaaccaagactagatagcgtcaccagcagcgaaagctttgcgagctccggctttcaggaagataaaagtctgagtgatgttgaggaagaggaggattctgacggtttctacaaggagcccatcactatggaagatctgatttcttacagttttcaagtggccagaggcatggagttcctgtcttccagaaagtgcattcatcgggacctggcagcgagaaacattcttttatctgagaacaacgtggtgaagatttgtgattttggccttgcccgggatatttataagaaccccgattatgtgagaaaaggagatactcgacttcctctgaaatggatggctccngaatctatctttgacaaaatctacagcaccaagagcgacgtgtggtcttacggagtattgctgtgggaaatcttctccttaggtgggtctccatacccaggagtacaaatggatgaggacttttgcagtcgcctgagggaaggcatgaggatgagagctcctgagtactctactcctgaaatctatcagatcatgctggactgctggcacagagacccaaaagaaaggccaagatttgcagaacttgtggaaaaactaggtgatttgcttcaagcaaatgtacaacaggatggtaaagactacatcccaatcaatgccatactgacaggaaatagtgggtttacatactcaactcctgccttctctgaggacttcttcaaggaaagtatttcagctccgaagtttaattcaggaagctctgatgatgtcagatatgtaaatgctttcaagttcatgagcctggaaagaatcaaaacctttgaagaacttttaccgaatgccacctccatgtttgatgactaccagggcgacagcagcactctgttggcctctcccatgctgaagcgcttcacctggactgacagcaaacccaaggcctcgctcaagattgacttgagagtaaccagtaaaagtaaggagtcggggctgtctgatgtcagcaggcccagtttctgccattccagctgtgggcacgtcagcgaaggcaagcgcaggttcacctacgaccacgctgagctggaaaggaaaatcgcgtgctgctccccgcccccagactacaactcggtggtcctgtactccaccccacccatctagagtttgacacgaagccttatttctagaagcacatgtgtatttatacccccaggaaactagcttttgccagtattatgcatatataagtttacacctttatctttccatgggagccagctgctttttgtgatttttttaatagtgctttttttttttgactaacaagaatgtaactccagatagagaaatagtgacaagtgaagaacactactgctaaatcctcatgttactcagtgttagagaaatccttcctaaacccaatgacttccctgctccaacccccgccacctcagggcacgcaggaccagtttgattgaggagctgcactgatcacccaatgcatcacgtaccccactgggccagccctgcagcccaaaacccagggcaacaagcccgttagccccagggatcactggctggcctgagcaacatctcgggagtcctctagcaggcctaagacatgtgaggaggaaaaggaaaaaaagcaaaaagcaagggagaaaagagaaaccgggagaaggcatgagaaagaatttgagacgcaccatgtgggcacggagggggacggggctcagcaatgccatttcagtggcttcccagctctgacccttctacatttgagggcccagccaggagcagatggacagcgatgaggggacattttctggattctgggaggcaagaaaaggacaaatatcttttttggaactaaagcaaattttagaactttacctatggaagtggttctatgtccattctcattcgtggcatgttttgatttgtagcactgagggtggcactcaactctgagcccatacttttggctcctctagtaagatgcactgaaaacttagccagagttaggttgtctccaggccatgatggccttacactgaaaatgtcacattctattttgggtattaatatatagtccagacacttaactcaatttcttggtattattctgttttgcacagttagttgtgaaagaaagctgagaagaatgaaaatgcagtcctgaggagaggagttttctccatatcaaaacgagggctgatggaggaaaaaggtcaataaggtcaagggaaaaccccgtctctataccaaccaaaccaattcaccaacacagttgggacccaaaacacaggaagtcagtcacgtttccttttcatttaatggggattccactatctcacactaatctgaaaggatgtggaagagcattagctggcgcatattaagcactttaagctccttgagtaaaaaggtggtatgtaatttatgcaaggtatttctccagttgggactcaggatattagttaatgagccatcactagaagaaaagcccattttcaactgctttgaaacttgcctggggtctgagcatgatgggaatagggagacagggtaggaaagggcgcctactcttcagggtctaaagatcaagtgggccttggatcgctaagctggctctgtttgatgctatttatgcaagttagggtctatgtatttaggatgtctgcaccttctgcagccagtcagaagctggagaggcaacagtggattgctgcttcttggggagaagagtatgcttccttttatccatgtaatttaactgtagaacctgagctctaagtaaccgaagaatgtatgcctctgttcttatgtgccacatccttgtttaaaggctctctgtatgaagagatgggaccgtcatcagcacattccctagtgagcctactggctcctggcagcggcttttgtggaagactcactagccagaagagaggagtgggacagtcctctccaccaagatctaaatccaaacaaaagcaggctagagccagaagagaggacaaatctttgttcttcctcttctttacatacgcaaaccacctgtgacagctggcaattttataaatcaggtaactggaaggaggttaaacacagaaaaaagaagacctcagtcaattctctactttttttttttttttccaaatcagataatagcccagcaaatagtgataacaaataaaaccttagctattcatgtcttgatttcaataattaattcttaatcattaagagaccataataaatactccttttcaagagaaaagcaaaaccattagaattgttactcagctccttcaaactcaggtttgtagcatacatgagtccatccatcagtcaaagaatggttccatctggagtcttaatgtagaaagaaaaatggagacttgtaataatgagctagttacaaagtgcttgttcattaaaatagcactgaaaattgaaacatgaattaactgataatattccaatcatttgccatttatgacaaaaatggttggcactaacaaagaacgagcacttcctttcagagtttctgagataatgtacgtggaacagtctgggtggaatggggctgaaaccatgtgcaagtctgtgtcttgtcagtccaagaagtgacaccgagatgttaattttagggacccgtgccttgtttcctagcccacaagaatgcaaacatcaaacagatactcgctagcctcatttaaattgattaaaggaggagtgcatctttggccgacagtggtgtaactgtatgtgtgtgtgtgtgtgtgtgtgtgtgtgtgggtgtatgtgtgttttgtgcataactatttaaggaaactggaattttaaagttacttttatacaaaccaagaatatatttcacacacataacccccacttgtgttcggtatcccacatccagtcaatatgaatggggtttgccccctataata

SEQ ID NO: 343383 - DNA, 7193 bp, Homo sapiens
  misc_feature (1992)..(1992): n is a, c, g, or t
  misc_feature (3554)..(3554): n is a, c, g, or t
atcgaggtccgcgggaggctcggagcgcgccaggcggacactcctctcggctcctccccggcagcggcggcggctcggagcgggctccggggctcgggtgcagcggccagcgggcgcctggcggcgaggattacccggggaagtggttgtctcctggctggagccgcgagacgggcgctcagggcgcggggccggcggcggcgaacgagaggacggactctggcggccgggtcgttggccgcggggagcgcgggcaccgggcgagcaggccgcgtcgcgctcaccatggtcagctactgggacaccggggtcctgctgtgcgcgctgctcagctgtctgcttctcacaggatctagttcaggttcaaaattaaaagatcctgaactgagtttaaaaggcacccagcacatcatgcaagcaggccagacactgcatctccaatgcaggggggaagcagcccataaatggtctttgcctgaaatggtgagtaaggaaagcgaaaggctgagcataactaaatctgcctgtggaagaaatggcaaacaattctgcagtactttaaccttgaacacagctcaagcaaaccacactggcttctacagctgcaaatatctagctgtacctacttcaaagaagaaggaaacagaatctgcaatctatatatttattagtgatacaggtagacctttcgtagagatgtacagtgaaatccccgaaattatacacatgactgaaggaagggagctcgtcattccctgccgggttacgtcacctaacatcactgttactttaaaaaagtttccacttgacactttgatccctgatggaaaacgcataatctgggacagtagaaagggcttcatcatatcaaatgcaacgtacaaagaaatagggcttctgacctgtgaagcaacagtcaatgggcatttgtataagacaaactatctcacacatcgacaaaccaatacaatcatagatgtccaaataagcacaccacgcccagtcaaattacttagaggccatactcttgtcctcaattgtactgctaccactcccttgaacacgagagttcaaatgacctggagttaccctgatgaaaaaaataagagagcttccgtaaggcgacgaattgaccaaagcaattcccatgccaacatattctacagtgttcttactattgacaaaatgcagaacaaagacaaaggactttatacttgtcgtgtaaggagtggaccatcattcaaatctgttaacacctcagtgcatatatatgataaagcattcatcactgtgaaacatcgaaaacagcaggtgcttgaaaccgtagctggcaagcggtcttaccggctctctatgaaagtgaaggcatttccctcgccggaagttgtatggttaaaagatgggttacctgcgactgagaaatctgctcgctatttgactcgtggctactcgttaattatcaaggacgtaactgaagaggatgcagggaattatacaatcttgctgagcataaaacagtcaaatgtgtttaaaaacctcactgccactctaattgtcaatgtgaaaccccagatttacgaaaaggccgtgtcatcgtttccagacccggctctctacccactgggcagcagacaaatcctgacttgtaccgcatatggtatccctcaacctacaatcaagtggttctggcacccctgtaaccataatcattccgaagcaaggtgtgacttttgttccaataatgaagagtcctttatcctggatgctgacagcaacatgggaaacagaattgagagcatcactcagcgcatggcaataatagaaggaaagaataagatggctagcaccttggttgtggctgactctagaatttctggaatctacatttgcatagcttccaataaagttgggactgtgggaagaaacataagcttttatatcacagaattgtcaaactttgagtgccttcatccttgctctcaggaatagaantctacctcatcggatctcatgtgccaaatgggtttcatgttaacttggaaaaaatgccgacggaaggagaggacctgaaactgtcttgcacagttaacaagttcttatacagagacgttacttggattttactgcggacagttaataacagaacaatgcactacagtattagcaagcaaaaaatggccatcactaaggagcactccatcactcttaatcttaccatcatgaatgtttccctgcaagattcaggcacctatgcctgcagagccaggaatgtatacacaggggaagaaatcctccagaagaaagaaattacaatcagagatcaggaagcaccatacctcctgcgaaacctcagtgatcacacagtggccatcagcagttccaccactttagactgtcatgctaatggtgtccccgagcctcagatcacttggtttaaaaacaaccacaaaatacaacaagagcctggaattattttaggaccaggaagcagcacgctgtttattgaaagagtcacagaagaggatgaaggtgtctatcactgcaaagccaccaaccagaagggctctgtggaaagttcagcatacctcactgttcaaggaacctcggacaagtctaatctggagctgatcactctaacatgcacctgtgtggctgcgactctcttctggctcctattaaccctctttatccgaaaaatgaaaaggtcttcttctgaaataaagactgactacctatcaattataatggacccagatgaagttcctttggatgagcagtgtgagcggctcccttatgatgccagcaagtgggagtttgcccgggagagacttaaactgggcaaatcacttggaagaggggcttttggaaaagtggttcaagcatcagcatttggcattaagaaatcacctacgtgccggactgtggctgtgaaaatgctgaaagagggggccacggccagcgagtacaaagctctgatgactgagctaaaaatcttgacccacattggccaccatctgaacgtggttaacctgctgggagcctgcaccaagcaaggagggcctctgatggtgattgttgaatactgcaaatatggaaatctctccaactacctcaagagcaaacgtgacttattttttctcaacaaggatgcagcactacacatggagcctaagaaagaaaaaatggagccaggcctggaacaaggcaagaaaccaagactagatagcgtcaccagcagcgaaagctttgcgagctccggctttcaggaagataaaagtctgagtgatgttgaggaagaggaggattctgacggtttctacaaggagcccatcactatggaagatctgatttcttacagttttcaagtggccagaggcatggagttcctgtcttccagaaagtgcattcatcgggacctggcagcgagaaacattcttttatctgagaacaacgtggtgaagatttgtgattttggccttgcccgggatatttataagaaccccgattatgtgagaaaaggagatactcgacttcctctgaaatggatggctccngaatctatctttgacaaaatctacagcaccaagagcgacgtgtggtcttacggagtattgctgtgggaaatcttctccttaggtgggtctccatacccaggagtacaaatggatgaggacttttgcagtcgcctgagggaaggcatgaggatgagagctcctgagtactctactcctgaaatctatcagatcatgctggactgctggcacagagacccaaaagaaaggccaagatttgcagaacttgtggaaaaactaggtgatttgcttcaagcaaatgtacaacaggatggtaaagactacatcccaatcaatgccatactgacaggaaatagtgggtttacatactcaactcctgccttctctgaggacttcttcaaggaaagtatttcagctccgaagtttaattcaggaagctctgatgatgtcagatatgtaaatgctttcaagttcatgagcctggaaagaatcaaaacctttgaagaacttttaccgaatgccacctccatgtttgatgactaccagggcgacagcagcactctgttggcctctcccatgctgaagcgcttcacctggactgacagcaaacccaaggcctcgctcaagattgacttgagagtaaccagtaaaagtaaggagtcggggctgtctgatgtcagcaggcccagtttctgccattccagctgtgggcacgtcagcgaaggcaagcgcaggttcacctacgaccacgctgagctggaaaggaaaatcgcgtgctgctccccgcccccagactacaactcggtggtcctgtactccaccccacccatctagagtttgacacgaagccttatttctagaagcacatgtgtatttatacccccaggaaactagcttttgccagtattatgcatatataagtttacacctttatctttccatgggagccagctgctttttgtgatttttttaatagtgctttttttttttgactaacaagaatgtaactccagatagagaaatagtgacaagtgaagaacactactgctaaatcctcatgttactcagtgttagagaaatccttcctaaacccaatgacttccctgctccaacccccgccacctcagggcacgcaggaccagtttgattgaggagctgcactgatcacccaatgcatcacgtaccccactgggccagccctgcagcccaaaacccagggcaacaagcccgttagccccagggatcactggctggcctgagcaacatctcgggagtcctctagcaggcctaagacatgtgaggaggaaaaggaaaaaaagcaaaaagcaagggagaaaagagaaaccgggagaaggcatgagaaagaatttgagacgcaccatgtgggcacggagggggacggggctcagcaatgccatttcagtggcttcccagctctgacccttctacatttgagggcccagccaggagcagatggacagcgatgaggggacattttctggattctgggaggcaagaaaaggacaaatatcttttttggaactaaagcaaattttagaactttacctatggaagtggttctatgtccattctcattcgtggcatgttttgatttgtagcactgagggtggcactcaactctgagcccatacttttggctcctctagtaagatgcactgaaaacttagccagagttaggttgtctccaggccatgatggccttacactgaaaatgtcacattctattttgggtattaatatatagtccagacacttaactcaatttcttggtattattctgttttgcacagttagttgtgaaagaaagctgagaagaatgaaaatgcagtcctgaggagaggagttttctccatatcaaaacgagggctgatggaggaaaaaggtcaataaggtcaagggaaaaccccgtctctataccaaccaaaccaattcaccaacacagttgggacccaaaacacaggaagtcagtcacgtttccttttcatttaatggggattccactatctcacactaatctgaaaggatgtggaagagcattagctggcgcatattaagcactttaagctccttgagtaaaaaggtggtatgtaatttatgcaaggtatttctccagttgggactcaggatattagttaatgagccatcactagaagaaaagcccattttcaactgctttgaaacttgcctggggtctgagcatgatgggaatagggagacagggtaggaaagggcgcctactcttcagggtctaaagatcaagtgggccttggatcgctaagctggctctgtttgatgctatttatgcaagttagggtctatgtatttaggatgtctgcaccttctgcagccagtcagaagctggagaggcaacagtggattgctgcttcttggggagaagagtatgcttccttttatccatgtaatttaactgtagaacctgagctctaagtaaccgaagaatgtatgcctctgttcttatgtgccacatccttgtttaaaggctctctgtatgaagagatgggaccgtcatcagcacattccctagtgagcctactggctcctggcagcggcttttgtggaagactcactagccagaagagaggagtgggacagtcctctccaccaagatctaaatccaaacaaaagcaggctagagccagaagagaggacaaatctttgttcttcctcttctttacatacgcaaaccacctgtgacagctggcaattttataaatcaggtaactggaaggaggttaaacacagaaaaaagaagacctcagtcaattctctactttttttttttttttccaaatcagataatagcccagcaaatagtgataacaaataaaaccttagctattcatgtcttgatttcaataattaattcttaatcattaagagaccataataaatactccttttcaagagaaaagcaaaaccattagaattgttactcagctccttcaaactcaggtttgtagcatacatgagtccatccatcagtcaaagaatggttccatctggagtcttaatgtagaaagaaaaatggagacttgtaataatgagctagttacaaagtgcttgttcattaaaatagcactgaaaattgaaacatgaattaactgataatattccaatcatttgccatttatgacaaaaatggttggcactaacaaagaacgagcacttcctttcagagtttctgagataatgtacgtggaacagtctgggtggaatggggctgaaaccatgtgcaagtctgtgtcttgtcagtccaagaagtgacaccgagatgttaattttagggacccgtgccttgtttcctagcccacaagaatgcaaacatcaaacagatactcgctagcctcatttaaattgattaaaggaggagtgcatctttggccgacagtggtgtaactgtatgtgtgtgtgtgtgtgtgtgtgtgtgtgtgggtgtatgtgtgttttgtgcataactatttaaggaaactggaattttaaagttacttttatacaaaccaagaatatatgctacagatataagacagacatggtttggtcctatatttctagtcatgatgaatgtattttgtataccatcttcatataataaacttccaaaaacacaaaaaaaaaaac

SEQ ID NO: 343384 - DNA, 7112 bp, Homo sapiens
  misc_feature (3489)..(3489): n is a, c, g, or t
atcgaggtccgcgggaggctcggagcgcgccaggcggacactcctctcggctcctccccggcagcggcggcggctcggagcgggctccggggctcgggtgcagcggccagcgggcgcctggcggcgaggattacccggggaagtggttgtctcctggctggagccgcgagacgggcgctcagggcgcggggccggcggcggcgaacgagaggacggactctggcggccgggtcgttggccgcggggagcgcgggcaccgggcgagcaggccgcgtcgcgctcaccatggtcagctactgggacaccggggtcctgctgtgcgcgctgctcagctgtctgcttctcacaggatctagttcaggttcaaaattaaaagatcctgaactgagtttaaaaggcacccagcacatcatgcaagcaggccagacactgcatctccaatgcaggggggaagcagcccataaatggtctttgcctgaaatggtgagtaaggaaagcgaaaggctgagcataactaaatctgcctgtggaagaaatggcaaacaattctgcagtactttaaccttgaacacagctcaagcaaaccacactggcttctacagctgcaaatatctagctgtacctacttcaaagaagaaggaaacagaatctgcaatctatatatttattagtgatacaggtagacctttcgtagagatgtacagtgaaatccccgaaattatacacatgactgaaggaagggagctcgtcattccctgccgggttacgtcacctaacatcactgttactttaaaaaagtttccacttgacactttgatccctgatggaaaacgcataatctgggacagtagaaagggcttcatcatatcaaatgcaacgtacaaagaaatagggcttctgacctgtgaagcaacagtcaatgggcatttgtataagacaaactatctcacacatcgacaaaccaatacaatcatagatgtccaaataagcacaccacgcccagtcaaattacttagaggccatactcttgtcctcaattgtactgctaccactcccttgaacacgagagttcaaatgacctggagttaccctgatgaaaaaaataagagagcttccgtaaggcgacgaattgaccaaagcaattcccatgccaacatattctacagtgttcttactattgacaaaatgcagaacaaagacaaaggactttatacttgtcgtgtaaggagtggaccatcattcaaatctgttaacacctcagtgcatatatatgataaagcattcatcactgtgaaacatcgaaaacagcaggtgcttgaaaccgtagctggcaagcggtcttaccggctctctatgaaagtgaaggcatttccctcgccggaagttgtatggttaaaagatgggttacctgcgactgagaaatctgctcgctatttgactcgtggctactcgttaattatcaaggacgtaactgaagaggatgcagggaattatacaatcttgctgagcataaaacagtcaaatgtgtttaaaaacctcactgccactctaattgtcaatgtgaaaccccagatttacgaaaaggccgtgtcatcgtttccagacccggctctctacccactgggcagcagacaaatcctgacttgtaccgcatatggtatccctcaacctacaatcaagtggttctggcacccctgtaaccataatcattccgaagcaaggtgtgacttttgttccaataatgaagagtcctttatcctggatgctgacagcaacatgggaaacagaattgagagcatcactcagcgcatggcaataatagaaggaaagaataagatggctagcaccttggttgtggctgactctagaatttctggaatctacatttgcatagcttccaataaagttgggactgtgggaagaaacataagcttttatatcacagatgtgccaaatgggtttcatgttaacttggaaaaaatgccgacggaaggagaggacctgaaactgtcttgcacagttaacaagttcttatacagagacgttacttggattttactgcggacagttaataacagaacaatgcactacagtattagcaagcaaaaaatggccatcactaaggagcactccatcactcttaatcttaccatcatgaatgtttccctgcaagattcaggcacctatgcctgcagagccaggaatgtatacacaggggaagaaatcctccagaagaaagaaattacaatcagagatcaggaagcaccatacctcctgcgaaacctcagtgatcacacagtggccatcagcagttccaccactttagactgtcatgctaatggtgtccccgagcctcagatcacttggtttaaaaacaaccacaaaatacaacaagagcctggaattattttaggaccaggaagcagcacgctgtttattgaaagagtcacagaagaggatgaaggtgtctatcactgcaaagccaccaaccagaagggctctgtggaaagttcagcatacctcactgttcaaggaacctcggacaagtctaatctggagctgatcactctaacatgcacctgtgtggctgcgactctcttctggctcctattaaccctctttatccgaaaaatgaaaaggtcttcttctgaaataaagactgactacctatcaattataatggacccagatgaagttcctttggatgagcagtgtgagcggctcccttatgatgccagcaagtgggagtttgcccgggagagacttaaactgggcaaatcacttggaagaggggcttttggaaaagtggttcaagcatcagcatttggcattaagaaatcacctacgtgccggactgtggctgtgaaaatgctgaaagagggggccacggccagcgagtacaaagctctgatgactgagctaaaaatcttgacccacattggccaccatctgaacgtggttaacctgctgggagcctgcaccaagcaaggagggcctctgatggtgattgttgaatactgcaaatatggaaatctctccaactacctcaagagcaaacgtgacttattttttctcaacaaggatgcagcactacacatggagcctaagaaagaaaaaatggagccaggcctggaacaaggcaagaaaccaagactagatagcgtcaccagcagcgaaagctttgcgagctccggctttcaggaagataaaagtctgagtgatgttgaggaagaggaggattctgacggtttctacaaggagcccatcactatggaagatctgatttcttacagttttcaagtggccagaggcatggagttcctgtcttccagaaagtgcattcatcgggacctggcagcgagaaacattcttttatctgagaacaacgtggtgaagatttgtgattttggccttgcccgggatatttataagaaccccgattatgtgagaaaaggagatactcgacttcctctgaaatggatggctccngaatctatctttgacaaaatctacagcaccaagagcgacgtgtggtcttacggagtattgctgtgggaaatcttctccttaggtgggtctccatacccaggagtacaaatggatgaggacttttgcagtcgcctgagggaaggcatgaggatgagagctcctgagtactctactcctgaaatctatcagatcatgctggactgctggcacagagacccaaaagaaaggccaagatttgcagaacttgtggaaaaactaggtgatttgcttcaagcaaatgtacaacaggatggtaaagactacatcccaatcaatgccatactgacaggaaatagtgggtttacatactcaactcctgccttctctgaggactttcagctccgaagtttaattcaggaagctctgatgatgtcagatatgtaaatgctttcaagttcatgagcctggaaagaatcaaaacctttgaagaacttttaccgaatgccacctccatgtttgatgactaccagggcgacagcagcactctgttggcctctcccatgctgaagcgcttcacctggactgacagcaaacccaaggcctcgctcaagattgacttgagagtaaccagtaaaagtaaggagtcggggctgtctgatgtcagcaggcccagtttctgccattccagctgtgggcacgtcagcgaaggcaagcgcaggttcacctacgaccacgctgagctggaaaggaaaatcgcgtgctgctccccgcccccagactacaactcggtggtcctgtactccaccccacccatctagagtttgacacgaagccttatttctagaagcacatgtgtatttatacccccaggaaactagcttttgccagtattatgcatatataagtttacacctttatctttccatgggagccagctgctttttgtgatttttttaatagtgctttttttttttgactaacaagaatgtaactccagatagagaaatagtgacaagtgaagaacactactgctaaatcctcatgttactcagtgttagagaaatccttcctaaacccaatgacttccctgctccaacccccgccacctcagggcacgcaggaccagtttgattgaggagctgcactgatcacccaatgcatcacgtaccccactgggccagccctgcagcccaaaacccagggcaacaagcccgttagccccagggatcactggctggcctgagcaacatctcgggagtcctctagcaggcctaagacatgtgaggaggaaaaggaaaaaaagcaaaaagcaagggagaaaagagaaaccgggagaaggcatgagaaagaatttgagacgcaccatgtgggcacggagggggacggggctcagcaatgccatttcagtggcttcccagctctgacccttctacatttgagggcccagccaggagcagatggacagcgatgaggggacattttctggattctgggaggcaagaaaaggacaaatatcttttttggaactaaagcaaattttagaactttacctatggaagtggttctatgtccattctcattcgtggcatgttttgatttgtagcactgagggtggcactcaactctgagcccatacttttggctcctctagtaagatgcactgaaaacttagccagagttaggttgtctccaggccatgatggccttacactgaaaatgtcacattctattttgggtattaatatatagtccagacacttaactcaatttcttggtattattctgttttgcacagttagttgtgaaagaaagctgagaagaatgaaaatgcagtcctgaggagaggagttttctccatatcaaaacgagggctgatggaggaaaaaggtcaataaggtcaagggaaaaccccgtctctataccaaccaaaccaattcaccaacacagttgggacccaaaacacaggaagtcagtcacgtttccttttcatttaatggggattccactatctcacactaatctgaaaggatgtggaagagcattagctggcgcatattaagcactttaagctccttgagtaaaaaggtggtatgtaatttatgcaaggtatttctccagttgggactcaggatattagttaatgagccatcactagaagaaaagcccattttcaactgctttgaaacttgcctggggtctgagcatgatgggaatagggagacagggtaggaaagggcgcctactcttcagggtctaaagatcaagtgggccttggatcgctaagctggctctgtttgatgctatttatgcaagttagggtctatgtatttaggatgtctgcaccttctgcagccagtcagaagctggagaggcaacagtggattgctgcttcttggggagaagagtatgcttccttttatccatgtaatttaactgtagaacctgagctctaagtaaccgaagaatgtatgcctctgttcttatgtgccacatccttgtttaaaggctctctgtatgaagagatgggaccgtcatcagcacattccctagtgagcctactggctcctggcagcggcttttgtggaagactcactagccagaagagaggagtgggacagtcctctccaccaagatctaaatccaaacaaaagcaggctagagccagaagagaggacaaatctttgttcttcctcttctttacatacgcaaaccacctgtgacagctggcaattttataaatcaggtaactggaaggaggttaaacacagaaaaaagaagacctcagtcaattctctactttttttttttttttccaaatcagataatagcccagcaaatagtgataacaaataaaaccttagctattcatgtcttgatttcaataattaattcttaatcattaagagaccataataaatactccttttcaagagaaaagcaaaaccattagaattgttactcagctccttcaaactcaggtttgtagcatacatgagtccatccatcagtcaaagaatggttccatctggagtcttaatgtagaaagaaaaatggagacttgtaataatgagctagttacaaagtgcttgttcattaaaatagcactgaaaattgaaacatgaattaactgataatattccaatcatttgccatttatgacaaaaatggttggcactaacaaagaacgagcacttcctttcagagtttctgagataatgtacgtggaacagtctgggtggaatggggctgaaaccatgtgcaagtctgtgtcttgtcagtccaagaagtgacaccgagatgttaattttagggacccgtgccttgtttcctagcccacaagaatgcaaacatcaaacagatactcgctagcctcatttaaattgattaaaggaggagtgcatctttggccgacagtggtgtaactgtatgtgtgtgtgtgtgtgtgtgtgtgtgtgtgggtgtatgtgtgttttgtgcataactatttaaggaaactggaattttaaagttacttttatacaaaccaagaatatatgctacagatataagacagacatggtttggtcctatatttctagtcatgatgaatgtattttgtataccatcttcatataataaacttccaaaaacacaaaaaaaaaaac

SEQ ID NO: 343385 - DNA, 7143 bp, Homo sapiens
  misc_feature (1779)..(1779): n is a, c, g, or t
  misc_feature (3504)..(3504): n is a, c, g, or t
atcgaggtccgcgggaggctcggagcgcgccaggcggacactcctctcggctcctccccggcagcggcggcggctcggagcgggctccggggctcgggtgcagcggccagcgggcgcctggcggcgaggattacccggggaagtggttgtctcctggctggagccgcgagacgggcgctcagggcgcggggccggcggcggcgaacgagaggacggactctggcggccgggtcgttggccgcggggagcgcgggcaccgggcgagcaggccgcgtcgcgctcaccatggtcagctactgggacaccggggtcctgctgtgcgcgctgctcagctgtctgcttctcacaggatctagttcaggttcaaaattaaaagatcctgaactgagtttaaaaggcacccagcacatcatgcaagcaggccagacactgcatctccaatgcaggggggaagcagcccataaatggtctttgcctgaaatggtgagtaaggaaagcgaaaggctgagcataactaaatctgcctgtggaagaaatggcaaacaattctgcagtactttaaccttgaacacagctcaagcaaaccacactggcttctacagctgcaaatatctagctgtacctacttcaaagaagaaggaaacagaatctgcaatctatatatttattagtgatacaggtagacctttcgtagagatgtacagtgaaatccccgaaattatacacatgactgaaggaagggagctcgtcattccctgccgggttacgtcacctaacatcactgttactttaaaaaagtttccacttgacactttgatccctgatggaaaacgcataatctgggacagtagaaagggcttcatcatatcaaatgcaacgtacaaagaaatagggcttctgacctgtgaagcaacagtcaatgggcatttgtataagacaaactatctcacacatcgacaaaccaatacaatcatagatgtccaaataagcacaccacgcccagtcaaattacttagaggccatactcttgtcctcaattgtactgctaccactcccttgaacacgagagttcaaatgacctggagttaccctgatgaaaaaaataagagagcttccgtaaggcgacgaattgaccaaagcaattcccatgccaacatattctacagtgttcttactattgacaaaatgcagaacaaagacaaaggactttatacttgtcgtgtaaggagtggaccatcattcaaatctgttaacacctcagtgcatatatatgataaagcattcatcactgtgaaacatcgaaaacagcaggtgcttgaaaccgtagctggcaagcggtcttaccggctctctatgaaagtgaaggcatttccctcgccggaagttgtatggttaaaagatgggttacctgcgactgagaaatctgctcgctatttgactcgtggctactcgttaattatcaaggacgtaactgaagaggatgcagggaattatacaatcttgctgagcataaaacagtcaaatgtgtttaaaaacctcactgccactctaattgtcaatgacaaatcctgacttgtaccgcatatggtatccctcaacctacaatcaagtggttctggcacccctgtaaccataatcattccgaagcaaggtgtgacttttgttccaataatgaagagtcctttatcctggatgctgacagcaacatgggaaacagaattgagagcatcactcagcgcatggcaataatagaaggaaagaataagcttccaccagctnacagttctttcatgttgccacctacaagcttctcttccaactacttccatttccttccgtgactctaaacggatggctagcaccttggttgtggctgactctagaatttctggaatctacatttgcatagcttccaataaagttgggactgtgggaagaaacataagcttttatatcacagatgtgccaaatgggtttcatgttaacttggaaaaaatgccgacggaaggagaggacctgaaactgtcttgcacagttaacaagttcttatacagagacgttacttggattttactgcggacagttaataacagaacaatgcactacagtattagcaagcaaaaaatggccatcactaaggagcactccatcactcttaatcttaccatcatgaatgtttccctgcaagattcaggcacctatgcctgcagagccaggaatgtatacacaggggaagaaatcctccagaagaaagaaattacaatcagagatcaggaagcaccatacctcctgcgaaacctcagtgatcacacagtggccatcagcagttccaccactttagactgtcatgctaatggtgtccccgagcctcagatcacttggtttaaaaacaaccacaaaatacaacaagagcctggaattattttaggaccaggaagcagcacgctgtttattgaaagagtcacagaagaggatgaaggtgtctatcactgcaaagccaccaaccagaagggctctgtggaaagttcagcatacctcactgttcaaggaacctcggacaagtctaatctggagctgatcactctaacatgcacctgtgtggctgcgactctcttctggctcctattaaccctctttatccgaaaaatgaaaaggtcttcttctgaaataaagactgactacctatcaattataatggacccagatgaagttcctttggatgagcagtgtgagcggctcccttatgatgccagcaagtgggagtttgcccgggagagacttaaactgggcaaatcacttggaagaggggcttttggaaaagtggttcaagcatcagcatttggcattaagaaatcacctacgtgccggactgtggctgtgaaaatgctgaaagagggggccacggccagcgagtacaaagctctgatgactgagctaaaaatcttgacccacattggccaccatctgaacgtggttaacctgctgggagcctgcaccaagcaaggagggcctctgatggtgattgttgaatactgcaaatatggaaatctctccaactacctcaagagcaaacgtgacttattttttctcaacaaggatgcagcactacacatggagcctaagaaagaaaaaatggagccaggcctggaacaaggcaagaaaccaagactagatagcgtcaccagcagcgaaagctttgcgagctccggctttcaggaagataaaagtctgagtgatgttgaggaagaggaggattctgacggtttctacaaggagcccatcactatggaagatctgatttcttacagttttcaagtggccagaggcatggagttcctgtcttccagaaagtgcattcatcgggacctggcagcgagaaacattcttttatctgagaacaacgtggtgaagatttgtgattttggccttgcccgggatatttataagaaccccgattatgtgagaaaaggagatactcgacttcctctgaaatggatggctccngaatctatctttgacaaaatctacagcaccaagagcgacgtgtggtcttacggagtattgctgtgggaaatcttctccttaggtgggtctccatacccaggagtacaaatggatgaggacttttgcagtcgcctgagggaaggcatgaggatgagagctcctgagtactctactcctgaaatctatcagatcatgctggactgctggcacagagacccaaaagaaaggccaagatttgcagaacttgtggaaaaactaggtgatttgcttcaagcaaatgtacaacaggatggtaaagactacatcccaatcaatgccatactgacaggaaatagtgggtttacatactcaactcctgccttctctgaggacttcttcaaggaaagtatttcagctccgaagtttaattcaggaagctctgatgatgtcagatatgtaaatgctttcaagttcatgagcctggaaagaatcaaaacctttgaagaacttttaccgaatgccacctccatgtttgatgactaccagggcgacagcagcactctgttggcctctcccatgctgaagcgcttcacctggactgacagcaaacccaaggcctcgctcaagattgacttgagagtaaccagtaaaagtaaggagtcggggctgtctgatgtcagcaggcccagtttctgccattccagctgtgggcacgtcagcgaaggcaagcgcaggttcacctacgaccacgctgagctggaaaggaaaatcgcgtgctgctccccgcccccagactacaactcggtggtcctgtactccaccccacccatctagagtttgacacgaagccttatttctagaagcacatgtgtatttatacccccaggaaactagcttttgccagtattatgcatatataagtttacacctttatctttccatgggagccagctgctttttgtgatttttttaatagtgctttttttttttgactaacaagaatgtaactccagatagagaaatagtgacaagtgaagaacactactgctaaatcctcatgttactcagtgttagagaaatccttcctaaacccaatgacttccctgctccaacccccgccacctcagggcacgcaggaccagtttgattgaggagctgcactgatcacccaatgcatcacgtaccccactgggccagccctgcagcccaaaacccagggcaacaagcccgttagccccagggatcactggctggcctgagcaacatctcgggagtcctctagcaggcctaagacatgtgaggaggaaaaggaaaaaaagcaaaaagcaagggagaaaagagaaaccgggagaaggcatgagaaagaatttgagacgcaccatgtgggcacggagggggacggggctcagcaatgccatttcagtggcttcccagctctgacccttctacatttgagggcccagccaggagcagatggacagcgatgaggggacattttctggattctgggaggcaagaaaaggacaaatatcttttttggaactaaagcaaattttagaactttacctatggaagtggttctatgtccattctcattcgtggcatgttttgatttgtagcactgagggtggcactcaactctgagcccatacttttggctcctctagtaagatgcactgaaaacttagccagagttaggttgtctccaggccatgatggccttacactgaaaatgtcacattctattttgggtattaatatatagtccagacacttaactcaatttcttggtattattctgttttgcacagttagttgtgaaagaaagctgagaagaatgaaaatgcagtcctgaggagaggagttttctccatatcaaaacgagggctgatggaggaaaaaggtcaataaggtcaagggaaaaccccgtctctataccaaccaaaccaattcaccaacacagttgggacccaaaacacaggaagtcagtcacgtttccttttcatttaatggggattccactatctcacactaatctgaaaggatgtggaagagcattagctggcgcatattaagcactttaagctccttgagtaaaaaggtggtatgtaatttatgcaaggtatttctccagttgggactcaggatattagttaatgagccatcactagaagaaaagcccattttcaactgctttgaaacttgcctggggtctgagcatgatgggaatagggagacagggtaggaaagggcgcctactcttcagggtctaaagatcaagtgggccttggatcgctaagctggctctgtttgatgctatttatgcaagttagggtctatgtatttaggatgtctgcaccttctgcagccagtcagaagctggagaggcaacagtggattgctgcttcttggggagaagagtatgcttccttttatccatgtaatttaactgtagaacctgagctctaagtaaccgaagaatgtatgcctctgttcttatgtgccacatccttgtttaaaggctctctgtatgaagagatgggaccgtcatcagcacattccctagtgagcctactggctcctggcagcggcttttgtggaagactcactagccagaagagaggagtgggacagtcctctccaccaagatctaaatccaaacaaaagcaggctagagccagaagagaggacaaatctttgttcttcctcttctttacatacgcaaaccacctgtgacagctggcaattttataaatcaggtaactggaaggaggttaaacacagaaaaaagaagacctcagtcaattctctactttttttttttttttccaaatcagataatagcccagcaaatagtgataacaaataaaaccttagctattcatgtcttgatttcaataattaattcttaatcattaagagaccataataaatactccttttcaagagaaaagcaaaaccattagaattgttactcagctccttcaaactcaggtttgtagcatacatgagtccatccatcagtcaaagaatggttccatctggagtcttaatgtagaaagaaaaatggagacttgtaataatgagctagttacaaagtgcttgttcattaaaatagcactgaaaattgaaacatgaattaactgataatattccaatcatttgccatttatgacaaaaatggttggcactaacaaagaacgagcacttcctttcagagtttctgagataatgtacgtggaacagtctgggtggaatggggctgaaaccatgtgcaagtctgtgtcttgtcagtccaagaagtgacaccgagatgttaattttagggacccgtgccttgtttcctagcccacaagaatgcaaacatcaaacagatactcgctagcctcatttaaattgattaaaggaggagtgcatctttggccgacagtggtgtaactgtatgtgtgtgtgtgtgtgtgtgtgtgtgtgtgggtgtatgtgtgttttgtgcataactatttaaggaaactggaattttaaagttacttttatacaaaccaagaatatatgctacagatataagacagacatggtttggtcctatatttctagtcatgatgaatgtattttgtataccatcttcatataataaacttccaaaaacacaaaaaaaaaaac

SEQ ID NO: 343386 - DNA, 5423 bp, Homo sapiens
  misc_feature (3489)..(3489): n is a, c, g, or t
atcgaggtccgcgggaggctcggagcgcgccaggcggacactcctctcggctcctccccggcagcggcggcggctcggagcgggctccggggctcgggtgcagcggccagcgggcgcctggcggcgaggattacccggggaagtggttgtctcctggctggagccgcgagacgggcgctcagggcgcggggccggcggcggcgaacgagaggacggactctggcggccgggtcgttggccgcggggagcgcgggcaccgggcgagcaggccgcgtcgcgctcaccatggtcagctactgggacaccggggtcctgctgtgcgcgctgctcagctgtctgcttctcacaggatctagttcaggttcaaaattaaaagatcctgaactgagtttaaaaggcacccagcacatcatgcaagcaggccagacactgcatctccaatgcaggggggaagcagcccataaatggtctttgcctgaaatggtgagtaaggaaagcgaaaggctgagcataactaaatctgcctgtggaagaaatggcaaacaattctgcagtactttaaccttgaacacagctcaagcaaaccacactggcttctacagctgcaaatatctagctgtacctacttcaaagaagaaggaaacagaatctgcaatctatatatttattagtgatacaggtagacctttcgtagagatgtacagtgaaatccccgaaattatacacatgactgaaggaagggagctcgtcattccctgccgggttacgtcacctaacatcactgttactttaaaaaagtttccacttgacactttgatccctgatggaaaacgcataatctgggacagtagaaagggcttcatcatatcaaatgcaacgtacaaagaaatagggcttctgacctgtgaagcaacagtcaatgggcatttgtataagacaaactatctcacacatcgacaaaccaatacaatcatagatgtccaaataagcacaccacgcccagtcaaattacttagaggccatactcttgtcctcaattgtactgctaccactcccttgaacacgagagttcaaatgacctggagttaccctgatgaaaaaaataagagagcttccgtaaggcgacgaattgaccaaagcaattcccatgccaacatattctacagtgttcttactattgacaaaatgcagaacaaagacaaaggactttatacttgtcgtgtaaggagtggaccatcattcaaatctgttaacacctcagtgcatatatatgataaagcattcatcactgtgaaacatcgaaaacagcaggtgcttgaaaccgtagctggcaagcggtcttaccggctctctatgaaagtgaaggcatttccctcgccggaagttgtatggttaaaagatgggttacctgcgactgagaaatctgctcgctatttgactcgtggctactcgttaattatcaaggacgtaactgaagaggatgcagggaattatacaatcttgctgagcataaaacagtcaaatgtgtttaaaaacctcactgccactctaattgtcaatgtgaaaccccagatttacgaaaaggccgtgtcatcgtttccagacccggctctctacccactgggcagcagacaaatcctgacttgtaccgcatatggtatccctcaacctacaatcaagtggttctggcacccctgtaaccataatcattccgaagcaaggtgtgacttttgttccaataatgaagagtcctttatcctggatgctgacagcaacatgggaaacagaattgagagcatcactcagcgcatggcaataatagaaggaaagaataagatggctagcaccttggttgtggctgactctagaatttctggaatctacatttgcatagcttccaataaagttgggactgtgggaagaaacataagcttttatatcacagatgtgccaaatgggtttcatgttaacttggaaaaaatgccgacggaaggagaggacctgaaactgtcttgcacagttaacaagttcttatacagagacgttacttggattttactgcggacagttaataacagaacaatgcactacagtattagcaagcaaaaaatggccatcactaaggagcactccatcactcttaatcttaccatcatgaatgtttccctgcaagattcaggcacctatgcctgcagagccaggaatgtatacacaggggaagaaatcctccagaagaaagaaattacaatcagagatcaggaagcaccatacctcctgcgaaacctcagtgatcacacagtggccatcagcagttccaccactttagactgtcatgctaatggtgtccccgagcctcagatcacttggtttaaaaacaaccacaaaatacaacaagagcctggaattattttaggaccaggaagcagcacgctgtttattgaaagagtcacagaagaggatgaaggtgtctatcactgcaaagccaccaaccagaagggctctgtggaaagttcagcatacctcactgttcaaggaacctcggacaagtctaatctggagctgatcactctaacatgcacctgtgtggctgcgactctcttctggctcctattaaccctctttatccgaaaaatgaaaaggtcttcttctgaaataaagactgactacctatcaattataatggacccagatgaagttcctttggatgagcagtgtgagcggctcccttatgatgccagcaagtgggagtttgcccgggagagacttaaactgggcaaatcacttggaagaggggcttttggaaaagtggttcaagcatcagcatttggcattaagaaatcacctacgtgccggactgtggctgtgaaaatgctgaaagagggggccacggccagcgagtacaaagctctgatgactgagctaaaaatcttgacccacattggccaccatctgaacgtggttaacctgctgggagcctgcaccaagcaaggagggcctctgatggtgattgttgaatactgcaaatatggaaatctctccaactacctcaagagcaaacgtgacttattttttctcaacaaggatgcagcactacacatggagcctaagaaagaaaaaatggagccaggcctggaacaaggcaagaaaccaagactagatagcgtcaccagcagcgaaagctttgcgagctccggctttcaggaagataaaagtctgagtgatgttgaggaagaggaggattctgacggtttctacaaggagcccatcactatggaagatctgatttcttacagttttcaagtggccagaggcatggagttcctgtcttccagaaagtgcattcatcgggacctggcagcgagaaacattcttttatctgagaacaacgtggtgaagatttgtgattttggccttgcccgggatatttataagaaccccgattatgtgagaaaaggagatactcgacttcctctgaaatggatggctccngaatctatctttgacaaaatctacagcaccaagagcgacgtgtggtcttacggagtattgctgtgggaaatcttctccttaggtgggtctccatacccaggagtacaaatggatgaggacttttgcagtcgcctgagggaaggcatgaggatgagagctcctgagtactctactcctgaaatctatcagatcatgctggactgctggcacagagacccaaaagaaaggccaagatttgcagaacttgtggaaaaactaggtgatttgcttcaagcaaatgtacaacaggatggtaaagactacatcccaatcaatgccatactgacaggaaatagtgggtttacatactcaactcctgccttctctgaggacttcttcaaggaaagtatttcagctccgaagtttaattcaggaagctctgatgatgtcagatatgtaaatgctttcaagttcatgagcctggaaagaatcaaaacctttgaagaacttttaccgaatgccacctccatgtttgatgactaccagggcgacagcagcactctgttggcctctcccatgctgaagcgcttcacctggactgacagcaaacccaaggcctcgctcaagattgacttgagagtaaccagtaaaagtaaggagtcggggctgtctgatgtcagcaggcccagtttctgccattccagctgtgggcacgtcagcgaagttagttgtgaaagaaagctgagaagaatgaaaatgcagtcctgaggagaggagttttctccatatcaaaacgagggctgatggaggaaaaaggctctctgtatgaagagatgggaccgtcatcagcacattccctagtgagcctactggctcctggcagcggcttttgtggaagactcactagccagaagagaggagtgggacagtcctctccaccaagatctaaatccaaacaaaagcaggctagagccagaagagaggacaaatctttgttcttcctcttctttacatacgcaaaccacctgtgacagctggcaattttataaatcaggtaactggaaggaggttaaacacagaaaaaagaagacctcagtcaattctctactttttttttttttttccaaatcagataatagcccagcaaatagtgataacaaataaaaccttagctattcatgtcttgatttcaataattaattcttaatcattaagagaccataataaatactccttttcaagagaaaagcaaaaccattagaattgttactcagctccttcaaactcaggtttgtagcatacatgagtccatccatcagtcaaagaatggttccatctggagtcttaatgtagaaagaaaaatggagacttgtaataatgagctagttacaaagtgcttgttcattaaaatagcactgaaaattgaaacatgaattaactgataatattccaatcatttgccatttatgacaaaaatggttggcactaacaaagaacgagcacttcctttcagagtttctgagataatgtacgtggaacagtctgggtggaatggggctgaaaccatgtgcaagtctgtgtcttgtcagtccaagaagtgacaccgagatgttaattttagggacccgtgccttgtttcctagcccacaagaatgcaaacatcaaacagatactcgctagcctcatttaaattgattaaaggaggagtgcatctttggccgacagtggtgtaactgtatgtgtgtgtgtgtgtgtgtgtgtgtgtgtgggtgtatgtgtgttttgtgcataactatttaaggaaactggaattttaaagttacttttatacaaaccaagaatatatgctacagatataagacagacatggtttggtcctatatttctagtcatgatgaatgtattttgtataccatcttcatataataaacttccaaaaacacaaaaaaaaaaac

SEQ ID NO: 343387 - DNA, 2967 bp, Homo sapiens
atcgaggtccgcgggaggctcggagcgcgccaggcggacactcctctcggctcctccccggcagcggcggcggctcggagcgggctccggggctcgggtgcagcggccagcgggcgcctggcggcgaggattacccggggaagtggttgtctcctggctggagccgcgagacgggcgctcagggcgcggggccggcggcggcgaacgagaggacggactctggcggccgggtcgttggccgcggggagcgcgggcaccgggcgagcaggccgcgtcgcgctcaccatggtcagctactgggacaccggggtcctgctgtgcgcgctgctcagctgtctgcttctcacaggatctagttcaggttcaaaattaaaagatcctgaactgagtttaaaaggcacccagcacatcatgcaagcaggccagacactgcatctccaatgcaggggggaagcagcccataaatggtctttgcctgaaatggtgagtaaggaaagcgaaaggctgagcataactaaatctgcctgtggaagaaatggcaaacaattctgcagtactttaaccttgaacacagctcaagcaaaccacactggcttctacagctgcaaatatctagctgtacctacttcaaagaagaaggaaacagaatctgcaatctatatatttattagtgatacaggtagacctttcgtagagatgtacagtgaaatccccgaaattatacacatgactgaaggaagggagctcgtcattccctgccgggttacgtcacctaacatcactgttactttaaaaaagtttccacttgacactttgatccctgatggaaaacgcataatctgggacagtagaaagggcttcatcatatcaaatgcaacgtacaaagaaatagggcttctgacctgtgaagcaacagtcaatgggcatttgtataagacaaactatctcacacatcgacaaaccaatacaatcatagatgtccaaataagcacaccacgcccagtcaaattacttagaggccatactcttgtcctcaattgtactgctaccactcccttgaacacgagagttcaaatgacctggagttaccctgatgaaaaaaataagagagcttccgtaaggcgacgaattgaccaaagcaattcccatgccaacatattctacagtgttcttactattgacaaaatgcagaacaaagacaaaggactttatacttgtcgtgtaaggagtggaccatcattcaaatctgttaacacctcagtgcatatatatgataaagcattcatcactgtgaaacatcgaaaacagcaggtgcttgaaaccgtagctggcaagcggtcttaccggctctctatgaaagtgaaggcatttccctcgccggaagttgtatggttaaaagatgggttacctgcgactgagaaatctgctcgctatttgactcgtggctactcgttaattatcaaggacgtaactgaagaggatgcagggaattatacaatcttgctgagcataaaacagtcaaatgtgtttaaaaacctcactgccactctaattgtcaatgtgaaaccccagatttacgaaaaggccgtgtcatcgtttccagacccggctctctacccactgggcagcagacaaatcctgacttgtaccgcatatggtatccctcaacctacaatcaagtggttctggcacccctgtaaccataatcattccgaagcaaggtgtgacttttgttccaataatgaagagtcctttatcctggatgctgacagcaacatgggaaacagaattgagagcatcactcagcgcatggcaataatagaaggaaagaataagatggctagcaccttggttgtggctgactctagaatttctggaatctacatttgcatagcttccaataaagttgggactgtgggaagaaacataagcttttatatcacagatgtgccaaatgggtttcatgttaacttggaaaaaatgccgacggaaggagaggacctgaaactgtcttgcacagttaacaagttcttatacagagacgttacttggattttactgcggacagttaataacagaacaatgcactacagtattagcaagcaaaaaatggccatcactaaggagcactccatcactcttaatcttaccatcatgaatgtttccctgcaagattcaggcacctatgcctgcagagccaggaatgtatacacaggggaagaaatcctccagaagaaagaaattacaatcagagatcaggaagcaccatacctcctgcgaaacctcagtgatcacacagtggccatcagcagttccaccactttagactgtcatgctaatggtgtccccgagcctcagatcacttggtttaaaaacaaccacaaaatacaacaagagcctgaactgtatacatcaacgtcaccatcgtcatcgtcatcatcaccattgtcatcatcatcatcatcgtcatcatcatcatcatcatagctatcatcattatcatcatcatcatcatcatcatcatagctaccatttattgaaaactattatgtgtcaacttcaaagaacttatcctttagttggagagccaagacaatcataacaataacaaatggccgggcatggtgctcacgcctgtaatcccagcactttgggaggccaaggcaggtggatcatttgaggtcaggagttcaagaccagcctgaccaagatggtgaaatgctgtctctattaaaaatacaaaattagccgggcatggtggctcatgcctgtaatgccagctactcgggaggctgagacaggagaatcacttgaacccaggaggcagaggttgcagggagccgagatcgtgtactgcactccagcctgggcaacaagagcgaaactccgtctcaaaaaaacaaataaataaataaataaataaacagacaaaattcactttttattctattaaacttaacatacatg

SEQ ID NO: 343388 - DNA, 4233 bp, Homo sapiens
  misc_feature (3489)..(3489): n is a, c, g, or t
atcgaggtccgcgggaggctcggagcgcgccaggcggacactcctctcggctcctccccggcagcggcggcggctcggagcgggctccggggctcgggtgcagcggccagcgggcgcctggcggcgaggattacccggggaagtggttgtctcctggctggagccgcgagacgggcgctcagggcgcggggccggcggcggcgaacgagaggacggactctggcggccgggtcgttggccgcggggagcgcgggcaccgggcgagcaggccgcgtcgcgctcaccatggtcagctactgggacaccggggtcctgctgtgcgcgctgctcagctgtctgcttctcacaggatctagttcaggttcaaaattaaaagatcctgaactgagtttaaaaggcacccagcacatcatgcaagcaggccagacactgcatctccaatgcaggggggaagcagcccataaatggtctttgcctgaaatggtgagtaaggaaagcgaaaggctgagcataactaaatctgcctgtggaagaaatggcaaacaattctgcagtactttaaccttgaacacagctcaagcaaaccacactggcttctacagctgcaaatatctagctgtacctacttcaaagaagaaggaaacagaatctgcaatctatatatttattagtgatacaggtagacctttcgtagagatgtacagtgaaatccccgaaattatacacatgactgaaggaagggagctcgtcattccctgccgggttacgtcacctaacatcactgttactttaaaaaagtttccacttgacactttgatccctgatggaaaacgcataatctgggacagtagaaagggcttcatcatatcaaatgcaacgtacaaagaaatagggcttctgacctgtgaagcaacagtcaatgggcatttgtataagacaaactatctcacacatcgacaaaccaatacaatcatagatgtccaaataagcacaccacgcccagtcaaattacttagaggccatactcttgtcctcaattgtactgctaccactcccttgaacacgagagttcaaatgacctggagttaccctgatgaaaaaaataagagagcttccgtaaggcgacgaattgaccaaagcaattcccatgccaacatattctacagtgttcttactattgacaaaatgcagaacaaagacaaaggactttatacttgtcgtgtaaggagtggaccatcattcaaatctgttaacacctcagtgcatatatatgataaagcattcatcactgtgaaacatcgaaaacagcaggtgcttgaaaccgtagctggcaagcggtcttaccggctctctatgaaagtgaaggcatttccctcgccggaagttgtatggttaaaagatgggttacctgcgactgagaaatctgctcgctatttgactcgtggctactcgttaattatcaaggacgtaactgaagaggatgcagggaattatacaatcttgctgagcataaaacagtcaaatgtgtttaaaaacctcactgccactctaattgtcaatgtgaaaccccagatttacgaaaaggccgtgtcatcgtttccagacccggctctctacccactgggcagcagacaaatcctgacttgtaccgcatatggtatccctcaacctacaatcaagtggttctggcacccctgtaaccataatcattccgaagcaaggtgtgacttttgttccaataatgaagagtcctttatcctggatgctgacagcaacatgggaaacagaattgagagcatcactcagcgcatggcaataatagaaggaaagaataagatggctagcaccttggttgtggctgactctagaatttctggaatctacatttgcatagcttccaataaagttgggactgtgggaagaaacataagcttttatatcacagatgtgccaaatgggtttcatgttaacttggaaaaaatgccgacggaaggagaggacctgaaactgtcttgcacagttaacaagttcttatacagagacgttacttggattttactgcggacagttaataacagaacaatgcactacagtattagcaagcaaaaaatggccatcactaaggagcactccatcactcttaatcttaccatcatgaatgtttccctgcaagattcaggcacctatgcctgcagagccaggaatgtatacacaggggaagaaatcctccagaagaaagaaattacaatcagagatcaggaagcaccatacctcctgcgaaacctcagtgatcacacagtggccatcagcagttccaccactttagactgtcatgctaatggtgtccccgagcctcagatcacttggtttaaaaacaaccacaaaatacaacaagagcctggaattattttaggaccaggaagcagcacgctgtttattgaaagagtcacagaagaggatgaaggtgtctatcactgcaaagccaccaaccagaagggctctgtggaaagttcagcatacctcactgttcaaggaacctcggacaagtctaatctggagctgatcactctaacatgcacctgtgtggctgcgactctcttctggctcctattaaccctctttatccgaaaaatgaaaaggtcttcttctgaaataaagactgactacctatcaattataatggacccagatgaagttcctttggatgagcagtgtgagcggctcccttatgatgccagcaagtgggagtttgcccgggagagacttaaactgggcaaatcacttggaagaggggcttttggaaaagtggttcaagcatcagcatttggcattaagaaatcacctacgtgccggactgtggctgtgaaaatgctgaaagagggggccacggccagcgagtacaaagctctgatgactgagctaaaaatcttgacccacattggccaccatctgaacgtggttaacctgctgggagcctgcaccaagcaaggagggcctctgatggtgattgttgaatactgcaaatatggaaatctctccaactacctcaagagcaaacgtgacttattttttctcaacaaggatgcagcactacacatggagcctaagaaagaaaaaatggagccaggcctggaacaaggcaagaaaccaagactagatagcgtcaccagcagcgaaagctttgcgagctccggctttcaggaagataaaagtctgagtgatgttgaggaagaggaggattctgacggtttctacaaggagcccatcactatggaagatctgatttcttacagttttcaagtggccagaggcatggagttcctgtcttccagaaagtgcattcatcgggacctggcagcgagaaacattcttttatctgagaacaacgtggtgaagatttgtgattttggccttgcccgggatatttataagaaccccgattatgtgagaaaaggagatactcgacttcctctgaaatggatggctccngaatctatctttgacaaaatctacagcaccaagagcgacgtgtggtcttacggagtattgctgtgggaaatcttctccttaggtgggtctccatacccaggagtacaaatggatgaggacttttgcagtcgcctgagggaaggcatgaggatgagagctcctgagtactctactcctgaaatctatcagatcatgctggactgctggcacagagacccaaaagaaaggccaagatttgcagaacttgtggaaaaactaggtgatttgcttcaagcaaatgtacaacaggatggtaaagactacatcccaatcaatgccatactgacaggaaatagtgggtttacatactcaactcctgccttctctgaggactttcagctccgaagtttaattcaggaagctctgatgatgtcagatatgtaaatgctttcaagttcatgagcctggaaagaatcaaaacctttgaagaacttttaccgaatgccacctccatgtttgatgtaagtcgtgaagttaaggtacctagtgcaccccgatagaccccttcttcagatcccttccaaacaccaacgccagtaatgtagtagttcttggtcagtgagggtctggattcaggagtggctgaaatgacagtgtggggaggactgacaactagacctagctgtgcagaactaatttgaaagtagagttccatgcactcactccaggacccaagtccctgcgtggtaggaatttagaccctga

SEQ ID NO: 343389 - DNA, 3646 bp, Homo sapiens
tcgattatgccattaaataatatttagccgtgtagccatgccaggtcactttgccacctcacatccttttcagagcacctgataaagtcataccacttccctgcacatcatttctctcctgtgccattgggcactcagacgagatgatgcctccagtctctcctacgtctggcattctctgatttcacaacggaccagagtaggtccctctgggagtttcctcaaccctacagaatgtgaattgacaaccacgggaggcagtggcaatgctgtcaggattcccaggggtcacggcggggagatcggggcctcaggagttaggtgattcctgttggtgtgttggttcatcttagctgggatatggtgcctgtggtctcctgactcattagagctggatgccttttcctgtcttgataattctttctgtttcttcattagatatgtaaatgctttcaagttcatgagcctggaaagaatcaaaacctttgaagaacttttaccgaatgccacctccatgtttgatgactaccagggcgacagcagcactctgttggcctctcccatgctgaagcgcttcacctggactgacagcaaacccaaggcctcgctcaagattgacttgagagtaaccagtaaaagtaaggagtcggggctgtctgatgtcagcaggcccagtttctgccattccagctgtgggcacgtcagcgaaggcaagcgcaggttcacctacgaccacgctgagctggaaaggaaaatcgcgtgctgctccccgcccccagactacaactcggtggtcctgtactccaccccacccatctagagtttgacacgaagccttatttctagaagcacatgtgtatttatacccccaggaaactagcttttgccagtattatgcatatataagtttacacctttatctttccatgggagccagctgctttttgtgatttttttaatagtgctttttttttttgactaacaagaatgtaactccagatagagaaatagtgacaagtgaagaacactactgctaaatcctcatgttactcagtgttagagaaatccttcctaaacccaatgacttccctgctccaacccccgccacctcagggcacgcaggaccagtttgattgaggagctgcactgatcacccaatgcatcacgtaccccactgggccagccctgcagcccaaaacccagggcaacaagcccgttagccccagggatcactggctggcctgagcaacatctcgggagtcctctagcaggcctaagacatgtgaggaggaaaaggaaaaaaagcaaaaagcaagggagaaaagagaaaccgggagaaggcatgagaaagaatttgagacgcaccatgtgggcacggagggggacggggctcagcaatgccatttcagtggcttcccagctctgacccttctacatttgagggcccagccaggagcagatggacagcgatgaggggacattttctggattctgggaggcaagaaaaggacaaatatcttttttggaactaaagcaaattttagaactttacctatggaagtggttctatgtccattctcattcgtggcatgttttgatttgtagcactgagggtggcactcaactctgagcccatacttttggctcctctagtaagatgcactgaaaacttagccagagttaggttgtctccaggccatgatggccttacactgaaaatgtcacattctattttgggtattaatatatagtccagacacttaactcaatttcttggtattattctgttttgcacagttagttgtgaaagaaagctgagaagaatgaaaatgcagtcctgaggagaggagttttctccatatcaaaacgagggctgatggaggaaaaaggtcaataaggtcaagggaaaaccccgtctctataccaaccaaaccaattcaccaacacagttgggacccaaaacacaggaagtcagtcacgtttccttttcatttaatggggattccactatctcacactaatctgaaaggatgtggaagagcattagctggcgcatattaagcactttaagctccttgagtaaaaaggtggtatgtaatttatgcaaggtatttctccagttgggactcaggatattagttaatgagccatcactagaagaaaagcccattttcaactgctttgaaacttgcctggggtctgagcatgatgggaatagggagacagggtaggaaagggcgcctactcttcagggtctaaagatcaagtgggccttggatcgctaagctggctctgtttgatgctatttatgcaagttagggtctatgtatttaggatgtctgcaccttctgcagccagtcagaagctggagaggcaacagtggattgctgcttcttggggagaagagtatgcttccttttatccatgtaatttaactgtagaacctgagctctaagtaaccgaagaatgtatgcctctgttcttatgtgccacatccttgtttaaaggctctctgtatgaagagatgggaccgtcatcagcacattccctagtgagcctactggctcctggcagcggcttttgtggaagactcactagccagaagagaggagtgggacagtcctctccaccaagatctaaatccaaacaaaagcaggctagagccagaagagaggacaaatctttgttcttcctcttctttacatacgcaaaccacctgtgacagctggcaattttataaatcaggtaactggaaggaggttaaacacagaaaaaagaagacctcagtcaattctctactttttttttttttttccaaatcagataatagcccagcaaatagtgataacaaataaaaccttagctattcatgtcttgatttcaataattaattcttaatcattaagagaccataataaatactccttttcaagagaaaagcaaaaccattagaattgttactcagctccttcaaactcaggtttgtagcatacatgagtccatccatcagtcaaagaatggttccatctggagtcttaatgtagaaagaaaaatggagacttgtaataatgagctagttacaaagtgcttgttcattaaaatagcactgaaaattgaaacatgaattaactgataatattccaatcatttgccatttatgacaaaaatggttggcactaacaaagaacgagcacttcctttcagagtttctgagataatgtacgtggaacagtctgggtggaatggggctgaaaccatgtgcaagtctgtgtcttgtcagtccaagaagtgacaccgagatgttaattttagggacccgtgccttgtttcctagcccacaagaatgcaaacatcaaacagatactcgctagcctcatttaaattgattaaaggaggagtgcatctttggccgacagtggtgtaactgtatgtgtgtgtgtgtgtgtgtgtgtgtgtgtgggtgtatgtgtgttttgtgcataactatttaaggaaactggaattttaaagttacttttatacaaaccaagaatatatgctacagatataagacagacatggtttggtcctatatttctagtcatgatgaatgtattttgtataccatcttcatataataaacttccaaaaacacaaaaaaaaaaac

SEQ ID NO: 343390 - DNA, 2564 bp, Homo sapiens
atcgaggtccgcgggaggctcggagcgcgccaggcggacactcctctcggctcctccccggcagcggcggcggctcggagcgggctccggggctcgggtgcagcggccagcgggcgcctggcggcgaggattacccggggaagtggttgtctcctggctggagccgcgagacgggcgctcagggcgcggggccggcggcggcgaacgagaggacggactctggcggccgggtcgttggccgcggggagcgcgggcaccgggcgagcaggccgcgtcgcgctcaccatggtcagctactgggacaccggggtcctgctgtgcgcgctgctcagctgtctgcttctcacaggatctagttcaggttcaaaattaaaagatcctgaactgagtttaaaaggcacccagcacatcatgcaagcaggccagacactgcatctccaatgcaggggggaagcagcccataaatggtctttgcctgaaatggtgagtaaggaaagcgaaaggctgagcataactaaatctgcctgtggaagaaatggcaaacaattctgcagtactttaaccttgaacacagctcaagcaaaccacactggcttctacagctgcaaatatctagctgtacctacttcaaagaagaaggaaacagaatctgcaatctatatatttattagtgatacaggtagacctttcgtagagatgtacagtgaaatccccgaaattatacacatgactgaaggaagggagctcgtcattccctgccgggttacgtcacctaacatcactgttactttaaaaaagtttccacttgacactttgatccctgatggaaaacgcataatctgggacagtagaaagggcttcatcatatcaaatgcaacgtacaaagaaatagggcttctgacctgtgaagcaacagtcaatgggcatttgtataagacaaactatctcacacatcgacaaaccaatacaatcatagatgtccaaataagcacaccacgcccagtcaaattacttagaggccatactcttgtcctcaattgtactgctaccactcccttgaacacgagagttcaaatgacctggagttaccctgatgaaaaaaataagagagcttccgtaaggcgacgaattgaccaaagcaattcccatgccaacatattctacagtgttcttactattgacaaaatgcagaacaaagacaaaggactttatacttgtcgtgtaaggagtggaccatcattcaaatctgttaacacctcagtgcatatatatgataaagcattcatcactgtgaaacatcgaaaacagcaggtgcttgaaaccgtagctggcaagcggtcttaccggctctctatgaaagtgaaggcatttccctcgccggaagttgtatggttaaaagatgggttacctgcgactgagaaatctgctcgctatttgactcgtggctactcgttaattatcaaggacgtaactgaagaggatgcagggaattatacaatcttgctgagcataaaacagtcaaatgtgtttaaaaacctcactgccactctaattgtcaatgtgaaaccccagatttacgaaaaggccgtgtcatcgtttccagacccggctctctacccactgggcagcagacaaatcctgacttgtaccgcatatggtatccctcaacctacaatcaagtggttctggcacccctgtaaccataatcattccgaagcaaggtgtgacttttgttccaataatgaagagtcctttatcctggatgctgacagcaacatgggaaacagaattgagagcatcactcagcgcatggcaataatagaaggaaagaataagatggctagcaccttggttgtggctgactctagaatttctggaatctacatttgcatagcttccaataaagttgggactgtgggaagaaacataagcttttatatcacagatgtgccaaatgggtttcatgttaacttggaaaaaatgccgacggaaggagaggacctgaaactgtcttgcacagttaacaagttcttatacagagacgttacttggattttactgcggacagttaataacagaacaatgcactacagtattagcaagcaaaaaatggccatcactaaggagcactccatcactcttaatcttaccatcatgaatgtttccctgcaagattcaggcacctatgcctgcagagccaggaatgtatacacaggggaagaaatcctccagaagaaagaaattacaatcagagatcaggaagcaccatacctcctgcgaaacctcagtgatcacacagtggccatcagcagttccaccactttagactgtcatgctaatggtgtccccgagcctcagatcacttggtttaaaaacaaccacaaaatacaacaagagcctgaccaggcttcagtgcctgaccaggcttcagtgcctgaccaggcttcagtgcctgaccaggcttcagtgcctgaccaggcttcagtgcctgaccaggcttcagtgcctgaccaggcttcagtgcgaccaggcttcagtgcctgaccaggcttcagtgcctgacc

SEQ ID NO: 343391 - DNA, 1921 bp, Homo sapiens
atcgaggtccgcgggaggctcggagcgcgccaggcggacactcctctcggctcctccccggcagcggcggcggctcggagcgggctccggggctcgggtgcagcggccagcgggcgcctggcggcgaggattacccggggaagtggttgtctcctggctggagccgcgagacgggcgctcagggcgcggggccggcggcggcgaacgagaggacggactctggcggccgggtcgttggccgcggggagcgcgggcaccgggcgagcaggccgcgtcgcgctcaccatggtcagctactgggacaccggggtcctgctgtgcgcgctgctcagctgtctgcttctcacaggatctagttcaggttcaaaattaaaagatcctgaactgagtttaaaaggcacccagcacatcatgcaagcaggccagacactgcatctccaatgcaggggggaagcagcccataaatggtctttgcctgaaatggtgagtaaggaaagcgaaaggctgagcataactaaatctgcctgtggaagaaatggcaaacaattctgcagtactttaaccttgaacacagctcaagcaaaccacactggcttctacagctgcaaatatctagctgtacctacttcaaagaagaaggaaacagaatctgcaatctatatatttattagtgatacaggtagacctttcgtagagatgtacagtgaaatccccgaaattatacacatgactgaaggaagggagctcgtcattccctgccgggttacgtcacctaacatcactgttactttaaaaaagtttccacttgacactttgatccctgatggaaaacgcataatctgggacagtagaaagggcttcatcatatcaaatgcaacgtacaaagaaatagggcttctgacctgtgaagcaacagtcaatgggcatttgtataagacaaactatctcacacatcgacaaaccaatacaatcatagatgtccaaataagcacaccacgcccagtcaaattacttagaggccatactcttgtcctcaattgtactgctaccactcccttgaacacgagagttcaaatgacctggagttaccctgatgaaaaaaataagagagcttccgtaaggcgacgaattgaccaaagcaattcccatgccaacatattctacagtgttcttactattgacaaaatgcagaacaaagacaaaggactttatacttgtcgtgtaaggagtggaccatcattcaaatctgttaacacctcagtgcatatatatgataaagcattcatcactgtgaaacatcgaaaacagcaggtgcttgaaaccgtagctggcaagcggtcttaccggctctctatgaaagtgaaggcatttccctcgccggaagttgtatggttaaaagatgggttacctgcgactgagaaatctgctcgctatttgactcgtggctactcgttaattatcaaggacgtaactgaagaggatgcagggaattatacaatcttgctgagcataaaacagtcaaatgtgtttaaaaacctcactgccactctaattgtcaatgtgaaaccccagatttacgaaaaggccgtgtcatcgtttccagacccggctctctacccactgggcagcagacaaatcctgacttgtaccgcatatggtatccctcaacctacaatcaagtggttctggcacccctgtaaccataatcattccgaagcaaggtgtgacttttgttccaataatgaagagtcctttatcctggatgctgacagcaacatgggaaacagaattgagagcatcactcagcgcatggcaataatagaaggaaagaataagttatagaatcagcggcctatcaccagtgttgcaggctgactgtagaacttttaggaattcaccataccatagacgtgtcctagta

SEQ ID NO: 343392 - DNA, 1462 bp, Homo sapiens
atcacaatgggagaagctaaccagtatagcctggcaaacaagaggactaccagggcgacagcagcactctgttggcctctcccatgctgaagcgcttcacctggactgacagcaaacccaaggcctcgctcaagattgacttgagagtaaccagtaaaagtaaggagtcggggctgtctgatgtcagcaggcccagtttctgccattccagctgtgggcacgtcagcgaagttagttgtgaaagaaagctgagaagaatgaaaatgcagtcctgaggagaggagttttctccatatcaaaacgagggctgatggaggaaaaaggctctctgtatgaagagatgggaccgtcatcagcacattccctagtgagcctactggctcctggcagcggcttttgtggaagactcactagccagaagagaggagtgggacagtcctctccaccaagatctaaatccaaacaaaagcaggctagagccagaagagaggacaaatctttgttcttcctcttctttacatacgcaaaccacctgtgacagctggcaattttataaatcaggtaactggaaggaggttaaacacagaaaaaagaagacctcagtcaattctctactttttttttttttttccaaatcagataatagcccagcaaatagtgataacaaataaaaccttagctattcatgtcttgatttcaataattaattcttaatcattaagagaccataataaatactccttttcaagagaaaagcaaaaccattagaattgttactcagctccttcaaactcaggtttgtagcatacatgagtccatccatcagtcaaagaatggttccatctggagtcttaatgtagaaagaaaaatggagacttgtaataatgagctagttacaaagtgcttgttcattaaaatagcactgaaaattgaaacatgaattaactgataatattccaatcatttgccatttatgacaaaaatggttggcactaacaaagaacgagcacttcctttcagagtttctgagataatgtacgtggaacagtctgggtggaatggggctgaaaccatgtgcaagtctgtgtcttgtcagtccaagaagtgacaccgagatgttaattttagggacccgtgccttgtttcctagcccacaagaatgcaaacatcaaacagatactcgctagcctcatttaaattgattaaaggaggagtgcatctttggccgacagtggtgtaactgtatgtgtgtgtgtgtgtgtgtgtgtgtgtgtgggtgtatgtgtgttttgtgcataactatttaaggaaactggaattttaaagttacttttatacaaaccaagaatatatgctacagatataagacagacatggtttggtcctatatttctagtcatgatgaatgtattttgtataccatcttcatataataaacttccaaaaacacaaaaaaaaaaac

SEQ ID NO: 343393 - DNA, 420 bp, Homo sapiens
ggagacccgtctcttcaaaaaaaacaaaagctcactaacccaaaggatgagtctctaatgatgggacttctttagttacttgtggggagaaggcaaggacccttcagacgacaccccttcctctgaccacacaggcagaagtagccataggaatagcctgtgagcaccaggtgccccgcaccatgtgaccacccaaccaagcgggtgtccttagcaaggatttgctgagcttctctgtgtgttgtacggtatgttgagatctgttgtaatccctgggaatttattactaaaacgtagctttaaagggaggaaagaaacactgaattgtcccctcttggtcttttgtacccttaagccataacaggccctgtgttttccacattgtctcccgcaggtgggtctccatacccaggagtacaa

SEQ ID NO: 343394 - DNA, 363 bp, Homo sapiens
ctgatggtgattgttgaatactgcaaatatggaaatctctccaactacctcaagagcaaacgtgacttattttttctcaacaaggtaaggatttcaaaagttggaggtttttaaagatagcaatgagttttcatttagtctgtaacaacataaagcaagagaaacctgtattgtgttgttaatgattaaacttaaaactcaatctctgcttcttctccttttttcatgttttttcccctgataatctgttacactctagtgtggatagcacagagaatcatttgatccctgtgtgcgtatgcagccataattggagagtaaatctactagccacttatctaaatatctaacaataactttctc

SEQ ID NO: 343395 - DNA, 555 bp, Homo sapiens
atgccaacatattctacagtgttcttactattgacaaaatgcagaacaaagacaaaggactttatacttgtcgtgtaaggagtggaccatcattcaaatctgttaacacctcagtgcatatatatggtaagcatagttcagcgttgccaactcatgctatgctttctaatcattgtagatgtctgtgttctctaaataagtcagttttctgttggccaagagttacattatcatgaatgaatacagcttggccatggttccctcctccccctgtcaaaaagcaaaccacattaagtactctttacatttaatacttttgaattgaacagagagtcctttctttagatgcttattatggctaataattcggttagaacctaatatatttatgaaattcttagtgttctgtataaacaaaacagaaaaagatgatgagttttatctttattatctaagaaaaatttctcaggtactaccatgaattagagaaataaaaatatggtatgctaaatcatttagaattaatgctattttattcctgcttttactctcaag

SEQ ID NO: 343396 - DNA, 445 bp, Homo sapiens
tttttccgtgtttgaatgttacttccactaaaaactaaaatctagatactaaattttctaatttatgcatttttatttaatattaacatttacaacgaaaaggatgtatggtgacacactagtgtggggcttttttcaagtatcagccaaatatatttgctatttttaagttttgaggatgaatataggaaaaaatctaaggaaaagaagatcacacataaaatttgtgactttgttatctgaggacttacaccaagttttcatttcacctgtccccattgactgaaccatgctgtaaagccacattgtgacaacttttttttttaataggtgtgacttttgttccaataatgaagagtcctttatcctggatgctgacagcaacatgggaaacagaattgagagcatcactcagcgcatggcaataatagaaggaaagaataag

SEQ ID NO: 343397 - DNA, 794 bp, Homo sapiens
cttgagagtttttactaagttattgcatatttgaatattataactagttatatattttaatataatttcattgaacctatatgaatccattaccattctacataaataggcttttggatgttatttaggtcatttggtataaaaggatatataatatttatgagcaagggtagagctagaaaaaatttgtgaattaagagaaatttgtattagtgtatcttttgcttataaattaaagatacaagtaaattaaagatgtaaataaattaaaaatgaaaaactcaccttcatggaaagataacttaaaaaaaggtaagaagacaatttacaaataatacattttaaaaatttgtttttcaggatctagttcaggttcaaaattaaaagatcctgaactgagtttaaaaggcacccagcacatcatgcaagcaggccagacactgcatctccaatgcaggtaagtggctgtgttggtttgggaataatctagttgccatgcctaaggcaaaatcattccctggcagagtaaaaaggtagggacctcagtgatctcctgtgatctgcaaagtgcaaaccataggcatccagcttcccatgaaaggggattcatggggaagggagagcattactcactcagggaaatgggggaagggatgcccaaatagttctgcatctttattctgagtattgttctacagcttttctgaatgtgttgctttcccgtaaagaggaagatgactacacttaagagaggacctccgcttcctaataaaatgaatgctgaggaactggtg

SEQ ID NO: 343398 - DNA, 3800 bp, Homo sapiens
atcgaggtccgcgggaggctcggagcgcgccaggcggacactcctctcggctcctccccggcagcggcggcggctcggagcgggctccggggctcgggtgcagcggccagcgggcgcctggcggcgaggattacccggggaagtggttgtctcctggctggagccgcgagacgggcgctcagggcgcggggccggcggcggcgaacgagaggacggactctggcggccgggtcgttggccgcggggagcgcgggcaccgggcgagcaggccgcgtcgcgctcaccatggtcagctactgggacaccggggtcctgctgtgcgcgctgctcagctgtctgcttctcacaggatctagttcaggttcaaaattaaaagatcctgaactgagtttaaaaggcacccagcacatcatgcaagcaggccagacactgcatctccaatgcaggggggaagcagcccataaatggtctttgcctgaaatggtgagtaaggaaagcgaaaggctgagcataactaaatctgcctgtggaagaaatggcaaacaattctgcagtactttaaccttgaacacagctcaagcaaaccacactggcttctacagctgcaaatatctagctgtacctacttcaaagaagaaggaaacagaatctgcaatctatatatttattagtgatacaggtagacctttcgtagagatgtacagtgaaatccccgaaattatacacatgactgaaggaagggagctcgtcattccctgccgggttacgtcacctaacatcactgttactttaaaaaagtttccacttgacactttgatccctgatggaaaacgcataatctgggacagtagaaagggcttcatcatatcaaatgcaacgtacaaagaaatagggcttctgacctgtgaagcaacagtcaatgggcatttgtataagacaaactatctcacacatcgacaaaccaatacaatcatagatgtccaaataagcacaccacgcccagtcaaattacttagaggccatactcttgtcctcaattgtactgctaccactcccttgaacacgagagttcaaatgacctggagttaccctgatgaaaaaaataagagagcttccgtaaggcgacgaattgaccaaagcaattcccatgccaacatattctacagtgttcttactattgacaaaatgcagaacaaagacaaaggactttatacttgtcgtgtaaggagtggaccatcattcaaatctgttaacacctcagtgcatatatatgataaagcattcatcactgtgaaacatcgaaaacagcaggtgcttgaaaccgtagctggcaagcggtcttaccggctctctatgaaagtgaaggcatttccctcgccggaagttgtatggttaaaagatgggttacctgcgactgagaaatctgctcgctatttgactcgtggctactcgttaattatcaaggacgtaactgaagaggatgcagggaattatacaatcttgctgagcataaaacagtcaaatgtgtttaaaaacctcactgccactctaattgtcaatgtgaaaccccagatttacgaaaaggccgtgtcatcgtttccagacccggctctctacccactgggcagcagacaaatcctgacttgtaccgcatatggtatccctcaacctacaatcaagtggttctggcacccctgtaaccataatcattccgaagcaaggtgtgacttttgttccaataatgaagagtcctttatcctggatgctgacagcaacatgggaaacagaattgagagcatcactcagcgcatggcaataatagaaggaaagaataagatggctagcaccttggttgtggctgactctagaatttctggaatctacatttgcatagcttccaataaagttgggactgtgggaagaaacataagcttttatatcacagatgtgccaaatgggtttcatgttaacttggaaaaaatgccgacggaaggagaggacctgaaactgtcttgcacagttaacaagttcttatacagagacgttacttggattttactgcggacagttaataacagaacaatgcactacagtattagcaagcaaaaaatggccatcactaaggagcactccatcactcttaatcttaccatcatgaatgtttccctgcaagattcaggcacctatgcctgcagagccaggaatgtatacacaggggaagaaatcctccagaagaaagaaattacaatcagaggtgagcactgcaacaaaaaggctgttttctctcggatctccaaatttaaaagcacaaggaatgattgtaccacacaaagtaatgtaaaacattaaaggactcattaaaaagtaacagttgtctcatatcatcttgatttattgtcactgttgctaactttcaggctcggaggagatgctcctcccaaaatgagttcggagatgatagcagtaataatgagacccccgggccccagctctgggccccccattcaggccgagggggctgctccggggggccgacttggtgcacgtttggatttggaggatccctgcactgccttctctgtgtttgttgctcttgctgttttctcctgcctgataaacaacaacttgggatgatcctttccttccattttgatgccaacctctttttatttttaagtgttgaagctgcacaaactgaataatttaaacaaatgctggtttctgccaaagatggacacgaataagttaattttccagctcagaatgagtacagttgaatttgagactctgtcggacttctgcctggttttatttgggactatttcatctgctcttgatttgtaaatagcacctggatagcaagttataatgcttatttatttgaaaatgctttttttttttttacgttaagcacatttatcttgaactggagcttctaaaatgggccccaggggtgcaagatgttggtgtaattcagagatagtaaaggtttatcgcagtgtgaattataagagtccatccaaatcaacgtcccctccctcctctcatgcgatccaggtaattatgcagttagtgccacagtagactagcctagcaaagggtttgctccttgctgtctctgactgcaccacacagctattgatggcagctgaaagaaagtggatcatgccttaattttaaatattcctgtcctctggttattattttaaggaacttcatcatgttaaaatgacagcattcaaaggtgtaccacaatcaatttatcaaggaaataaaggctattgtaaccagagatttaatgcattcttctaaatgtaaatttaaaatttgccctttaaaaaagtccactttccccatatggcaaatgttaataggatttttatgggggattaaggaagcgggcaaaactacagaaggcaggatttcaaaggtaatttaaaaaatacacacccgtttaaatcaagagaagttgtaatctcttgttttaagcttgcgtttgagggaaaatgactttttcaccaatttagtatgcattgttctgttgtttttatttatgattgatcattatatgtgacttgcataaactatttaaaaaaaaaaactattaatgacccaaaatagccatggctgagaaacacagtggctgggcagttcaataggaggtgacaatatgacaacttctcaagcttgggaactcaccagactgtttcctcctttaggtaacagattctgtcccacggctaaacttgtctttcacgtgggaattgcttttgtcaaacgtgaaagagtaaacaatagca

SEQ ID NO: 343399 - DNA, 7128 bp, Homo sapiens
  misc_feature (3489)..(3489): n is a, c, g, or t
atcgaggtccgcgggaggctcggagcgcgccaggcggacactcctctcggctcctccccggcagcggcggcggctcggagcgggctccggggctcgggtgcagcggccagcgggcgcctggcggcgaggattacccggggaagtggttgtctcctggctggagccgcgagacgggcgctcagggcgcggggccggcggcggcgaacgagaggacggactctggcggccgggtcgttggccgcggggagcgcgggcaccgggcgagcaggccgcgtcgcgctcaccatggtcagctactgggacaccggggtcctgctgtgcgcgctgctcagctgtctgcttctcacaggatctagttcaggttcaaaattaaaagatcctgaactgagtttaaaaggcacccagcacatcatgcaagcaggccagacactgcatctccaatgcaggggggaagcagcccataaatggtctttgcctgaaatggtgagtaaggaaagcgaaaggctgagcataactaaatctgcctgtggaagaaatggcaaacaattctgcagtactttaaccttgaacacagctcaagcaaaccacactggcttctacagctgcaaatatctagctgtacctacttcaaagaagaaggaaacagaatctgcaatctatatatttattagtgatacaggtagacctttcgtagagatgtacagtgaaatccccgaaattatacacatgactgaaggaagggagctcgtcattccctgccgggttacgtcacctaacatcactgttactttaaaaaagtttccacttgacactttgatccctgatggaaaacgcataatctgggacagtagaaagggcttcatcatatcaaatgcaacgtacaaagaaatagggcttctgacctgtgaagcaacagtcaatgggcatttgtataagacaaactatctcacacatcgacaaaccaatacaatcatagatgtccaaataagcacaccacgcccagtcaaattacttagaggccatactcttgtcctcaattgtactgctaccactcccttgaacacgagagttcaaatgacctggagttaccctgatgaaaaaaataagagagcttccgtaaggcgacgaattgaccaaagcaattcccatgccaacatattctacagtgttcttactattgacaaaatgcagaacaaagacaaaggactttatacttgtcgtgtaaggagtggaccatcattcaaatctgttaacacctcagtgcatatatatgataaagcattcatcactgtgaaacatcgaaaacagcaggtgcttgaaaccgtagctggcaagcggtcttaccggctctctatgaaagtgaaggcatttccctcgccggaagttgtatggttaaaagatgggttacctgcgactgagaaatctgctcgctatttgactcgtggctactcgttaattatcaaggacgtaactgaagaggatgcagggaattatacaatcttgctgagcataaaacagtcaaatgtgtttaaaaacctcactgccactctaattgtcaatgtgaaaccccagatttacgaaaaggccgtgtcatcgtttccagacccggctctctacccactgggcagcagacaaatcctgacttgtaccgcatatggtatccctcaacctacaatcaagtggttctggcacccctgtaaccataatcattccgaagcaaggtgtgacttttgttccaataatgaagagtcctttatcctggatgctgacagcaacatgggaaacagaattgagagcatcactcagcgcatggcaataatagaaggaaagaataagatggctagcaccttggttgtggctgactctagaatttctggaatctacatttgcatagcttccaataaagttgggactgtgggaagaaacataagcttttatatcacagatgtgccaaatgggtttcatgttaacttggaaaaaatgccgacggaaggagaggacctgaaactgtcttgcacagttaacaagttcttatacagagacgttacttggattttactgcggacagttaataacagaacaatgcactacagtattagcaagcaaaaaatggccatcactaaggagcactccatcactcttaatcttaccatcatgaatgtttccctgcaagattcaggcacctatgcctgcagagccaggaatgtatacacaggggaagaaatcctccagaagaaagaaattacaatcagagatcaggaagcaccatacctcctgcgaaacctcagtgatcacacagtggccatcagcagttccaccactttagactgtcatgctaatggtgtccccgagcctcagatcacttggtttaaaaacaaccacaaaatacaacaagagcctggaattattttaggaccaggaagcagcacgctgtttattgaaagagtcacagaagaggatgaaggtgtctatcactgcaaagccaccaaccagaagggctctgtggaaagttcagcatacctcactgttcaaggaacctcggacaagtctaatctggagctgatcactctaacatgcacctgtgtggctgcgactctcttctggctcctattaaccctctttatccgaaaaatgaaaaggtcttcttctgaaataaagactgactacctatcaattataatggacccagatgaagttcctttggatgagcagtgtgagcggctcccttatgatgccagcaagtgggagtttgcccgggagagacttaaactgggcaaatcacttggaagaggggcttttggaaaagtggttcaagcatcagcatttggcattaagaaatcacctacgtgccggactgtggctgtgaaaatgctgaaagagggggccacggccagcgagtacaaagctctgatgactgagctaaaaatcttgacccacattggccaccatctgaacgtggttaacctgctgggagcctgcaccaagcaaggagggcctctgatggtgattgttgaatactgcaaatatggaaatctctccaactacctcaagagcaaacgtgacttattttttctcaacaaggatgcagcactacacatggagcctaagaaagaaaaaatggagccaggcctggaacaaggcaagaaaccaagactagatagcgtcaccagcagcgaaagctttgcgagctccggctttcaggaagataaaagtctgagtgatgttgaggaagaggaggattctgacggtttctacaaggagcccatcactatggaagatctgatttcttacagttttcaagtggccagaggcatggagttcctgtcttccagaaagtgcattcatcgggacctggcagcgagaaacattcttttatctgagaacaacgtggtgaagatttgtgattttggccttgcccgggatatttataagaaccccgattatgtgagaaaaggagatactcgacttcctctgaaatggatggctccngaatctatctttgacaaaatctacagcaccaagagcgacgtgtggtcttacggagtattgctgtgggaaatcttctccttaggtgggtctccatacccaggagtacaaatggatgaggacttttgcagtcgcctgagggaaggcatgaggatgagagctcctgagtactctactcctgaaatctatcagatcatgctggactgctggcacagagacccaaaagaaaggccaagatttgcagaacttgtggaaaaactaggtgatttgcttcaagcaaatgtacaacaggatggtaaagactacatcccaatcaatgccatactgacaggaaatagtgggtttacatactcaactcctgccttctctgaggacttcttcaaggaaagtatttcagctccgaagtttaattcaggaagctctgatgatgtcagatatgtaaatgctttcaagttcatgagcctggaaagaatcaaaacctttgaagaacttttaccgaatgccacctccatgtttgatgactaccagggcgacagcagcactctgttggcctctcccatgctgaagcgcttcacctggactgacagcaaacccaaggcctcgctcaagattgacttgagagtaaccagtaaaagtaaggagtcggggctgtctgatgtcagcaggcccagtttctgccattccagctgtgggcacgtcagcgaaggcaagcgcaggttcacctacgaccacgctgagctggaaaggaaaatcgcgtgctgctccccgcccccagactacaactcggtggtcctgtactccaccccacccatctagagtttgacacgaagccttatttctagaagcacatgtgtatttatacccccaggaaactagcttttgccagtattatgcatatataagtttacacctttatctttccatgggagccagctgctttttgtgatttttttaatagtgctttttttttttgactaacaagaatgtaactccagatagagaaatagtgacaagtgaagaacactactgctaaatcctcatgttactcagtgttagagaaatccttcctaaacccaatgacttccctgctccaacccccgccacctcagggcacgcaggaccagtttgattgaggagctgcactgatcacccaatgcatcacgtaccccactgggccagccctgcagcccaaaacccagggcaacaagcccgttagccccagggatcactggctggcctgagcaacatctcgggagtcctctagcaggcctaagacatgtgaggaggaaaaggaaaaaaagcaaaaagcaagggagaaaagagaaaccgggagaaggcatgagaaagaatttgagacgcaccatgtgggcacggagggggacggggctcagcaatgccatttcagtggcttcccagctctgacccttctacatttgagggcccagccaggagcagatggacagcgatgaggggacattttctggattctgggaggcaagaaaaggacaaatatcttttttggaactaaagcaaattttagaactttacctatggaagtggttctatgtccattctcattcgtggcatgttttgatttgtagcactgagggtggcactcaactctgagcccatacttttggctcctctagtaagatgcactgaaaacttagccagagttaggttgtctccaggccatgatggccttacactgaaaatgtcacattctattttgggtattaatatatagtccagacacttaactcaatttcttggtattattctgttttgcacagttagttgtgaaagaaagctgagaagaatgaaaatgcagtcctgaggagaggagttttctccatatcaaaacgagggctgatggaggaaaaaggtcaataaggtcaagggaaaaccccgtctctataccaaccaaaccaattcaccaacacagttgggacccaaaacacaggaagtcagtcacgtttccttttcatttaatggggattccactatctcacactaatctgaaaggatgtggaagagcattagctggcgcatattaagcactttaagctccttgagtaaaaaggtggtatgtaatttatgcaaggtatttctccagttgggactcaggatattagttaatgagccatcactagaagaaaagcccattttcaactgctttgaaacttgcctggggtctgagcatgatgggaatagggagacagggtaggaaagggcgcctactcttcagggtctaaagatcaagtgggccttggatcgctaagctggctctgtttgatgctatttatgcaagttagggtctatgtatttaggatgtctgcaccttctgcagccagtcagaagctggagaggcaacagtggattgctgcttcttggggagaagagtatgcttccttttatccatgtaatttaactgtagaacctgagctctaagtaaccgaagaatgtatgcctctgttcttatgtgccacatccttgtttaaaggctctctgtatgaagagatgggaccgtcatcagcacattccctagtgagcctactggctcctggcagcggcttttgtggaagactcactagccagaagagaggagtgggacagtcctctccaccaagatctaaatccaaacaaaagcaggctagagccagaagagaggacaaatctttgttcttcctcttctttacatacgcaaaccacctgtgacagctggcaattttataaatcaggtaactggaaggaggttaaacacagaaaaaagaagacctcagtcaattctctactttttttttttttttccaaatcagataatagcccagcaaatagtgataacaaataaaaccttagctattcatgtcttgatttcaataattaattcttaatcattaagagaccataataaatactccttttcaagagaaaagcaaaaccattagaattgttactcagctccttcaaactcaggtttgtagcatacatgagtccatccatcagtcaaagaatggttccatctggagtcttaatgtagaaagaaaaatggagacttgtaataatgagctagttacaaagtgcttgttcattaaaatagcactgaaaattgaaacatgaattaactgataatattccaatcatttgccatttatgacaaaaatggttggcactaacaaagaacgagcacttcctttcagagtttctgagataatgtacgtggaacagtctgggtggaatggggctgaaaccatgtgcaagtctgtgtcttgtcagtccaagaagtgacaccgagatgttaattttagggacccgtgccttgtttcctagcccacaagaatgcaaacatcaaacagatactcgctagcctcatttaaattgattaaaggaggagtgcatctttggccgacagtggtgtaactgtatgtgtgtgtgtgtgtgtgtgtgtgtgtgtgggtgtatgtgtgttttgtgcataactatttaaggaaactggaattttaaagttacttttatacaaaccaagaatatatgctacagatataagacagacatggtttggtcctatatttctagtcatgatgaatgtattttgtataccatcttcatataataaacttccaaaaacacaaaaaaaaaaac

SEQ ID NO: 343400 - DNA, 7213 bp, Homo sapiens
  misc_feature (1849)..(1849): n is a, c, g, or t
  misc_feature (3574)..(3574): n is a, c, g, or t
atcgaggtccgcgggaggctcggagcgcgccaggcggacactcctctcggctcctccccggcagcggcggcggctcggagcgggctccggggctcgggtgcagcggccagcgggcgcctggcggcgaggattacccggggaagtggttgtctcctggctggagccgcgagacgggcgctcagggcgcggggccggcggcggcgaacgagaggacggactctggcggccgggtcgttggccgcggggagcgcgggcaccgggcgagcaggccgcgtcgcgctcaccatggtcagctactgggacaccggggtcctgctgtgcgcgctgctcagctgtctgcttctcacaggatctagttcaggttcaaaattaaaagatcctgaactgagtttaaaaggcacccagcacatcatgcaagcaggccagacactgcatctccaatgcaggggggaagcagcccataaatggtctttgcctgaaatggtgagtaaggaaagcgaaaggctgagcataactaaatctgcctgtggaagaaatggcaaacaattctgcagtactttaaccttgaacacagctcaagcaaaccacactggcttctacagctgcaaatatctagctgtacctacttcaaagaagaaggaaacagaatctgcaatctatatatttattagtgatacaggtagacctttcgtagagatgtacagtgaaatccccgaaattatacacatgactgaaggaagggagctcgtcattccctgccgggttacgtcacctaacatcactgttactttaaaaaagtttccacttgacactttgatccctgatggaaaacgcataatctgggacagtagaaagggcttcatcatatcaaatgcaacgtacaaagaaatagggcttctgacctgtgaagcaacagtcaatgggcatttgtataagacaaactatctcacacatcgacaaaccaatacaatcatagatgtccaaataagcacaccacgcccagtcaaattacttagaggccatactcttgtcctcaattgtactgctaccactcccttgaacacgagagttcaaatgacctggagttaccctgatgaaaaaaataagagagcttccgtaaggcgacgaattgaccaaagcaattcccatgccaacatattctacagtgttcttactattgacaaaatgcagaacaaagacaaaggactttatacttgtcgtgtaaggagtggaccatcattcaaatctgttaacacctcagtgcatatatatgataaagcattcatcactgtgaaacatcgaaaacagcaggtgcttgaaaccgtagctggcaagcggtcttaccggctctctatgaaagtgaaggcatttccctcgccggaagttgtatggttaaaagatgggttacctgcgactgagaaatctgctcgctatttgactcgtggctactcgttaattatcaaggacgtaactgaagaggatgcagggaattatacaatcttgctgagcataaaacagtcaaatgtgtttaaaaacctcactgccactctaattgtcaatgtgaaaccccagatttacgaaaaggccgtgtcatcgtttccagacccggctctctacccactgggcagcagacaaatcctgacttgtaccgcatatggtatccctcaacctacaatcaagtggttctggcacccctgtaaccataatcattccgaagcaaggtgtgacttttgttccaataatgaagagtcctttatcctggatgctgacagcaacatgggaaacagaattgagagcatcactcagcgcatggcaataatagaaggaaagaataagcttccaccagctnacagttctttcatgttgccacctacaagcttctcttccaactacttccatttccttccgtgactctaaacggatggctagcaccttggttgtggctgactctagaatttctggaatctacatttgcatagcttccaataaagttgggactgtgggaagaaacataagcttttatatcacagatgtgccaaatgggtttcatgttaacttggaaaaaatgccgacggaaggagaggacctgaaactgtcttgcacagttaacaagttcttatacagagacgttacttggattttactgcggacagttaataacagaacaatgcactacagtattagcaagcaaaaaatggccatcactaaggagcactccatcactcttaatcttaccatcatgaatgtttccctgcaagattcaggcacctatgcctgcagagccaggaatgtatacacaggggaagaaatcctccagaagaaagaaattacaatcagagatcaggaagcaccatacctcctgcgaaacctcagtgatcacacagtggccatcagcagttccaccactttagactgtcatgctaatggtgtccccgagcctcagatcacttggtttaaaaacaaccacaaaatacaacaagagcctggaattattttaggaccaggaagcagcacgctgtttattgaaagagtcacagaagaggatgaaggtgtctatcactgcaaagccaccaaccagaagggctctgtggaaagttcagcatacctcactgttcaaggaacctcggacaagtctaatctggagctgatcactctaacatgcacctgtgtggctgcgactctcttctggctcctattaaccctctttatccgaaaaatgaaaaggtcttcttctgaaataaagactgactacctatcaattataatggacccagatgaagttcctttggatgagcagtgtgagcggctcccttatgatgccagcaagtgggagtttgcccgggagagacttaaactgggcaaatcacttggaagaggggcttttggaaaagtggttcaagcatcagcatttggcattaagaaatcacctacgtgccggactgtggctgtgaaaatgctgaaagagggggccacggccagcgagtacaaagctctgatgactgagctaaaaatcttgacccacattggccaccatctgaacgtggttaacctgctgggagcctgcaccaagcaaggagggcctctgatggtgattgttgaatactgcaaatatggaaatctctccaactacctcaagagcaaacgtgacttattttttctcaacaaggatgcagcactacacatggagcctaagaaagaaaaaatggagccaggcctggaacaaggcaagaaaccaagactagatagcgtcaccagcagcgaaagctttgcgagctccggctttcaggaagataaaagtctgagtgatgttgaggaagaggaggattctgacggtttctacaaggagcccatcactatggaagatctgatttcttacagttttcaagtggccagaggcatggagttcctgtcttccagaaagtgcattcatcgggacctggcagcgagaaacattcttttatctgagaacaacgtggtgaagatttgtgattttggccttgcccgggatatttataagaaccccgattatgtgagaaaaggagatactcgacttcctctgaaatggatggctccngaatctatctttgacaaaatctacagcaccaagagcgacgtgtggtcttacggagtattgctgtgggaaatcttctccttaggtgggtctccatacccaggagtacaaatggatgaggacttttgcagtcgcctgagggaaggcatgaggatgagagctcctgagtactctactcctgaaatctatcagatcatgctggactgctggcacagagacccaaaagaaaggccaagatttgcagaacttgtggaaaaactaggtgatttgcttcaagcaaatgtacaacaggatggtaaagactacatcccaatcaatgccatactgacaggaaatagtgggtttacatactcaactcctgccttctctgaggacttcttcaaggaaagtatttcagctccgaagtttaattcaggaagctctgatgatgtcagatatgtaaatgctttcaagttcatgagcctggaaagaatcaaaacctttgaagaacttttaccgaatgccacctccatgtttgatgactaccagggcgacagcagcactctgttggcctctcccatgctgaagcgcttcacctggactgacagcaaacccaaggcctcgctcaagattgacttgagagtaaccagtaaaagtaaggagtcggggctgtctgatgtcagcaggcccagtttctgccattccagctgtgggcacgtcagcgaaggcaagcgcaggttcacctacgaccacgctgagctggaaaggaaaatcgcgtgctgctccccgcccccagactacaactcggtggtcctgtactccaccccacccatctagagtttgacacgaagccttatttctagaagcacatgtgtatttatacccccaggaaactagcttttgccagtattatgcatatataagtttacacctttatctttccatgggagccagctgctttttgtgatttttttaatagtgctttttttttttgactaacaagaatgtaactccagatagagaaatagtgacaagtgaagaacactactgctaaatcctcatgttactcagtgttagagaaatccttcctaaacccaatgacttccctgctccaacccccgccacctcagggcacgcaggaccagtttgattgaggagctgcactgatcacccaatgcatcacgtaccccactgggccagccctgcagcccaaaacccagggcaacaagcccgttagccccagggatcactggctggcctgagcaacatctcgggagtcctctagcaggcctaagacatgtgaggaggaaaaggaaaaaaagcaaaaagcaagggagaaaagagaaaccgggagaaggcatgagaaagaatttgagacgcaccatgtgggcacggagggggacggggctcagcaatgccatttcagtggcttcccagctctgacccttctacatttgagggcccagccaggagcagatggacagcgatgaggggacattttctggattctgggaggcaagaaaaggacaaatatcttttttggaactaaagcaaattttagaactttacctatggaagtggttctatgtccattctcattcgtggcatgttttgatttgtagcactgagggtggcactcaactctgagcccatacttttggctcctctagtaagatgcactgaaaacttagccagagttaggttgtctccaggccatgatggccttacactgaaaatgtcacattctattttgggtattaatatatagtccagacacttaactcaatttcttggtattattctgttttgcacagttagttgtgaaagaaagctgagaagaatgaaaatgcagtcctgaggagaggagttttctccatatcaaaacgagggctgatggaggaaaaaggtcaataaggtcaagggaaaaccccgtctctataccaaccaaaccaattcaccaacacagttgggacccaaaacacaggaagtcagtcacgtttccttttcatttaatggggattccactatctcacactaatctgaaaggatgtggaagagcattagctggcgcatattaagcactttaagctccttgagtaaaaaggtggtatgtaatttatgcaaggtatttctccagttgggactcaggatattagttaatgagccatcactagaagaaaagcccattttcaactgctttgaaacttgcctggggtctgagcatgatgggaatagggagacagggtaggaaagggcgcctactcttcagggtctaaagatcaagtgggccttggatcgctaagctggctctgtttgatgctatttatgcaagttagggtctatgtatttaggatgtctgcaccttctgcagccagtcagaagctggagaggcaacagtggattgctgcttcttggggagaagagtatgcttccttttatccatgtaatttaactgtagaacctgagctctaagtaaccgaagaatgtatgcctctgttcttatgtgccacatccttgtttaaaggctctctgtatgaagagatgggaccgtcatcagcacattccctagtgagcctactggctcctggcagcggcttttgtggaagactcactagccagaagagaggagtgggacagtcctctccaccaagatctaaatccaaacaaaagcaggctagagccagaagagaggacaaatctttgttcttcctcttctttacatacgcaaaccacctgtgacagctggcaattttataaatcaggtaactggaaggaggttaaacacagaaaaaagaagacctcagtcaattctctactttttttttttttttccaaatcagataatagcccagcaaatagtgataacaaataaaaccttagctattcatgtcttgatttcaataattaattcttaatcattaagagaccataataaatactccttttcaagagaaaagcaaaaccattagaattgttactcagctccttcaaactcaggtttgtagcatacatgagtccatccatcagtcaaagaatggttccatctggagtcttaatgtagaaagaaaaatggagacttgtaataatgagctagttacaaagtgcttgttcattaaaatagcactgaaaattgaaacatgaattaactgataatattccaatcatttgccatttatgacaaaaatggttggcactaacaaagaacgagcacttcctttcagagtttctgagataatgtacgtggaacagtctgggtggaatggggctgaaaccatgtgcaagtctgtgtcttgtcagtccaagaagtgacaccgagatgttaattttagggacccgtgccttgtttcctagcccacaagaatgcaaacatcaaacagatactcgctagcctcatttaaattgattaaaggaggagtgcatctttggccgacagtggtgtaactgtatgtgtgtgtgtgtgtgtgtgtgtgtgtgtgggtgtatgtgtgttttgtgcataactatttaaggaaactggaattttaaagttacttttatacaaaccaagaatatatgctacagatataagacagacatggtttggtcctatatttctagtcatgatgaatgtattttgtataccatcttcatataataaacttccaaaaacacaaaaaaaaaaac

SEQ ID NO: 343401 - DNA, 7158 bp, Homo sapiens
  misc_feature (1794)..(1794): n is a, c, g, or t
  misc_feature (3519)..(3519): n is a, c, g, or t
atcgaggtccgcgggaggctcggagcgcgccaggcggacactcctctcggctcctccccggcagcggcggcggctcggagcgggctccggggctcgggtgcagcggccagcgggcgcctggcggcgaggattacccggggaagtggttgtctcctggctggagccgcgagacgggcgctcagggcgcggggccggcggcggcgaacgagaggacggactctggcggccgggtcgttggccgcggggagcgcgggcaccgggcgagcaggccgcgtcgcgctcaccatggtcagctactgggacaccggggtcctgctgtgcgcgctgctcagctgtctgcttctcacaggatctagttcaggttcaaaattaaaagatcctgaactgagtttaaaaggcacccagcacatcatgcaagcaggccagacactgcatctccaatgcaggggggaagcagcccataaatggtctttgcctgaaatggtgagtaaggaaagcgaaaggctgagcataactaaatctgcctgtggaagaaatggcaaacaattctgcagtactttaaccttgaacacagctcaagcaaaccacactggcttctacagctgcaaatatctagctgtacctacttcaaagaagaaggaaacagaatctgcaatctatatatttattagtgatacaggtagacctttcgtagagatgtacagtgaaatccccgaaattatacacatgactgaaggaagggagctcgtcattccctgccgggttacgtcacctaacatcactgttactttaaaaaagtttccacttgacactttgatccctgatggaaaacgcataatctgggacagtagaaagggcttcatcatatcaaatgcaacgtacaaagaaatagggcttctgacctgtgaagcaacagtcaatgggcatttgtataagacaaactatctcacacatcgacaaaccaatacaatcatagatgtccaaataagcacaccacgcccagtcaaattacttagaggccatactcttgtcctcaattgtactgctaccactcccttgaacacgagagttcaaatgacctggagttaccctgatgaaaaaaataagagagcttccgtaaggcgacgaattgaccaaagcaattcccatgccaacatattctacagtgttcttactattgacaaaatgcagaacaaagacaaaggactttatacttgtcgtgtaaggagtggaccatcattcaaatctgttaacacctcagtgcatatatatgataaagcattcatcactgtgaaacatcgaaaacagcaggtgcttgaaaccgtagctggcaagcggtcttaccggctctctatgaaagtgaaggcatttccctcgccggaagttgtatgtactcgttaattatcaaggacgtaactgaagaggatgcagggaattatacaatcttgctgagcataaaacagtcaaatgtgtttaaaaacctcactgccactctaattgtcaatgtgaaaccccagatttacgaaaaggccgtgtcatcgtttccagacccggctctctacccactgggcagcagacaaatcctgacttgtaccgcatatggtatccctcaacctacaatcaagtggttctggcacccctgtaaccataatcattccgaagcaaggtgtgacttttgttccaataatgaagagtcctttatcctggatgctgacagcaacatgggaaacagaattgagagcatcactcagcgcatggcaataatagaaggaaagaataagcttccaccagctnacagttctttcatgttgccacctacaagcttctcttccaactacttccatttccttccgtgactctaaacggatggctagcaccttggttgtggctgactctagaatttctggaatctacatttgcatagcttccaataaagttgggactgtgggaagaaacataagcttttatatcacagatgtgccaaatgggtttcatgttaacttggaaaaaatgccgacggaaggagaggacctgaaactgtcttgcacagttaacaagttcttatacagagacgttacttggattttactgcggacagttaataacagaacaatgcactacagtattagcaagcaaaaaatggccatcactaaggagcactccatcactcttaatcttaccatcatgaatgtttccctgcaagattcaggcacctatgcctgcagagccaggaatgtatacacaggggaagaaatcctccagaagaaagaaattacaatcagagatcaggaagcaccatacctcctgcgaaacctcagtgatcacacagtggccatcagcagttccaccactttagactgtcatgctaatggtgtccccgagcctcagatcacttggtttaaaaacaaccacaaaatacaacaagagcctggaattattttaggaccaggaagcagcacgctgtttattgaaagagtcacagaagaggatgaaggtgtctatcactgcaaagccaccaaccagaagggctctgtggaaagttcagcatacctcactgttcaaggaacctcggacaagtctaatctggagctgatcactctaacatgcacctgtgtggctgcgactctcttctggctcctattaaccctctttatccgaaaaatgaaaaggtcttcttctgaaataaagactgactacctatcaattataatggacccagatgaagttcctttggatgagcagtgtgagcggctcccttatgatgccagcaagtgggagtttgcccgggagagacttaaactgggcaaatcacttggaagaggggcttttggaaaagtggttcaagcatcagcatttggcattaagaaatcacctacgtgccggactgtggctgtgaaaatgctgaaagagggggccacggccagcgagtacaaagctctgatgactgagctaaaaatcttgacccacattggccaccatctgaacgtggttaacctgctgggagcctgcaccaagcaaggagggcctctgatggtgattgttgaatactgcaaatatggaaatctctccaactacctcaagagcaaacgtgacttattttttctcaacaaggatgcagcactacacatggagcctaagaaagaaaaaatggagccaggcctggaacaaggcaagaaaccaagactagatagcgtcaccagcagcgaaagctttgcgagctccggctttcaggaagataaaagtctgagtgatgttgaggaagaggaggattctgacggtttctacaaggagcccatcactatggaagatctgatttcttacagttttcaagtggccagaggcatggagttcctgtcttccagaaagtgcattcatcgggacctggcagcgagaaacattcttttatctgagaacaacgtggtgaagatttgtgattttggccttgcccgggatatttataagaaccccgattatgtgagaaaaggagatactcgacttcctctgaaatggatggctccngaatctatctttgacaaaatctacagcaccaagagcgacgtgtggtcttacggagtattgctgtgggaaatcttctccttaggtgggtctccatacccaggagtacaaatggatgaggacttttgcagtcgcctgagggaaggcatgaggatgagagctcctgagtactctactcctgaaatctatcagatcatgctggactgctggcacagagacccaaaagaaaggccaagatttgcagaacttgtggaaaaactaggtgatttgcttcaagcaaatgtacaacaggatggtaaagactacatcccaatcaatgccatactgacaggaaatagtgggtttacatactcaactcctgccttctctgaggacttcttcaaggaaagtatttcagctccgaagtttaattcaggaagctctgatgatgtcagatatgtaaatgctttcaagttcatgagcctggaaagaatcaaaacctttgaagaacttttaccgaatgccacctccatgtttgatgactaccagggcgacagcagcactctgttggcctctcccatgctgaagcgcttcacctggactgacagcaaacccaaggcctcgctcaagattgacttgagagtaaccagtaaaagtaaggagtcggggctgtctgatgtcagcaggcccagtttctgccattccagctgtgggcacgtcagcgaaggcaagcgcaggttcacctacgaccacgctgagctggaaaggaaaatcgcgtgctgctccccgcccccagactacaactcggtggtcctgtactccaccccacccatctagagtttgacacgaagccttatttctagaagcacatgtgtatttatacccccaggaaactagcttttgccagtattatgcatatataagtttacacctttatctttccatgggagccagctgctttttgtgatttttttaatagtgctttttttttttgactaacaagaatgtaactccagatagagaaatagtgacaagtgaagaacactactgctaaatcctcatgttactcagtgttagagaaatccttcctaaacccaatgacttccctgctccaacccccgccacctcagggcacgcaggaccagtttgattgaggagctgcactgatcacccaatgcatcacgtaccccactgggccagccctgcagcccaaaacccagggcaacaagcccgttagccccagggatcactggctggcctgagcaacatctcgggagtcctctagcaggcctaagacatgtgaggaggaaaaggaaaaaaagcaaaaagcaagggagaaaagagaaaccgggagaaggcatgagaaagaatttgagacgcaccatgtgggcacggagggggacggggctcagcaatgccatttcagtggcttcccagctctgacccttctacatttgagggcccagccaggagcagatggacagcgatgaggggacattttctggattctgggaggcaagaaaaggacaaatatcttttttggaactaaagcaaattttagaactttacctatggaagtggttctatgtccattctcattcgtggcatgttttgatttgtagcactgagggtggcactcaactctgagcccatacttttggctcctctagtaagatgcactgaaaacttagccagagttaggttgtctccaggccatgatggccttacactgaaaatgtcacattctattttgggtattaatatatagtccagacacttaactcaatttcttggtattattctgttttgcacagttagttgtgaaagaaagctgagaagaatgaaaatgcagtcctgaggagaggagttttctccatatcaaaacgagggctgatggaggaaaaaggtcaataaggtcaagggaaaaccccgtctctataccaaccaaaccaattcaccaacacagttgggacccaaaacacaggaagtcagtcacgtttccttttcatttaatggggattccactatctcacactaatctgaaaggatgtggaagagcattagctggcgcatattaagcactttaagctccttgagtaaaaaggtggtatgtaatttatgcaaggtatttctccagttgggactcaggatattagttaatgagccatcactagaagaaaagcccattttcaactgctttgaaacttgcctggggtctgagcatgatgggaatagggagacagggtaggaaagggcgcctactcttcagggtctaaagatcaagtgggccttggatcgctaagctggctctgtttgatgctatttatgcaagttagggtctatgtatttaggatgtctgcaccttctgcagccagtcagaagctggagaggcaacagtggattgctgcttcttggggagaagagtatgcttccttttatccatgtaatttaactgtagaacctgagctctaagtaaccgaagaatgtatgcctctgttcttatgtgccacatccttgtttaaaggctctctgtatgaagagatgggaccgtcatcagcacattccctagtgagcctactggctcctggcagcggcttttgtggaagactcactagccagaagagaggagtgggacagtcctctccaccaagatctaaatccaaacaaaagcaggctagagccagaagagaggacaaatctttgttcttcctcttctttacatacgcaaaccacctgtgacagctggcaattttataaatcaggtaactggaaggaggttaaacacagaaaaaagaagacctcagtcaattctctactttttttttttttttccaaatcagataatagcccagcaaatagtgataacaaataaaaccttagctattcatgtcttgatttcaataattaattcttaatcattaagagaccataataaatactccttttcaagagaaaagcaaaaccattagaattgttactcagctccttcaaactcaggtttgtagcatacatgagtccatccatcagtcaaagaatggttccatctggagtcttaatgtagaaagaaaaatggagacttgtaataatgagctagttacaaagtgcttgttcattaaaatagcactgaaaattgaaacatgaattaactgataatattccaatcatttgccatttatgacaaaaatggttggcactaacaaagaacgagcacttcctttcagagtttctgagataatgtacgtggaacagtctgggtggaatggggctgaaaccatgtgcaagtctgtgtcttgtcagtccaagaagtgacaccgagatgttaattttagggacccgtgccttgtttcctagcccacaagaatgcaaacatcaaacagatactcgctagcctcatttaaattgattaaaggaggagtgcatctttggccgacagtggtgtaactgtatgtgtgtgtgtgtgtgtgtgtgtgtgtgtgggtgtatgtgtgttttgtgcataactatttaaggaaactggaattttaaagttacttttatacaaaccaagaatatatgctacagatataagacagacatggtttggtcctatatttctagtcatgatgaatgtattttgtataccatcttcatataataaacttccaaaaacacaaaaaaaaaaac

SEQ ID NO: 343402 - DNA, 5639 bp, Homo sapiens
  misc_feature (3489)..(3489): n is a, c, g, or t
atcgaggtccgcgggaggctcggagcgcgccaggcggacactcctctcggctcctccccggcagcggcggcggctcggagcgggctccggggctcgggtgcagcggccagcgggcgcctggcggcgaggattacccggggaagtggttgtctcctggctggagccgcgagacgggcgctcagggcgcggggccggcggcggcgaacgagaggacggactctggcggccgggtcgttggccgcggggagcgcgggcaccgggcgagcaggccgcgtcgcgctcaccatggtcagctactgggacaccggggtcctgctgtgcgcgctgctcagctgtctgcttctcacaggatctagttcaggttcaaaattaaaagatcctgaactgagtttaaaaggcacccagcacatcatgcaagcaggccagacactgcatctccaatgcaggggggaagcagcccataaatggtctttgcctgaaatggtgagtaaggaaagcgaaaggctgagcataactaaatctgcctgtggaagaaatggcaaacaattctgcagtactttaaccttgaacacagctcaagcaaaccacactggcttctacagctgcaaatatctagctgtacctacttcaaagaagaaggaaacagaatctgcaatctatatatttattagtgatacaggtagacctttcgtagagatgtacagtgaaatccccgaaattatacacatgactgaaggaagggagctcgtcattccctgccgggttacgtcacctaacatcactgttactttaaaaaagtttccacttgacactttgatccctgatggaaaacgcataatctgggacagtagaaagggcttcatcatatcaaatgcaacgtacaaagaaatagggcttctgacctgtgaagcaacagtcaatgggcatttgtataagacaaactatctcacacatcgacaaaccaatacaatcatagatgtccaaataagcacaccacgcccagtcaaattacttagaggccatactcttgtcctcaattgtactgctaccactcccttgaacacgagagttcaaatgacctggagttaccctgatgaaaaaaataagagagcttccgtaaggcgacgaattgaccaaagcaattcccatgccaacatattctacagtgttcttactattgacaaaatgcagaacaaagacaaaggactttatacttgtcgtgtaaggagtggaccatcattcaaatctgttaacacctcagtgcatatatatgataaagcattcatcactgtgaaacatcgaaaacagcaggtgcttgaaaccgtagctggcaagcggtcttaccggctctctatgaaagtgaaggcatttccctcgccggaagttgtatggttaaaagatgggttacctgcgactgagaaatctgctcgctatttgactcgtggctactcgttaattatcaaggacgtaactgaagaggatgcagggaattatacaatcttgctgagcataaaacagtcaaatgtgtttaaaaacctcactgccactctaattgtcaatgtgaaaccccagatttacgaaaaggccgtgtcatcgtttccagacccggctctctacccactgggcagcagacaaatcctgacttgtaccgcatatggtatccctcaacctacaatcaagtggttctggcacccctgtaaccataatcattccgaagcaaggtgtgacttttgttccaataatgaagagtcctttatcctggatgctgacagcaacatgggaaacagaattgagagcatcactcagcgcatggcaataatagaaggaaagaataagatggctagcaccttggttgtggctgactctagaatttctggaatctacatttgcatagcttccaataaagttgggactgtgggaagaaacataagcttttatatcacagatgtgccaaatgggtttcatgttaacttggaaaaaatgccgacggaaggagaggacctgaaactgtcttgcacagttaacaagttcttatacagagacgttacttggattttactgcggacagttaataacagaacaatgcactacagtattagcaagcaaaaaatggccatcactaaggagcactccatcactcttaatcttaccatcatgaatgtttccctgcaagattcaggcacctatgcctgcagagccaggaatgtatacacaggggaagaaatcctccagaagaaagaaattacaatcagagatcaggaagcaccatacctcctgcgaaacctcagtgatcacacagtggccatcagcagttccaccactttagactgtcatgctaatggtgtccccgagcctcagatcacttggtttaaaaacaaccacaaaatacaacaagagcctggaattattttaggaccaggaagcagcacgctgtttattgaaagagtcacagaagaggatgaaggtgtctatcactgcaaagccaccaaccagaagggctctgtggaaagttcagcatacctcactgttcaaggaacctcggacaagtctaatctggagctgatcactctaacatgcacctgtgtggctgcgactctcttctggctcctattaaccctctttatccgaaaaatgaaaaggtcttcttctgaaataaagactgactacctatcaattataatggacccagatgaagttcctttggatgagcagtgtgagcggctcccttatgatgccagcaagtgggagtttgcccgggagagacttaaactgggcaaatcacttggaagaggggcttttggaaaagtggttcaagcatcagcatttggcattaagaaatcacctacgtgccggactgtggctgtgaaaatgctgaaagagggggccacggccagcgagtacaaagctctgatgactgagctaaaaatcttgacccacattggccaccatctgaacgtggttaacctgctgggagcctgcaccaagcaaggagggcctctgatggtgattgttgaatactgcaaatatggaaatctctccaactacctcaagagcaaacgtgacttattttttctcaacaaggatgcagcactacacatggagcctaagaaagaaaaaatggagccaggcctggaacaaggcaagaaaccaagactagatagcgtcaccagcagcgaaagctttgcgagctccggctttcaggaagataaaagtctgagtgatgttgaggaagaggaggattctgacggtttctacaaggagcccatcactatggaagatctgatttcttacagttttcaagtggccagaggcatggagttcctgtcttccagaaagtgcattcatcgggacctggcagcgagaaacattcttttatctgagaacaacgtggtgaagatttgtgattttggccttgcccgggatatttataagaaccccgattatgtgagaaaaggagatactcgacttcctctgaaatggatggctccngaatctatctttgacaaaatctacagcaccaagagcgacgtgtggtcttacggagtattgctgtgggaaatcttctccttaggtgggtctccatacccaggagtacaaatggatgaggacttttgcagtcgcctgagggaaggcatgaggatgagagctcctgagtactctactcctgaaatctatcagatcatgctggactgctggcacagagacccaaaagaaaggccaagatttgcagaacttgtggaaaaactaggtgatttgcttcaagcaaatgtacaacaggatggtaaagactacatcccaatcaatgccatactgacaggaaatagtgggtttacatactcaactcctgccttctctgaggacttcttcaaggaaagtatttcagctccgaagtttaattcaggaagctctgatgatgtcagatatgtaaatgctttcaagttcatgagcctggaaagaatcaaaacctttgaagaacttttaccgaatgccacctccatgtttgatgactaccagggcgacagcagcactctgttggcctctcccatgctgaagcgcttcacctggactgacagcaaacccaaggcctcgctcaagattgacttgagagtaaccagtaaaagtaaggagtcggggctgtctgatgtcagcaggcccagtttctgccattccagctgtgggcacgtcagcgaaggcaagcgcaggttcacctacgaccacgctgagctggaaaggaaaatcgcgtgctgctccccgcccccagactacaactcggtgttagttgtgaaagaaagctgagaagggaaaatttgggaaaagccgtggccaaaggggaagccccctttggtggggccaccgaaggggggttggggaaaagcggcggcgggtgtggggtggggtgggaaggggcggtagtgttggttgaggggggtgtgggaggaggggggtgggggtgtgggggagttttctccatatcaaaacgagggctgatggaggaaaaaggctctctgtatgaagagatgggaccgtcatcagcacattccctagtgagcctactggctcctggcagcggcttttgtggaagactcactagccagaagagaggagtgggacagtcctctccaccaagatctaaatccaaacaaaagcaggctagagccagaagagaggacaaatctttgttcttcctcttctttacatacgcaaaccacctgtgacagctggcaattttataaatcaggtaactggaaggaggttaaacacagaaaaaagaagacctcagtcaattctctactttttttttttttttccaaatcagataatagcccagcaaatagtgataacaaataaaaccttagctattcatgtcttgatttcaataattaattcttaatcattaagagaccataataaatactccttttcaagagaaaagcaaaaccattagaattgttactcagctccttcaaactcaggtttgtagcatacatgagtccatccatcagtcaaagaatggttccatctggagtcttaatgtagaaagaaaaatggagacttgtaataatgagctagttacaaagtgcttgttcattaaaatagcactgaaaattgaaacatgaattaactgataatattccaatcatttgccatttatgacaaaaatggttggcactaacaaagaacgagcacttcctttcagagtttctgagataatgtacgtggaacagtctgggtggaatggggctgaaaccatgtgcaagtctgtgtcttgtcagtccaagaagtgacaccgagatgttaattttagggacccgtgccttgtttcctagcccacaagaatgcaaacatcaaacagatactcgctagcctcatttaaattgattaaaggaggagtgcatctttggccgacagtggtgtaactgtatgtgtgtgtgtgtgtgtgtgtgtgtgtgtgggtgtatgtgtgttttgtgcataactatttaaggaaactggaattttaaagttacttttatacaaaccaagaatatatgctacagatataagacagacatggtttggtcctatatttctagtcatgatgaatgtattttgtataccatcttcatataataaacttccaaaaacacaaaaaaaaaaac

SEQ ID NO: 343403 - DNA, 4277 bp, Homo sapiens
  misc_feature (638)..(638): n is a, c, g, or t
tccttgctttgtgggctgcatgcccagcccaggcatgcagtggaaacgcagggcaggagagaggaggccttcagagtgcagctggacttccttcccaaccctcttgcttccttcagaccggggtcgggttggcaaaccaagggcctctgatggtgattgttgaatactgcaaatatggaaatctctccaactacctcaagagcaaacgtgacttattttttctcaacaaggatgcagcactacacatggagcctaagaaagaaaaaatggagccaggcctggaacaaggcaagaaaccaagactagatagcgtcaccagcagcgaaagctttgcgagctccggctttcaggaagataaaagtctgagtgatgttgaggaagaggaggattctgacggtttctacaaggagcccatcactatggaagatctgatttcttacagttttcaagtggccagaggcatggagttcctgtcttccagaaagtgcattcatcgggacctggcagcgagaaacattcttttatctgagaacaacgtggtgaagatttgtgattttggccttgcccgggatatttataagaaccccgattatgtgagaaaaggagatactcgacttcctctgaaatggatggctccngaatctatctttgacaaaatctacagcaccaagagcgacgtgtggtcttacggagtattgctgtgggaaatcttctccttaggtgggtctccatacccaggagtacaaatggatgaggacttttgcagtcgcctgagggaaggcatgaggatgagagctcctgagtactctactcctgaaatctatcagatcatgctggactgctggcacagagacccaaaagaaaggccaagatttgcagaacttgtggaaaaactaggtgatttgcttcaagcaaatgtacaacaggatggtaaagactacatcccaatcaatgccatactgacaggaaatagtgggtttacatactcaactcctgccttctctgaggacttcttcaaggaaagtatttcagctccgaagtttaattcaggaagctctgatgatgtcagatatgtaaatgctttcaagttcatgagcctggaaagaatcaaaacctttgaagaacttttaccgaatgccacctccatgtttgatgactaccagggcgacagcagcactctgttggcctctcccatgctgaagcgcttcacctggactgacagcaaacccaaggcctcgctcaagattgacttgagagtaaccagtaaaagtaaggagtcggggctgtctgatgtcagcaggcccagtttctgccattccagctgtgggcacgtcagcgaaggcaagcgcaggttcacctacgaccacgctgagctggaaaggaaaatcgcgtgctgctccccgcccccagactacaactcggtggtcctgtactccaccccacccatctagagtttgacacgaagccttatttctagaagcacatgtgtatttatacccccaggaaactagcttttgccagtattatgcatatataagtttacacctttatctttccatgggagccagctgctttttgtgatttttttaatagtgctttttttttttgactaacaagaatgtaactccagatagagaaatagtgacaagtgaagaacactactgctaaatcctcatgttactcagtgttagagaaatccttcctaaacccaatgacttccctgctccaacccccgccacctcagggcacgcaggaccagtttgattgaggagctgcactgatcacccaatgcatcacgtaccccactgggccagccctgcagcccaaaacccagggcaacaagcccgttagccccagggatcactggctggcctgagcaacatctcgggagtcctctagcaggcctaagacatgtgaggaggaaaaggaaaaaaagcaaaaagcaagggagaaaagagaaaccgggagaaggcatgagaaagaatttgagacgcaccatgtgggcacggagggggacggggctcagcaatgccatttcagtggcttcccagctctgacccttctacatttgagggcccagccaggagcagatggacagcgatgaggggacattttctggattctgggaggcaagaaaaggacaaatatcttttttggaactaaagcaaattttagaactttacctatggaagtggttctatgtccattctcattcgtggcatgttttgatttgtagcactgagggtggcactcaactctgagcccatacttttggctcctctagtaagatgcactgaaaacttagccagagttaggttgtctccaggccatgatggccttacactgaaaatgtcacattctattttgggtattaatatatagtccagacacttaactcaatttcttggtattattctgttttgcacagttagttgtgaaagaaagctgagaagaatgaaaatgcagtcctgaggagaggagttttctccatatcaaaacgagggctgatggaggaaaaaggtcaataaggtcaagggaaaaccccgtctctataccaaccaaaccaattcaccaacacagttgggacccaaaacacaggaagtcagtcacgtttccttttcatttaatggggattccactatctcacactaatctgaaaggatgtggaagagcattagctggcgcatattaagcactttaagctccttgagtaaaaaggtggtatgtaatttatgcaaggtatttctccagttgggactcaggatattagttaatgagccatcactagaagaaaagcccattttcaactgctttgaaacttgcctggggtctgagcatgatgggaatagggagacagggtaggaaagggcgcctactcttcagggtctaaagatcaagtgggccttggatcgctaagctggctctgtttgatgctatttatgcaagttagggtctatgtatttaggatgtctgcaccttctgcagccagtcagaagctggagaggcaacagtggattgctgcttcttggggagaagagtatgcttccttttatccatgtaatttaactgtagaacctgagctctaagtaaccgaagaatgtatgcctctgttcttatgtgccacatccttgtttaaaggctctctgtatgaagagatgggaccgtcatcagcacattccctagtgagcctactggctcctggcagcggcttttgtggaagactcactagccagaagagaggagtgggacagtcctctccaccaagatctaaatccaaacaaaagcaggctagagccagaagagaggacaaatctttgttcttcctcttctttacatacgcaaaccacctgtgacagctggcaattttataaatcaggtaactggaaggaggttaaacacagaaaaaagaagacctcagtcaattctctactttttttttttttttccaaatcagataatagcccagcaaatagtgataacaaataaaaccttagctattcatgtcttgatttcaataattaattcttaatcattaagagaccataataaatactccttttcaagagaaaagcaaaaccattagaattgttactcagctccttcaaactcaggtttgtagcatacatgagtccatccatcagtcaaagaatggttccatctggagtcttaatgtagaaagaaaaatggagacttgtaataatgagctagttacaaagtgcttgttcattaaaatagcactgaaaattgaaacatgaattaactgataatattccaatcatttgccatttatgacaaaaatggttggcactaacaaagaacgagcacttcctttcagagtttctgagataatgtacgtggaacagtctgggtggaatggggctgaaaccatgtgcaagtctgtgtcttgtcagtccaagaagtgacaccgagatgttaattttagggacccgtgccttgtttcctagcccacaagaatgcaaacatcaaacagatactcgctagcctcatttaaattgattaaaggaggagtgcatctttggccgacagtggtgtaactgtatgtgtgtgtgtgtgtgtgtgtgtgtgtgtgggtgtatgtgtgttttgtgcataactatttaaggaaactggaattttaaagttacttttatacaaaccaagaatatatgctacagatataagacagacatggtttggtcctatatttctagtcatgatgaatgtattttgtataccatcttcatataataaacttccaaaaacacaaaaaaaaaaac

SEQ ID NO: 343404 - DNA, 4139 bp, Homo sapiens
tgatcagctacacacaggaaccttgctcacagccccggaaactccacactgtgggcttcaccttctggaagtgacaaagtcatgtacgcaggaccttccccaccagtctccactgctgagcccataaagggaggtgtgaggacttggaaatgccacatgctttttaagaagccagctcaaaccaacctttgttacaactcgagaatgaaataagtactacaaactattcagccattgatatttatggctgtatgactttttttttttttaactttaaggacatcgtcctacttctgtaagtgtggggaggagtactccacttcacattgaactgcagtgagcggtggggtttcctttccgaattgctgtgtttcattcacagaactcagaccttccatctgcagaggccacaggcacaacaaagaacctgggtatccatgagctctggtgggttggttagtctgccttggtagacgtgttttccactgaccacaggacctggcccagacagccttttaagtgctggtgctataaacccaaacctaaaaatgaagcagggtcacatagtacagaaagcttgggctttatgcggatgatgacagccctccctttgtagtacgtaaggcaatgcataggatgatcactgctctccaactatttctgttgctgttttccccaccagctatcagatcatgctggactgctggcacagagacccaaaagaaaggccaagatttgcagaacttgtggaaaaactaggtgatttgcttcaagcaaatgtacaacaggatggtaaagactacatcccaatcaatgccatactgacaggaaatagtgggtttacatactcaactcctgccttctctgaggacttcttcaaggaaagtatttcagctccgaagtttaattcaggaagctctgatgatgtcagatatgtaaatgctttcaagttcatgagcctggaaagaatcaaaacctttgaagaacttttaccgaatgccacctccatgtttgatgactaccagggcgacagcagcactctgttggcctctcccatgctgaagcgcttcacctggactgacagcaaacccaaggcctcgctcaagattgacttgagagtaaccagtaaaagtaaggagtcggggctgtctgatgtcagcaggcccagtttctgccattccagctgtgggcacgtcagcgaaggcaagcgcaggttcacctacgaccacgctgagctggaaaggaaaatcgcgtgctgctccccgcccccagactacaactcggtggtcctgtactccaccccacccatctagagtttgacacgaagccttatttctagaagcacatgtgtatttatacccccaggaaactagcttttgccagtattatgcatatataagtttacacctttatctttccatgggagccagctgctttttgtgatttttttaatagtgctttttttttttgactaacaagaatgtaactccagatagagaaatagtgacaagtgaagaacactactgctaaatcctcatgttactcagtgttagagaaatccttcctaaacccaatgacttccctgctccaacccccgccacctcagggcacgcaggaccagtttgattgaggagctgcactgatcacccaatgcatcacgtaccccactgggccagccctgcagcccaaaacccagggcaacaagcccgttagccccagggatcactggctggcctgagcaacatctcgggagtcctctagcaggcctaagacatgtgaggaggaaaaggaaaaaaagcaaaaagcaagggagaaaagagaaaccgggagaaggcatgagaaagaatttgagacgcaccatgtgggcacggagggggacggggctcagcaatgccatttcagtggcttcccagctctgacccttctacatttgagggcccagccaggagcagatggacagcgatgaggggacattttctggattctgggaggcaagaaaaggacaaatatcttttttggaactaaagcaaattttagaactttacctatggaagtggttctatgtccattctcattcgtggcatgttttgatttgtagcactgagggtggcactcaactctgagcccatacttttggctcctctagtaagatgcactgaaaacttagccagagttaggttgtctccaggccatgatggccttacactgaaaatgtcacattctattttgggtattaatatatagtccagacacttaactcaatttcttggtattattctgttttgcacagttagttgtgaaagaaagctgagaagaatgaaaatgcagtcctgaggagaggagttttctccatatcaaaacgagggctgatggaggaaaaaggtcaataaggtcaagggaaaaccccgtctctataccaaccaaaccaattcaccaacacagttgggacccaaaacacaggaagtcagtcacgtttccttttcatttaatggggattccactatctcacactaatctgaaaggatgtggaagagcattagctggcgcatattaagcactttaagctccttgagtaaaaaggtggtatgtaatttatgcaaggtatttctccagttgggactcaggatattagttaatgagccatcactagaagaaaagcccattttcaactgctttgaaacttgcctggggtctgagcatgatgggaatagggagacagggtaggaaagggcgcctactcttcagggtctaaagatcaagtgggccttggatcgctaagctggctctgtttgatgctatttatgcaagttagggtctatgtatttaggatgtctgcaccttctgcagccagtcagaagctggagaggcaacagtggattgctgcttcttggggagaagagtatgcttccttttatccatgtaatttaactgtagaacctgagctctaagtaaccgaagaatgtatgcctctgttcttatgtgccacatccttgtttaaaggctctctgtatgaagagatgggaccgtcatcagcacattccctagtgagcctactggctcctggcagcggcttttgtggaagactcactagccagaagagaggagtgggacagtcctctccaccaagatctaaatccaaacaaaagcaggctagagccagaagagaggacaaatctttgttcttcctcttctttacatacgcaaaccacctgtgacagctggcaattttataaatcaggtaactggaaggaggttaaacacagaaaaaagaagacctcagtcaattctctactttttttttttttttccaaatcagataatagcccagcaaatagtgataacaaataaaaccttagctattcatgtcttgatttcaataattaattcttaatcattaagagaccataataaatactccttttcaagagaaaagcaaaaccattagaattgttactcagctccttcaaactcaggtttgtagcatacatgagtccatccatcagtcaaagaatggttccatctggagtcttaatgtagaaagaaaaatggagacttgtaataatgagctagttacaaagtgcttgttcattaaaatagcactgaaaattgaaacatgaattaactgataatattccaatcatttgccatttatgacaaaaatggttggcactaacaaagaacgagcacttcctttcagagtttctgagataatgtacgtggaacagtctgggtggaatggggctgaaaccatgtgcaagtctgtgtcttgtcagtccaagaagtgacaccgagatgttaattttagggacccgtgccttgtttcctagcccacaagaatgcaaacatcaaacagatactcgctagcctcatttaaattgattaaaggaggagtgcatctttggccgacagtggtgtaactgtatgtgtgtgtgtgtgtgtgtgtgtgtgtgtgggtgtatgtgtgttttgtgcataactatttaaggaaactggaattttaaagttacttttatacaaaccaagaatatatgctacagatataagacagacatggtttggtcctatatttctagtcatgatgaatgtattttgtataccatcttcatataataaacttccaaaaacacaaaaaaaaaaac

SEQ ID NO: 343405 - DNA, 2594 bp, Homo sapiens
atcgaggtccgcgggaggctcggagcgcgccaggcggacactcctctcggctcctccccggcagcggcggcggctcggagcgggctccggggctcgggtgcagcggccagcgggcgcctggcggcgaggattacccggggaagtggttgtctcctggctggagccgcgagacgggcgctcagggcgcggggccggcggcggcgaacgagaggacggactctggcggccgggtcgttggccgcggggagcgcgggcaccgggcgagcaggccgcgtcgcgctcaccatggtcagctactgggacaccggggtcctgctgtgcgcgctgctcagctgtctgcttctcacaggatctagttcaggttcaaaattaaaagatcctgaactgagtttaaaaggcacccagcacatcatgcaagcaggccagacactgcatctccaatgcaggggggaagcagcccataaatggtctttgcctgaaatggtgagtaaggaaagcgaaaggctgagcataactaaatctgcctgtggaagaaatggcaaacaattctgcagtactttaaccttgaacacagctcaagcaaaccacactggcttctacagctgcaaatatctagctgtacctacttcaaagaagaaggaaacagaatctgcaatctatatatttattagtgatacaggtagacctttcgtagagatgtacagtgaaatccccgaaattatacacatgactgaaggaagggagctcgtcattccctgccgggttacgtcacctaacatcactgttactttaaaaaagtttccacttgacactttgatccctgatggaaaacgcataatctgggacagtagaaagggcttcatcatatcaaatgcaacgtacaaagaaatagggcttctgacctgtgaagcaacagtcaatgggcatttgtataagacaaactatctcacacatcgacaaaccaatacaatcatagatgtccaaataagcacaccacgcccagtcaaattacttagaggccatactcttgtcctcaattgtactgctaccactcccttgaacacgagagttcaaatgacctggagttaccctgatgaaaaaaataagagagcttccgtaaggcgacgaattgaccaaagcaattcccatgccaacatattctacagtgttcttactattgacaaaatgcagaacaaagacaaaggactttatacttgtcgtgtaaggagtggaccatcattcaaatctgttaacacctcagtgcatatatatgataaagcattcatcactgtgaaacatcgaaaacagcaggtgcttgaaaccgtagctggcaagcggtcttaccggctctctatgaaagtgaaggcatttccctcgccggaagttgtatggttaaaagatgggttacctgcgactgagaaatctgctcgctatttgactcgtggctactcgttaattatcaaggacgtaactgaagaggatgcagggaattatacaatcttgctgagcataaaacagtcaaatgtgtttaaaaacctcactgccactctaattgtcaatgtgaaaccccagatttacgaaaaggccgtgtcatcgtttccagacccggctctctacccactgggcagcagacaaatcctgacttgtaccgcatatggtatccctcaacctacaatcaagtggttctggcacccctgtaaccataatcattccgaagcaaggtgtgacttttgttccaataatgaagagtcctttatcctggatgctgacagcaacatgggaaacagaattgagagcatcactcagcgcatggcaataatagaaggaaagaataagatggctagcaccttggttgtggctgactctagaatttctggaatctacatttgcatagcttccaataaagttgggactgtgggaagaaacataagcttttatatcacagatgtgccaaatgggtttcatgttaacttggaaaaaatgccgacggaaggagaggacctgaaactgtcttgcacagttaacaagttcttatacagagacgttacttggattttactgcggacagttaataacagaacaatgcactacagtattagcaagcaaaaaatggccatcactaaggagcactccatcactcttaatcttaccatcatgaatgtttccctgcaagattcaggcacctatgcctgcagagccaggaatgtatacacaggggaagaaatcctccagaagaaagaaattacaatcagagatcaggaagcaccatacctcctgcgaaacctcagtgatcacacagtggccatcagcagttccaccactttagactgtcatgctaatggtgtccccgagcctcagatcacttggtttaaaaacaaccacaaaatacaacaagagcctggctctgcaaatacagcagtgaacaagaaaactgaaatctgaagaaccaaaaatctagagtaattaagtgatgcatgtatttacctgaaatacgcttcttcaagcaacaaccctgtgtgtcctgccttattcgctattatcgtgtcaattggtctaaaaatggaataaggcaaattaataaatgggcaatcaga

SEQ ID NO: 343406 - DNA, 2683 bp, Homo sapiens
atcgaggtccgcgggaggctcggagcgcgccaggcggacactcctctcggctcctccccggcagcggcggcggctcggagcgggctccggggctcgggtgcagcggccagcgggcgcctggcggcgaggattacccggggaagtggttgtctcctggctggagccgcgagacgggcgctcagggcgcggggccggcggcggcgaacgagaggacggactctggcggccgggtcgttggccgcggggagcgcgggcaccgggcgagcaggccgcgtcgcgctcaccatggtcagctactgggacaccggggtcctgctgtgcgcgctgctcagctgtctgcttctcacaggatctagttcaggttcaaaattaaaagatcctgaactgagtttaaaaggcacccagcacatcatgcaagcaggccagacactgcatctccaatgcaggggggaagcagcccataaatggtctttgcctgaaatggtgagtaaggaaagcgaaaggctgagcataactaaatctgcctgtggaagaaatggcaaacaattctgcagtactttaaccttgaacacagctcaagcaaaccacactggcttctacagctgcaaatatctagctgtacctacttcaaagaagaaggaaacagaatctgcaatctatatatttattagtgatacaggtagacctttcgtagagatgtacagtgaaatccccgaaattatacacatgactgaaggaagggagctcgtcattccctgccgggttacgtcacctaacatcactgttactttaaaaaagtttccacttgacactttgatccctgatggaaaacgcataatctgggacagtagaaagggcttcatcatatcaaatgcaacgtacaaagaaatagggcttctgacctgtgaagcaacagtcaatgggcatttgtataagacaaactatctcacacatcgacaaaccaatacaatcatagatgtccaaataagcacaccacgcccagtcaaattacttagaggccatactcttgtcctcaattgtactgctaccactcccttgaacacgagagttcaaatgacctggagttaccctgatgaaaaaaataagagagcttccgtaaggcgacgaattgaccaaagcaattcccatgccaacatattctacagtgttcttactattgacaaaatgcagaacaaagacaaaggactttatacttgtcgtgtaaggagtggaccatcattcaaatctgttaacacctcagtgcatatatatgataaagcattcatcactgtgaaacatcgaaaacagcaggtgcttgaaaccgtagctggcaagcggtcttaccggctctctatgaaagtgaaggcatttccctcgccggaagttgtatggttaaaagatgggttacctgcgactgagaaatctgctcgctatttgactcgtggctactcgttaattatcaaggacgtaactgaagaggatgcagggaattatacaatcttgctgagcataaaacagtcaaatgtgtttaaaaacctcactgccactctaattgtcaatgtgaaaccccagatttacgaaaaggccgtgtcatcgtttccagacccggctctctacccactgggcagcagacaaatcctgacttgtaccgcatatggtatccctcaacctacaatcaagtggttctggcacccctgtaaccataatcattccgaagcaaggtgtgacttttgttccaataatgaagagtcctttatcctggatgctgacagcaacatgggaaacagaattgagagcatcactcagcgcatggcaataatagaaggaaagaataagatggctagcaccttggttgtggctgactctagaatttctggaatctacatttgcatagcttccaataaagttgggactgtgggaagaaacataagcttttatatcacagatgtgccaaatgggtttcatgttaacttggaaaaaatgccgacggaaggagaggacctgaaactgtcttgcacagttaacaagttcttatacagagacgttacttggattttactgcggacagttaataacagaacaatgcactacagtattagcaagcaaaaaatggccatcactaaggagcactccatcactcttaatcttaccatcatgaatgtttccctgcaagattcaggcacctatgcctgcagagccaggaatgtatacacaggggaagaaatcctccagaagaaagaaattacaatcagagatcaggaagcaccatacctcctgcgaaacctcagtgatcacacagtggccatcagcagttccaccactttagactgtcatgctaatggtgtccccgagcctcagatcacttggtttaaaaacaaccacaaaatacaacaagagcctggtaagagacttttttttcttccatttattatttctcatctttcatcagcccccctttcccttaacagtcccgtcacctgcttccagtatgtatagacctacttgctgatagagccccaaacactgggatctggttcatgctgatagcaatgtccagtgaggaatatttgggccagttcctatgcagaccatattcctaacccatagaaagatcctgcagaatctattcagctggaagtctttaaatagtgcattcagaaagaaatgagaagagccatgtaga

SEQ ID NO: 343407 - DNA, 1537 bp, Homo sapiens
atcgaggtccgcgggaggctcggagcgcgccaggcggacactcctctcggctcctccccggcagcggcggcggctcggagcgggctccggggctcgggtgcagcggccagcgggcgcctggcggcgaggattacccggggaagtggttgtctcctggctggagccgcgagacgggcgctcagggcgcggggccggcggcggcgaacgagaggacggactctggcggccgggtcgttggccgcggggagcgcgggcaccgggcgagcaggccgcgtcgcgctcaccatggtcagctactgggacaccggggtcctgctgtgcgcgctgctcagctgtctgcttctcacaggatctagttcaggttcaaaattaaaagatcctgaactgagtttaaaaggcacccagcacatcatgcaagcaggccagacactgcatctccaatgcaggggggaagcagcccataaatggtctttgcctgaaatggtgagtaaggaaagcgaaaggctgagcataactaaatctgcctgtggaagaaatggcaaacaattctgcagtactttaaccttgaacacagctcaagcaaaccacactggcttctacagctgcaaatatctagctgtacctacttcaaagaagaaggaaacagaatctgcaatctatatatttattagtgatacaggtagacctttcgtagagatgtacagtgaaatccccgaaattatacacatgactgaaggaagggagctcgtcattccctgccgggttacgtcacctaacatcactgttactttaaaaaagtttccacttgacactttgatccctgatggaaaacgcataatctgggacagtagaaagggcttcatcatatcaaatgcaacgtacaaagaaatagggcttctgacctgtgaagcaacagtcaatgggcatttgtataagacaaactatctcacacatcgacaaaccaatacaatcatagatgtccaaataagcacaccacgcccagtcaaattacttagaggccatactcttgtcctcaattgtactgctaccactcccttgaacacgagagttcaaatgacctggagttaccctgatgaaaaaaataagagagcttccgtaaggcgacgaattgaccaaagcaattcccatgccaacatattctacagtgttcttactattgacaaaatgcagaacaaagacaaaggactttatacttgtcgtgtaaggagtggaccatcattcaaatctgttaacacctcagtgcatatatatgataaagcattcatcactgtgaaacatcgaaaacagcaggtgcttgaaaccgtagctggcaagcggtcttaccggctctctatgaaagtgaaggcatttccctcgccggaagttgtatggttaaaagatgggttacctgcgactgagaaatctgctcgctatttgactcgtggctactcgttaattatcaaggacgtaactgaagaggaggaggaattcgcccaggaggaggaggaattcgcccaggaggaggaggaattcgccc

SEQ ID NO: 343408 - DNA, 420 bp, Homo sapiens
gagctgacctatgcactgaaagatgtttaacagcatctctggcctctacaaggagtacctccaaagctatgacaacccaaaattacaatgttccctggaaagcaaaactgcccccattgagacacactgatccaagattagtagtctccaaagtgagttacatgtactcagagcaggtgctgtgaaaagactaaattctctgcttgtgttatttttattatctacttatagattttagtgaatgtataagcaataaagtctgttaccaatagggaggcagtatgaaagtgctgtggcagtaactggcaatggccttccaattgtcctctctattccacttccttaattattttacacagcaaccagataacttttttcaatataaataaaatcacgacatgccagaatttgaaatccttc

SEQ ID NO: 343409 - DNA, 233 bp, Homo sapiens
ctctagcggatccctaaaagtgcctcttctatatctacttatagattttagtgaatgtataagcaataaagtctgttaccaatagggaggcagtatgaaagtgctgtggcagtaactggcaatggccttccaattgtcctctctattccacttccttaattattttacacagcaaccagataacttttttcaatataaataaaatcacgacatgccagaatttgaaatccttc

SEQ ID NO: 343410 - DNA, 339 bp, Homo sapiens
cttaaagtttttcttctgtttcttttcctttccttctttttttgagacagagtttcactctttcacccaggccggagtgaagtggtgtgatctcagctcactgcaaccttccaccccctgggttcaagcgattcccctgctttagcctcccgagtagctgggattacaggcgtgagccattgcacccaacctcattcttttttggtcagcctcttctagctcttaactcatagttcctgggaattccttcatcagcatcctaagttctcctttcctgactacaaagggaaatagtaaagagctttttctaggttgtcactggaatattctaggcccctc

SEQ ID NO: 343411 - DNA, 275 bp, Homo sapiens
attgggtgaactggcacagtggtgtttgggagtagtagcatcctttactaacttaatcaagcccattaatacttctgcattgtaatttatcattattcatggaaattagggtaattaagactaaaatgggtccgtgtcaagttttatcactaggttttgaaaaaacttggatttcagagttttttggacttcaggattgtgagcccatcatggagaagataggactttgtactttttattttttgttttagagtttatttttttaatttactttt

SEQ ID NO: 343412 - DNA, 390 bp, Homo sapiens
cacctcagcctcccaaagagctgggattacaggcgtgagtcaccttgcctggcctgctctagttattctattttattattagttattgtttttaatctcccgtgcaaacattataaattaaaccatcataggtacatatgtataggaaaatgtatacaggatttagtactaatctagttttagacatccactgggggtcgtgaaatgtaatcctcatgaataacggcagggggattactgcagctttttgttttgttttgtttttaaactattgagctgtaaaagcaaactgtagacgatcatatttaatatacaccattgatataaagtttaaaaacagtcaacttgctaaatattgtttagggacacacacacacacacacacacaca

SEQ ID NO: 343413 - DNA, 180 bp, Homo sapiens
gtgggagtttcacttgagtccaggagctcaagaccaagctgagcaatacaagacacctctccagaaaaattaaagttaaaattttaaaattgagccaggcctggtggagcatgtctacagtcctagttactaaggaggctgaggaggcggaaggatcacttgaacccaggagtttgaggt

SEQ ID NO: 343414 - DNA, 237 bp, Homo sapiens
agtcccagctactcgggaggctgagacagcgagaatcgcttgaacatgggaggaggttgcagtgagccgagatcgtgctaatgcactccagcctaggcaacagaaggagacactgtctcaaaaacaaacaaacatacagttcaaatattccagcctccattatttgtaaatcagaaggttaaatacttcaaaagtgaagcagtagtttagtcacatttccagccaggcactttggga

SEQ ID NO: 343415 - DNA, 254 bp, Homo sapiens
ctaacatctgctttgaagtgttagtaagaaatttcaaatatactgtgatggcaatacaaatgagcaaattaatctctagtgattgtgaaattcattttaatgttcatcaggtttatgaagtcctccatgaggacttctattttgtgtcatgcagaaactcatcccattgtgctacacttgctctattataatagtggggcttaacatcactttgagctctcatcacttcacagtgttagtttttacttaccctc

SEQ ID NO: 343416 - DNA, 550 bp, Homo sapiens
cactttatagtcatactattaatttggttattttttgtgtggtaagaatacctaacatcagagcaccctcttttttgagacggagattccttcttgttgctcaggctggagtgcaatggcgcaatctcggctcactgcaacctccacttcccaggctgaggcaggagaattgcttgaacctccgggaggcggaggttgcagtgagccgagattgtgccactgcactccagcctgggtgacagagtgaaactccgtctcaaaaattaaataaaataaaataggagtttatttttgccactgagtttaaggagttgcttatatattctggatattagccccttatcaggtgtatggtttgcaaatgttttcttccattctgtagttgcgttttcactctgttaatgttttctttattcagttttaaaatggtaagccaaggcacagagctggaatgggagtggcccaggacacagctggtgaggtgcagagctggggtcccagagcctggcacctcacatggtgctatcctgctttgctgatttttcttgct

SEQ ID NO: 343417 - DNA, 393 bp, Homo sapiens
cccaaaattgtggcagcaaaaagaacacttcatatgcttaaaacccattctttttgaattagattttgattttaaatatttaagtctggtgtttgtgagaacacttttctctttgctcagtcttttcgatctggttgggtagggaaggtgttcctcatgctctctgggtggctgccttattcatagttgagagagctgttaggtaaaatctttatatgtgttggggtttttttggtagggggggtagcaggtaaaggtggcccatggctagggcagcaaagatgaataatttgaggaagcatttggttggtggactcatttgcagagaaacagtggtgacaacaaatcagagctgtttccctcaactctggctataagaggtcattctctgca

SEQ ID NO: 343418 - DNA, 1319 bp, Homo sapiens
ttgtagagatgggatctcactatgttgtccaggctggtcaaaaagacactcttcatataccaacatgggataatctccaaaatatagtgggtgaaaaaatacagataaatgtgatataagaaagacagaagaggacacatatgcatttgtgtgcagcataaaacacctctgaagttcacacaagaatctgacttctagggaggtggctgggtggagtgggagggagaattttcactgtatatccttctgaatctggatctacctgtgtatttccggtccccacagggtcagtaagggtgtttagacttagaaggttggtacatacccaatccatgcaggaagaaagagcactggatggggaggcagacggcctaactctagtcctaccttcccactgacctgacagtgatctggggcgagtcactcccctccccacctggggctcaatttccccatctgtataaggggattaaacttgatggttttcaagtcccttccagtttcatgatcggcctatgtctatgtctcagtcccaacttccagccctgttttacagaagggagggcaggcacagagaacctgttcttggctgtctcagttgtctgctgcacccatcccctccatgcacaggtttgtgaccaggatgcaccttagagtcactcgcagagcttctgaagaaacacacagccaggccccaccactgaagatgctatctctgtctcaaacaagcccagtactcatgtttttttaaaaaataacataaggtgacatttattgggtgcttactatgtgccaggcactgttccaagcacttttatagcataacttgcctcagaggtcagtagctattcacaggcacaatcatggtaaaccacagtcctggggacaggacccagatggaagcccaggcaatagggagctgaagcctgtgggctcccccagcgaggccactggaaacacagagggtttccaggcaaaaaataagtgaattctacagcttggatttcatgttttcaaacacacagtgtgatctttttttacggctaactggccaccctacagttttccaccttgccgcccactgactcactgcaacttttgagtgaaatcacccacagtctttgctcggagggcagccgtgttctgaaccacacagccctagcccttccctgcccactgggcaaggctgactggaccagggctgacacctgctatggtttgaatgtgtccccaaaagctcatgtgttgaaaacctaatccccaatgcaacagtattgagaggtgggacacattcaacacattcaattgcgctacgagca

SEQ ID NO: 343419 - DNA, 298 bp, Homo sapiens
ttgctgtatagtcataattaaaattccttattccctagtcccaacgagaagttttatagcattacacatatagaacacattcctatagtacaaaaggaaactctgttgagaattcctggggaggatcactgtaacaatataaaaatgaaataaaagacaaccaatggtgtctaattatcaaagcatcatttgcttagaagcacctctaaatcaaaagcctcacattcgctagcatcctctctctacagggctattcaggagcattcatatactgaatgtcaacaacaggaagcaaaaa

SEQ ID NO: 343420 - DNA, 339 bp, Homo sapiens
agggtaggaagactggggggtcctgtaattagcattccaggactgttttggtgtctgcaaattaggggtgacagtgggctggttatggtgggtttcttcttgaggggtaagaacaagggtctttgttaatgaaggaagcctctggctaattgtggagggtggagatgcttttgtaaaacacagtttttttattaagccgttctcacactgctataaagaaatacctgaggctgaggaatttacaaagaacagaggtttaattggctcacggttctgcaggctgtagaagcaaagacctagaatgtgcttctgatgagggcctcaggaggcttacaatca

SEQ ID NO: 343421 - DNA, 664 bp, Homo sapiens
agagagggtcttgctgtgttgtccaggctggaatgcggtggcatgatcatagctcactataattgtgaactcctgggctcaagcaatcttcctgccttgaccttccaaagtactagaattatagatgtaagctaccatgtccagcttctgtttaggtattttatactacgaagagtcaccagccgtagatcaaccactatctagccagctccagcttcctcgtccagcatataggaaactaaggcctagggaaattaagtgacttgcctctggtgaccaagctagtcagtggcagagccagaatgagaaactagtctaatgccctttctaccatcccgtagcaactttttttttttttttgagacggagtctcactctgtcgcccaggctggagtgcagtggtgcgatctcagctcactgcaacctctgcctcccaggttcaagcaattctcctgcctcagcctcccgagtagctgggattacaggcgcacaccaccatgcccggctaattttttgtatttttagtagagacagggtttcaccatgttggccaggctggcctcgaacgcctgacctcatgatccacccgccttggcctcccaaagtgctgggattacaggcatgagccaccgcgcccagcccctgtagcaacttttatgaggta

SEQ ID NO: 343422 - DNA, 178 bp, Homo sapiens
tccccagtacctaccatggtgtctggcccacatgctcaaggaaggcttactgagttaaaggacggagccatcacctggtggtctaaccaccctcaactcctgacttttctcttgccctcttctttacttttttctttctttcttttttctttttctttttctttttttttttttttgg

SEQ ID NO: 343423 - DNA, 368 bp, Homo sapiens
atttatctttgtactctcaaagtttaataattgaacaaattaacaaagcaaacaagtttctggcaggaatatctgacctaagtaagaaaaaattgcttgaaattgccctattatttatatgcagatgatttttgctagcatgatgagttcaaactattcattaaaacacatctagcaattgtaattattgtttgtatccaatggaaataaaattcagaattcaaaatatacttttctactatatttaccctatggttcaactttaaatttggttagtattttatacaaagaagtctttcagattgaatgtcttaatttgcatgcacacattttcacattcaaatttcaagaactgggagacatttcag

SEQ ID NO: 343424 - DNA, 845 bp, Homo sapiens
agagaagagagggagccagccaggcatggggaggataacaaaaggggcaatcgtcatgagccttgaaatatttctgacataccctcaaatgaccgattaatactgtttttctactcttccccttttcttattattccagtatccctagactccatgttaaaaactcttccgaatttctttaactttacaatacttcattttaaacactgtgtattagaaattatctggatggctcacagctgaaaacagaaaagacaagttaggaaacagaaaggattctatcctaaattgatctcaaattcaaaccaattttgtaaaaaattcactgaaatctgtttagatcactcaattgcatttgaaaagttcagcagtgaaattgaaaacctagacttgacagatgcatactgtgtgaaatttgatcttgatgtataagttttaagcaatgcgggagaactttgtatgatgtaattctgtagtatgtgataatatgtgctttcctccatcaaaaatgtttatgaaaatgccagagagaaggtttggaaataaaactcttcctcctccactccccaccccaatgtttttggaccccagagaggatgagatagagggatttgaaaggagaccctgtgacttccatatggccaacttgggcactggaaattctcccagaagataaacaatttctctccctcttcacacttcgtgtccaagttgcctgaaatctctctttagctttttagtgtatctgaggttttattctacaggtgtacctcattttattgtgtttgcacatagtgcattttttttttaaagttggttgtagccttgatggaagcgtcgcgcat

SEQ ID NO: 343425 - DNA, 184 bp, Homo sapiens
ctttcttttctttcctttctttcttttctttctctttctttcttcctttcttttctttctttctctttcttcctttcttccttttttttcgggtcgggctccatctatctatctttctttcttttcgggtctggcttctttctttcttttcttttctttctctttctttctttttttttcaggg

SEQ ID NO: 343426 - DNA, 450 bp, Homo sapiens
gtaaagcagctacggcttagaaaggctgaggaacttgcctgaggctatccagctactgagagataaactggggtgtgaattcagagagcttgactcctgaggctccacctgtgcctataattccagcatgacacctgacatgtgccttgggagctttgagctgacatgttagaagtcagtctacattgaagctgccatgctgaagaactcatgtgggagaacacacagaaatcgagatgcctgaggagccccagctgtaccagcctctagctctctgagtcttctcagcaagaactgtcaaacatgagagtgaagcagccttcagatgactctggccccagtcttcaagtgccctagctggtgccaagtggagcagacaagctgccacccaccaagcccttcccaaattgcagactaggaacaaaataaatgttattttaagccactaaa

SEQ ID NO: 343427 - DNA, 401 bp, Homo sapiens
aactagtagaattcagtagatgtgacactgcatgactctccatgctaggttcacaagtgatgcggtttctgcctttttcttctctctgacatgtgccttgggagctttgagctgacatgttagaagtcagtctacattgaagctgccatgctgaagaactcatgtgggagaacacacagaaatcgagatgcctgaggagccccagctgtaccagcctctagctctctgagtcttctcagcaagaactgtcaaacatgagagtgaagcagccttcagatgactctggccccagtcttcaagtgccctagctggtgccaagtggagcagacaagctgccacccaccaagcccttcccaaattgcagactaggaacaaaataaatgttattttaagccactaaa

SEQ ID NO: 343428 - DNA, 592 bp, Homo sapiens
gtaaagcagctacggcttagaaaggctgaggaacttgcctgaggctatccagctactgagagataaactggggtgtgaattcagagagcttgactcctgaggctccacctgtgcctataattccagcatgacacctgacatgtgccttgggagctttgagctgacatgttagaagtcagtctacattgaagctgccatgctgaagaactcatgtgggagaacacacagaaatcgagatgcctgaggagccccagctgtaccagcctctagctctctgagtcttctcagcaagaactgtcaaacatgagagtgaagcagccttcagatgactctggccccagtcttcaagtgccctagctggtgccaagtggagcagacaagctgccacccaccaagcccttcccaaattgcagactaggaacaaaataaatgttattttaagccactaaattttggtttgttatatattatagcaatagaaaaccagaacccctttttttaatgccactgttagttggatattctgttacttgcagccaaaagcatccttatgtgaaatacttagtagtagagaagattaaaagaaatcact

SEQ ID NO: 343429 - DNA, 262 bp, Homo sapiens
gtaaagcagctacggcttagaaaggctgaggaacttgcctgaggctatccagctactgagagataaactggggtgtgaattcagagagcttgactcctgaggctccacctgtgcctataattccagcatgacacctggtaatgggcactcagtatatgcttgttgatctaaactcagtgtgtgtgtgtgtgtctgtgtgtgtctgtgtgtgtgtgtgtgtgtggtcttcctctcacatccaaagctactagcactgaggaag

SEQ ID NO: 343430 - DNA, 630 bp, Homo sapiens
  misc_feature (9)..(9): n is a, c, g, or t
gcttcctgncctgctgtcgctatgttaacgtacgttatggtagaaccgactagtcggttctaccatatagagatttttgttccttgctccttagggtttgaaagaaaagttcagtgttgagagctggacttcagggataggggtaggcaagagtagagttgaatgctgtttgtatttagaatttcaacaattttagttaaaaaaaaaaacattcctttggatgctagtatatggtaagaagtacaacgaattcaaaaacattcctgtataatcacatgaagactataggtcagtggtgcagagctcagcatgtcgtctgtgtcatgacaattttgttcttttcacttcttaatagccaatttaattttgcagcaaaatgtgtccaatgttgaattttccaggttctctaaagtatgtctcgtgcaaagatagctctgacattagggtccttttcagtggtccagttgggtggccatgttgctggagtgggaggggagtgggatttaactttaggccttgtgttagcaaaagtattactctttgtttgtttgccatgtaggcagtccaacctcccctgaaatagaaatgactagtaatgatttgtttcttgtcagtatgaggtagaccaca

SEQ ID NO: 343431 - DNA, 296 bp, Homo sapiens
cttttatattgctgattcagttagggcaccccaattcaaagacacaatgcagcatgtaaatgcatctacttaaagtgtatgtgtgtgtgtgtgtgtgtgtgtgtgtgtgtgtgtgtgtggtgggggggtagtgtgtgtgtgtgtgtgtgtatatatatatatatatattactagtccattggagatacaacaaactcaccaatatgtaccggcatcaaacaaatttattacactcctgtatgtcagagtatgatgtgtatctcactgagctaaaatccacgtggtgaaaaggctaa

SEQ ID NO: 343432 - DNA, 1352 bp, Homo sapiens
gatgtaagaagtgtctttcgcctcctgccatgattctgaggtctccccagccatgtggaactgggaagaatggaaggcaacgcctccgaattaaattttgggacccccagtaaaatttcaggaaagcccagaattgatctgagaatgcacaaactcggcatgtctttgacagagaaggctctgggatttcagcgcgttcattgccctccactaaggagctgctcagcaaaggggcttccctctgctctgctctcgggttcggaatccggagcgagtttccagtgagcggcgcccgctgagcgagtgggaaagcatcgcgcgtgcctttccccgcgcgcgtctgcggatcagcgcaggcgaggtgggtgggaatgcagatgtgaggctggaggcagtagagccatctcgcaatcatgcagcaacaagcaaggcagagctggcatgttgttgactgataacatcgagaagctgctatattaatcctggactgccaatctctgaacttcttggtatattgggaacataaactcttttggttaggcactgcgtcagatttctactacatgcagccaaatgcaatctagattgaaatacccctttacctaagttagctttagctgttctcacaacttgctgtttgtgctccacccacagcatatgagatcccttttgcccacagcaccctccctcagtgtgatgtcgtcccccaaccagtatttgcaggttttttgttttttttttttaatcacaaaactgctctcagtctgccaaatctgttggccctagagccagaagtgctatctcctgggaattttttttttttttgagacaggatcttgctgtcatccaggctggagggcagtggcacacactcctgggctcaagcgatcctcctgcttcagccttccgagtggttgggactataggtgagtgccaccactcccagctaattgtttttattttttgtagagatggggatgggcagggatcttactttttgcccaggctggtcttgaactcctggactcaagccatcctcctgccttgatctctcaaagtgctgggattacaggcatgagccaccatgcccggcctgggatctattcttaacccttgccctagtcagggtggtcttcctgcaggattaagagttagactctgagactctgatatcacaccctggcttggccttcccttccctgtcctacctccccaccctgctaccagtttcttctggagatatttcctgatagactacagtagtcctcccttacctgaggtttaactttctgcagtttcagttattggcagtcaacttaggtctgaaaatactaaataaaatatccagaaat

SEQ ID NO: 343433 - DNA, 1159 bp, Homo sapiens
gatgtaagaagtgtctttcgcctcctgccatgattctgaggtctccccagccatgtggaactgggaagaatggaaggcaacgcctccgaattaaattttgggacccccagtaaaatttcaggaaagcccagaattgatctgagaatgcacaaactcggcatgtctttgacagagaaggctctgggatttcagcgcgttcattgccctccactaaggagctgctcagcaaaggggcttccctctgctctgctctcgggttcggaatccggagcgagtttccagtgagcggcgcccgctgagcgagtgggaaagcatcgcgcgtgcctttccccgcgcgcgtctgcggatcagcgcaggcgaggtgggtgggaatgcagatgtgaggctggaggcagtagagccatctcgcaatcatgcagcaacaagcaaggcagagctggcatgttgttgactgataacatcgagaagctgctatattaatcctggactgccaatctctgaacttcttgagatgggtcttgctctgtcacccaggctggagtgcagtggcaggattgcagctcactggagcctccaaatcctggcctcaagcgatcctcccgcctcagcctcctgagtatctgggactacaggtgtgcaccaccacactaggctatttattatttttgttattattttgtaaagatagggtctcaccatcttgctcaggctggtcttaaactcctgggctcaagcgatgctccccctgtggcccctcaaagtgcaaagaaaacttaacagctttatccacagtgttattttcttttctcttgatgctgtgaattatccccttgatgtcagtgaagctggggttgttttgaaagacttaaatcaatacttccattgagaaaattggaccttgctggctaaagatgaaaagctggaaccctttccaacagctcacttctgtgggctgagatcaggggcagatggctcagtgtcccttgaggtgatttgattacccgtcacggccggacgcctggtctgggtacgtgaagagaagcacagacaggcagctgtagttacactgtttaaaaaagcagaggtactttttcaattcaatgacaggaaggcaaaatacccctacaggtttgaaggaaaaataatttttttcaaaatg

SEQ ID NO: 343434 - DNA, 340 bp, Homo sapiens
tcaaactcctgatctcaggtgatctgcctgcctcggcctcccaaagtgctgggattacaagcgtgatccaccacgcccggcctccattgctttctgttcccagtccccgacacacacatctaaaaaggcaagttcgacgagagccaggatttttatctgtcccgtttctggttgtatccctgacacctagaacagatgagagttcttgacacagagtatgaactccataaatatttttaggccgagcatggtggttcacgcctgtagtcccagcactttgggaggccaaggagggaggattgcttgaccccaggagtttaagacctgcctgggcaacata

SEQ ID NO: 343435 - DNA, 239 bp, Homo sapiens
ttccagtgctaatgtttactttggatatataatgtcaaattttgtttttctgtaagatttttaaaaagcataaaacagttactcttaattttggatggagtcatttccagtcccttctgaaataaggcagattatgaataagtaaatggaaactattgggccaattttaggatttctctgtaactaccctgcttgataatttttatatccacttatagtcaagaatgtagtatcttttt

SEQ ID NO: 343436 - DNA, 447 bp, Homo sapiens
ggaggtggaggttgcagtgagctgagatcacgtcactgcactccagcctaggcgacagaatgagactccgtctcaaaaaaacaaaacaaaacaaaaaggcgagcaagaaagagaagggagactcccaggtttctgacttaagcaactgtgtggctggtggtgccattcacagtggtggcgattcaaggaaaggacttggtgtcgttggggagaaaagctttggttttgaggtgtccaagagacctcatgtggagatgcccagcacatggtagatatccgagtctggcactcaggagagaagtctgaggtagagattaggagttactggcagatggcagaaattgaaaccacaggagaggatgagagcatggagagagaatggaaaagggcccaaggcactgcctgcttcctgggaagggccaacgtgaaccttctgtggaagcatga

SEQ ID NO: 343437 - DNA, 696 bp, Homo sapiens
  misc_feature (137)..(137): n is a, c, g, or t
ctttgtggaatttgtaccggaaacatttcccacagaaacagttatgacaatgattcgccaagctggaatttaactccatttaaggggacaaaacttgagcttcccgcggtgcggcccgctctaacctagtggatccnccggctcgagctcctgtcagcctggtgtcaaactcctgggctcaagtgatcctcctgccttggcctcccagggtgctggggttataggcatgagccactgcattgggtatgcacggaacacatcacttgcagtttaggcacatctcaatatgagaataacttacatcctctgttaaacccagttggggtgagataaacacagcctccttactgcacattcggtacaatgtgccagtgtcttatgtgcttcctgtatataatctcacttaatactgaaaagaagtcttggccaggcatggtggctcacgcctgtaatcctagcactttgtgaggccaaggtgggcggatcatgaggtcaggagttcaagaccagcctggccaacatggtgaaaccccgtctctaataaaaatacaaaaattggccaggtgtggtggtgcacgcctggggtcccggctgctcgggaggctgaggcaggagaatcactgaaccgggacccgggaggcagaggttgcagtgagccgagatcacgcggctgcactctgggctgcagagcgagac

SEQ ID NO: 343438 - DNA, 689 bp, Homo sapiens
  misc_feature (1)..(1): n is a, c, g, or t
nggttcctcttaacacaggggctgcataatcctccctgtctccaccctctctaacaagaggtgccagccacaataaagcagttggggcaaaatcccccctcccaaataatgcatggattagtaatgcccaagaatatatgtccgactcaaaaaaaataacatctgtgtgctattacccacatttatataagccccaaagggggaataaagtgaaaattaaaatagcatactagcgtaggtgccaatagtacactactagcacttaagtactagccccatataagaattgcctgcatcctctgttaaacccagttggggtgagataaacacagcctccttactgcacattcggtacaatgtgccagtgtcttatgtgcttcctgtatataatctcacttaatactgaaaagaagtcttggccaggcatggtggctcacgcctgtaatcctagcactttgtgaggccaaggtgggcggatcatgaggtcaggagttcaagaccagcctggccaacatggtgaaaccccgtctctaataaaaatacaaaaattggccaggtgtggtggtgcacgcctggggtcccggctgctcgggaggctgaggcaggagaatcactgaaccgggacccgggaggcagaggttgcagtgagccgagatcacgcggctgcactctgggctgcagagcgagac

SEQ ID NO: 343439 - DNA, 226 bp, Homo sapiens
tgctgattgcatgtgtctaacttaaaaaccaagagacctagggcatgataacagctcattgcagcctcaattctctcaggctccagtgatcctcctacttcagcttctcgagtagctgggaccacaggtacacaccaccatgcctggctaatttttttttttttttaagtagacacggggtttcaccatgttggccaggctcgagctcctgtcagcctggtgtcaa

SEQ ID NO: 343440 - DNA, 367 bp, Homo sapiens
ttgaaaagataacttgaactttctgtatatcagtttcctcatctgaaaatgataagatattcttactttgaagaactgtgaatacaatttgagataatttatgcaaactgcatagtacaatgcttggtacctagcacatagataaaattcaataaatatagttaatgtgataatgaagatgatgatgacagtagtggtgatgactatgatgataactacaataaattttgtttgctttcattcccatctctctattttatttcatttgttcgttacacaatttgaaagtggaagcatttcccaagcatgaattttatgtcaagtattatgttaggtgttgggcatataatatctaataaaacattat

SEQ ID NO: 343441 - DNA, 368 bp, Homo sapiens
ctcccaaagtgctgggattacaggcgtgagccactgcgctcagccaggtgtcaattttctttttggatttcaacactgagtccatagtaccctgctgaagaagccccagagcctgggttctcccctgataactctctagggcagctaagttaatccttcagtggactctgctgtccaactctcaaccttttctctagcagaagccagagagagaggacataggaaaggggaggaagcaagagggcggaggcttgaggggagagcactggggctgtgctgcatcattcaggtgaactgcgaggtatgcaacatgcaactggatacagggctcaagccactggaggcccacgctgtgagtgagcctgcct

SEQ ID NO: 343442 - DNA, 412 bp, Homo sapiens
tatatactcattaaagaaaccactttccaactcattcttggtttgggaattttatttcaaggcttctcctgtaaacctgggaaaagctcttaggtcactggtgagaggactttcctaactgactacagataactctgtgagctaactgtgagttagagagctttacatagccttcaccctagaaaaaaaatggttctcacctgctcataactaaatgtagtaatttgtaccaacaacaagttgagtttcttgctgcgcatctgctacttttccataagtctcatttgtttttgtcttcaaggctttggtttaacctttccagcgctctcctgtatttctggagtggcgggtttggcctcagatgagcctccaggtttcattttggttgatatgccattcttgactggggtct

SEQ ID NO: 343443 - DNA, 551 bp, Homo sapiens
ccatcagcttcctcatagaaaccggcaccctgctccatttcccggacaccagccacggcctgaggaacctctacttcctcgaccctatttggctctccgaatgtctgcagaggatctttaatattaagggctctcggtcagtggccaagaatggggtgatcagagcagaagacctcaggatgctgctggtggggactggcttcacgcagcagacggaagagcagtacttccagttcctggccaagtttgagatcgccctgcccgtcgccaatgacagctacctcctgccccatctccttccatctaaacctggcctggacacccacggtatgcggcaccccacagccaacaccattcagagggtatttaagatgagcttcgttcccgttggcttctggcaaaggtttatagcacggatgctgatcagcctggcggagatggacctgcagctttttgaaaacaagaagaatactaaaagcaggaacaggaaagtcaccatttacagttttacaggaaaccagagaagtcgctgtagcacattcagagtgaaa

SEQ ID NO: 343444 - DNA, 588 bp, Homo sapiens
ccatcagcttcctcatagaaaccggcaccctgctccatttcccggacaccagccacggcctgaggaacctctacttcctcgaccctatttggctctccgaatgtctgcagaggatctttaatattaagggctctcggtcagtggccaagaatggggtgatcagagcagaagacctcaggatgctgctggtggggactggcttcacgcagcagacggaagagcagtacttccagttcctggccaagtttgagatcgccctgcccgtcgccaatgacaggtgaggacacaacttaacacgccaggctgtgcaggttgctccccgaaagagggagttggggtctggagccactggtggcctgaacaagatttccagggatcagtgctgccactgctgccccctacggacaggccagcacccgatgacctgcctgccgggcctgggtcagcaggacagtgagcacggctggccgctccctcctgtgccacgggcttctctgttcagggagttaaaagaaatccacttattgaaaaggtgtaggaaaacatggaaggatgtcattaaaaataatttgtgggaatttcacttta

SEQ ID NO: 343445 - DNA, 272 bp, Homo sapiens
acatacaatggctcttaaagctttcactcagtcatgttgtatgtcacatcagctcacatgtcagtggccaaagcaagtcatatggtcagagctcactgtcagtggggtaaggatgtatagtccttccacaggtggcattgcaagttgcatgataacagataaggctgtataatcctcttaaggaaagtggaggttaaataatttggaacaataaataatatagtctacatcaacaagttcagtaaatgcttgttaaatgggttatttggagt

SEQ ID NO: 343446 - DNA, 335 bp, Homo sapiens
tccatttgctctagatgtttctaaaatgcttagtctcaagttccatatgtatcttgttgcagagcagcaacaatttgaggatatggttaattttatgtgtcaactcaactgggccaggtggtacccaaatatgtgatcaaacatcattttgggtgtttttttttaaaggtgtttttggatgaggttaacatttaaattggtagacagagtaaagcaggtgtcctcccctggtgtgggttggctacctcccattagttgaaggcatgagtagaacaaaaatgctgaccatcttccacattcaagagaactcatcttgcctgacagccattgaattg

SEQ ID NO: 343447 - DNA, 617 bp, Homo sapiens
caattctcctgcctcggcctcccaagtaggtgggattacaggtgggcaccaccacacccagctaatttttgtatttttagtagagatgagatttcaccatgtcgcccaggcggctggagttgaactcctgacctcaagcgatccacccacctcggcctcccaaagtgctgggattacaggtgtgatccaccacgcccagccccagagtgatttctgaaaggctaatttgattgttactcccttgcttagaaacctttaaactccacccttgcatcctctctaatctctgtcatttctgtattatgtaagagctcctttaatgtgctgtgatgtgttaggcctcagtgctttcaaacattctgtttcctcctttgcaatattgaatcccacctccacccctaatgtggccagactgctgcttatctttcaaaacccaacttgaggattacttcatttcttgcttttcattttggctttttgtgctgtatcacaattcttttatcacatttgtctttttaatagactgcccttcaagacaatagagatagatcagtaatattcttacatgtcttatttccattgcctactatgatgtcttgacccagagagcactcagt

SEQ ID NO: 343448 - DNA, 597 bp, Homo sapiens
ttcaaatgatagctcttcattcttcctggctgtgttagaactctttaagttatggacggaagcaacccaactctaattggggtaaagagagaatgtgtgggaaggatactgaggtattttatgtaaccatgaaaagaacaggtacagccggaaccaggaggttttagagcaggtaacttccctaccagcccccaaatttcagtggctcaataaaaatgaagtttatttcttgtgtgtacagcagttcaacatggttattcctggctaagctgcctttaatgtttcgggcacccaggctccttccatcttgtgactcctctgttcttagagctttctccttttaacctgcagatggagaaggagatggaaggatctcacatggaaggattccatgggccaggtctgaaagtggcttatatcacttctgtcctcaatctattgattataatttagtttgtgaccccataatttagttgtgacccagtaacaactgagaaaggcctgtttgcccaggaagaaaacaaaataggtttggtgagcacctagctagtttgaaccgcggtgcgcgtggggtcctctagataagcctagcacaac

SEQ ID NO: 343449 - DNA, 347 bp, Homo sapiens
gtgaaaaatgctgtatttagaaaagtatctggcgtcacttaaaataattaacagcttaatttctaacctggaaattcagaaagtccaataatgggctttgtgtgtgctgtgggaaaatatacaactgattatggctaatgacctttttaaaatgacattttctatttgtctgaaattcattactaatcccaaaattaatagaagtcaggttagcacagaattaagatctgggaattcagatggaaaaggctcacattaggcttagatttcaagagagcaacattcaagataataaattgagactgttctagaaaaccctttataaagggaagcaaaaatataggaat

SEQ ID NO: 343450 - DNA, 635 bp, Homo sapiens
tgctggaaattttattttggaattgtttaatagagaaagacaataaataatgttcaagaacagacattgattcataacatcaaagtatattgtgagaagatggtatttcagaatagaggaagaatttcttatgtgctggtaagattgtagataatcatttctgcataattttcatagctggattgctttaataaagccatttaaaggttaagttctagattgcttcatgttgcttatcaatgttttaaagctaaaatagaaaattagctgttaagttggctcaaccggaaattcagtatatcctttaaaaagagaaatttagtaagcagtgtgtctaaagaatgacatatggttgggtacagtggctcgtgactgcaatcccaacactgtgaggctgaagtgggaggatcacttgagcccaggaatttgagaccagcctggaaaacagtgagacctgcatctctacaaaaaaacaaaaaattacccaggcatggtggtacacaccttgtggtcccagttgcttgggaggctgaggtgggagaatcacttgagcctgggagatcaaggctgcattgaagtctcatcacgccactgcactcgagcctgggtgacagagcaagaccctatctcaaaaa

SEQ ID NO: 343451 - DNA, 1270 bp, Homo sapiens
agagatgccggaatctcgcgagagctcccgggggccgttgggtagcgtcttcgctgttgcccttagggacggctgtgggcctgctgggggtgggggcccgaagcgccagagatggctgctcagcgagggatgcccagctccgccgtgagggtcctggaagaggcgttgggcatgggtttgacggcagccggggacgcgagggacacggcggacgcggtggcggctgagggcgcctactacctggaacaggtcaccataactgaagcatctgaagatgactatgaatatgaagagataccagatgacaattttagcatcccagaaggtgaagaagatctggcaaaagcaattcagatggcccaagaacaggctacagatactgaaattttggaacggaaaacagttcttccttcaaagcatgcagtacctgaagtaatagaagactttctctgcaatttcttgatcaaaatgggaatgaccagaactcttgattgctttcagtctgaatggtatgagttaatacagaaaggagtgactgaacttagaactgttgggaatgttccagatgtctacacccagattatgcttttggaaaatgagaacaaaaatttaaagaaagatttgaagcactacaaacaagcagctgagtatgttattttttaaatgacattttcttctttttcttttggactaaataaaagagttgagtgaagctgatatatgtaatataccagagccttaatttttgaaaactgaatttttctagttgtaaagaatgtgagaggcttcattagcaaattaattaaacagatgatcagaactatcacaattataacttaccaacaagaagggaatgcaggtagttgtttaggagatggtacattttttatataacattcacttccttgtgtatttgatagtcttttcatggtttataacattttctcctgtaaagataggctaatttctgaaataataattaaatttatagaaagccgagaggaaattgctagtttattcctggtagaggaatttctgtatttgaaaattctccagaaggaataatataaactgtggactttgggtgataatgatatgtaggttcgtcagttgttaacaaatgtatccctctgttgggggctattgataatggggaaggctgtgcatgtgtgggagtaggaggtgtatgggacatctctgtaccttctaatcaattttgctatgaacttaaaactgctctaaaaataaagtttattaaaaaaaagttaat

SEQ ID NO: 343452 - DNA, 869 bp, Homo sapiens
agagatgccggaatctcgcgagagctcccgggggccgttgggtagcgtcttcgctgttgcccttagggacggctgtgggcctgctgggggtgggggcccgaagcgccagagatggctgctcagcgagggatgcccagctccgccgtgagggtcctggaagaggcgttgggcatgggtttgacggcagccggggacgcgagggacacggcggacgcggtggcggctgagggcgcctactacctggaacaggtcaccataactgaagcatctgaagatgactatgaatatgaagagataccagatgacaattttagcatcccagaaggtgaagaagatctggcaaaagcaattcagatggcccaagaacaggctacagatactgaaattttggtatgagttaatacagaaaggagtgactgaacttagaactgttgggaatgttccagatgtctacacccagattatgcttttggaaaatgagaacaaaaatttaaagaaagatttgaagcactacaaacaagcagctgacaaagctagagaagatttgctgaaaattcagaaagaacgtgattttcatcgaatgcatcataagcgaatagtccaggaaaaaaacaaattaattaatgacctcaaagggttgaagttacattatgcatcttatgaaccgactataagggtgttacatgagaaacaccacactttactgaaggagaaaatgctgacctccttggaaagagacaaagtagttgggcagatttctggacttcaagaaacattgaagaaactgcaaagaggacatagttaccatggtcctcaaattaaagttgatcatagtcgtgaaaaagaaaatgcaccagaaggtcctactc

SEQ ID NO: 343453 - DNA, 1445 bp, Homo sapiens
agagatgccggaatctcgcgagagctcccgggggccgttgggtagcgtcttcgctgttgcccttagggacggctgtgggcctgctgggggtgggggcccgaagcgccagagatggctgctcagcgagggatgcccagctccgccgtgagggtcctggaagaggcgttgggcatgggtttgacggcagccggggacgcgagggacacggcggacgcggtggcggctgagggcgcctactacctggaaccttatctatatccagtgcccttgctactgaatgattaaaacttgacaagatattcagaggtcaccataactgaagcatctgaagatgactatgaatatgaagagataaaagcagttgcccacaaactaatcctgaatttattagaagtgacgtttattgacatttacaaggaagtcagaagaaagcagttattcatttttcatggatcttcagaatgacatgataccagatgacaattttagcatcccagaaggtgaagaagatctggcaaaagcaattcagatggcccaagaacaggctacagatactgaaattttggaacggaaaacagttcttccttcaaagcatgcagtacctgaagtaatagaagactttctctgcaatttcttgatcaaaatgggaatgaccagaactcttgattgctttcagtctgaatggtatgagttaatacagaaaggagtgactgaacttagaactgttgggaatgttccagatgtctacacccagattatgcttttggaaaatgagaacaaaaatttaaagaaagatttgaagcactacaaacaagcagctgagtatgttattttttaaatgacattttcttctttttcttttggactaaataaaagagttgagtgaagctgatatatgtaatataccagagccttaatttttgaaaactgaatttttctagttgtaaagaatgtgagaggcttcattagcaaattaattaaacagatgatcagaactatcacaattataacttaccaacaagaagggaatgcaggtagttgtttaggagatggtacattttttatataacattcacttccttgtgtatttgatagtcttttcatggtttataacattttctcctgtaaagataggctaatttctgaaataataattaaatttatagaaagccgagaggaaattgctagtttattcctggtagaggaatttctgtatttgaaaattctccagaaggaataatataaactgtggactttgggtgataatgatatgtaggttcgtcagttgttaacaaatgtatccctctgttgggggctattgataatggggaaggctgtgcatgtgtgggagtaggaggtgtatgggacatctctgtaccttctaatcaattttgctatgaacttaaaactgctctaaaaataaagtttattaaaaaaaagttaat

SEQ ID NO: 343454 - DNA, 1095 bp, Homo sapiens
agagatgccggaatctcgcgagagctcccgggggccgttgggtagcgtcttcgctgttgcccttagggacggctgtgggcctgctgggggtgggggcccgaagcgccagagatggctgctcagcgagggatgcccagctccgccgtgagggtcctggaagaggcgttgggcatgggtttgacggcagccggggacgcgagggacacggcggacgcggtggcggctgagggcgcctactacctggaacaggtcaccataactgaagcatctgaagatgactatgaatatgaagagataccagatgacaattttagcatcccagaaggtgaagaagatctggcaaaagcaattcagatggcccaagaacaggctacagatactgaaattttggaacggaaaacagttcttccttcaaagcatgcagtacctgaagtaatagaagactttctctgcaatttcttgatcaaaatgggaatgaccagaactcttgattgctttcagtctgaatggtatgagttaatacagaaaggagtgactgaacttagaactgttgggaatgttccagatgtctacacccagattatgcttttggaaaatgagaacaaaaatttaaagaaagatttgaagcactacaaacaagcagctgacaaagctagagaagatttgctgaaaattcagaaagaacgtgattttcatcgaatgcatcataagcgaatagtccaggaaaaaaacaaattaattaatgacctcaaagggttgaagttacattatgcatcttatgaaccgactataagggtgttacatgagaaacaccacactttactgaaggagaaaatgctgacctccttggaaagagacaaagtagttgggcagatttctggacttcaagaaacattgaagaaactgcaaagaggacatagttaccatggtcctcaaattaaaggtaaatgtaaaatgtgatgaagctctcatttaatatagtttggtgatttctcaaccttatcagtgattaatattctagagatatttaaaagtgagtaagtggtggctatttcacaaattaaaattttaataaaaagattaagaaaaaatata

SEQ ID NO: 343455 - DNA, 410 bp, Homo sapiens
catgatggtattggtacctagaagtcatattttattctaaaatatattatgactgttggacattttaacttataaatgtaatactgcaactaattactataacactccctgagacttaactttttgaattgtacataaattaagccaatttggcagaaagaaatgatataaacccttttgtttgattttatcctaggtatgagttaatacagaaaggagtgactgaacttagaactgttgggaatgttccagatgtctacacccagattatgcttttggaaaatgagaacaaaaatttaaagaaagatttgaagcactacaaacaagcagctgagtatgttattttttaaatgacattttcttctttttcttttggactaaataaaagagttgagtgaagctgatatatg

SEQ ID NO: 343456 - DNA, 315 bp, Homo sapiens
ttctctttctctgtgatctagataccagatgacaattttagcatcccagaaggtgaagaagatctggcaaaagcaattcagatggcccaagaacaggctacagatactgaaattttggtgagaatttgaacactagtgtagtctatagtttagtggtagtgctttttatatgaagtttggaaagtcttttaaatgtaaatactagtgtagctcagtcatctgttatatcattttcatctctgtttatttgtgatcaagccttcactttaaggtaagcagtcatatttactcttttttggattgccattctccaca

SEQ ID NO: 343457 - DNA, 325 bp, Homo sapiens
tgagttttattttttaataaacgagagattttcagttgctagtagttctgaaaaagtgatggtggaaagcacttgagatggggcaagaatggtgatatttagatagccttattattttttcagcagaattgttagattacattttctattatagataaaagcagttgcccacaaactaatcctgaatttattagaagtgacgtttattgacatttacaaggaagtcagaagaaagcagttattcatttttcatggatcttcagaatgacatggtattttacataaagtatttctttgatcctttgatttgtgaagcaaaattatt

SEQ ID NO: 343458 - DNA, 1458 bp, Homo sapiens
agagatgccggaatctcgcgagagctcccgggggccgttgggtagcgtcttcgctgttgcccttagggacggctgtgggcctgctgggggtgggggcccgaagcgccagagatggctgctcagcgagggatgcccagctccgccgtgagggtcctggaagaggcgttgggcatgggtttgacggcagccggggacgcgagggacacggcggacgcggtggcggctgagggcgcctactacctggaacaggtcaccataactgaagcatctgaagatgactatgaatatgaagagataaaagcagttgcccacaaactaatcctgaatttattagaagtgacgtttattgacatttacaaggaagtcagaagaaagcagttattcatttttcatggatcttcagaatgacatgataccagatgacaattttagcatcccagaaggtgaagaagatctggcaaaagcaattcagatggcccaagaacaggctacagatactgaaattttgcacctttcatggtacctggtacatgggagatgttcaccaattatatgttgaataaatatcctacgtaaaggaacggaaaacagttcttccttcaaagcatgcagtacctgaagtaatagaagactttctctgcaatttcttgatcaaaatgggaatgaccagaactcttgattgctttcagtctgaatggtatgagttaatacagaaaggagtgactgaacttagaactgttgggaatgttccagatgtctacacccagattatgcttttggaaaatgagaacaaaaatttaaagaaagatttgaagcactacaaacaagcagctgagtatgttattttttaaatgacattttcttctttttcttttggactaaataaaagagttgagtgaagctgatatatgtaatataccagagccttaatttttgaaaactgaatttttctagttgtaaagaatgtgagaggcttcattagcaaattaattaaacagatgatcagaactatcacaattataacttaccaacaagaagggaatgcaggtagttgtttaggagatggtacattttttatataacattcacttccttgtgtatttgatagtcttttcatggtttataacattttctcctgtaaagataggctaatttctgaaataataattaaatttatagaaagccgagaggaaattgctagtttattcctggtagaggaatttctgtatttgaaaattctccagaaggaataatataaactgtggactttgggtgataatgatatgtaggttcgtcagttgttaacaaatgtatccctctgttgggggctattgataatggggaaggctgtgcatgtgtgggagtaggaggtgtatgggacatctctgtaccttctaatcaattttgctatgaacttaaaactgctctaaaaataaagtttattaaaaaaaagttaat

SEQ ID NO: 343459 - DNA, 802 bp, Homo sapiens
agagatgccggaatctcgcgagagctcccgggggccgttgggtagcgtcttcgctgttgcccttagggacggctgtgggcctgctgggggtgggggcccgaagcgccagagatggctgctcagcgagggatgcccagctccgccgtgagggtcctggaagaggcgttgggcatgggtttgacggcagccggggacgcgagggacacggcggacgcggtggcggctgagggcgcctactacctggaacaggtcaccataactgaagcatctgaagatgactatgaatatgaagagataccagatgacaattttagcatcccagaaggtgaagaagatctggcaaaagcaattcagatggcccaagaacaggctacagatactgaaattttgcaaagctagagaagatttgctgaaaattcagaaagaacgtgattttcatcgaatgcatcataagcgaatagtccaggaaaaaaacaaattaattaatgacctcaaagggttgaagttacattatgcatcttatgaaccgactataagggtgttacatgagaaacaccacactttactgaaggagaaaatgctgacctccttggaaagagacaaagtagttgggcagatttctggacttcaagaaacattgaagaaactgcaaagaggacatagttaccatggtcctcaaattaaagttgcttcaaagagaataaaatacctaagaatccaacttacaaaggatgtgaaggacgtcttcaaggagaactacaaaccactgctcaatgaagtaaaagaggacacaaacaaatgg

SEQ ID NO: 343460 - DNA, 1035 bp, Homo sapiens
agagatgccggaatctcgcgagagctcccgggggccgttgggtagcgtcttcgctgttgcccttagggacggctgtgggcctgctgggggtgggggcccgaagcgccagagatggctgctcagcgagggatgcccagctccgccgtgagggtcctggaagaggcgttgggcatgggtttgacggcagccggggacgcgagggacacggcggacgcggtggcggctgagggcgcctactacctggaaccttatctatatccagtgcccttgctactgaatgattaaaacttgacaagatattcagaggtcaccataactgaagcatctgaagatgactatgaatatgaagagataaaagcagttgcccacaaactaatcctgaatttattagaagtgacgtttattgacatttacaaggaagtcagaagaaagcagttattcatttttcatggatcttcagaatgacatgataccagatgacaattttagcatcccagaaggtgaagaagatctggcaaaagcaattcagatggcccaagaacaggctacagatactgaaattttggaacggaaaacagttcttccttcaaagcatgcagtacctgaagtaatagaagactttctctgcaatttcttgatcaaaatgggaatgaccagaactcttgattgctttcagtctgaatggtatgagttaatacagaaaggagtgactgaacttagaactgttgggaatgttccagatgtctacacccagattatgcttttggaaaatgagaacaaaaatttaaagaaagatttgaagcactacaaacaagcagctgacaaagctagagaagatttgctgaaaattcagaaagaacgtgattttcatcgaatgcatcataagcgaatagtccaggaaaaaaacaaattaattaatgacctcaaaggatttctggacttcaagaaacattgaagaaactgcaaagaggacatagttaccatggtcctcaaattaaagagtccagcctgggcgacagagcgaggctccgtctc

SEQ ID NO: 343461 - DNA, 252 bp, Homo sapiens
gaggaggtgatgtaaaaaccgaagcagaacttagagtaatgtggccataaagccaagagatgctggcagcctctagagaaggaaggatccacccctgcaggctacagagggaacgtaggcctacggacaccatgattttggacttctggactgtagaacaggaagagtgtaagtttctgctgtttaaacaaccaaacgtgtgataatatgttatggcagccactacaagaaacaagctccttaatcagagat

SEQ ID NO: 343462 - DNA, 727 bp, Homo sapiens
ccttcacctgacagctttgtttccagtcagggacttcttccatgctgcctacatggctagaatgcctccttgccctcagggcaaccgactggtcatcttcctctcaccatttaaacttcactctccaagaagtcttgtcagatactctgttaggagatactacttttactaaaataatggatcacaaccctggctataccctggaatcactaatgtgtgacaagttaagcttcatcagtatgttaggtgccttaaagtaaaatactgatacctagactacataccagacagaatctctaggcaaaggaaccagatattggctgtggtgggttgcttttttttttttttttttttttggtctgtttttttccacagccccacaggtgatctattgagcagccagagttataaaccaccacaggctgagcattctttaatccaaaatgctccaaaatctgaaactttttgagcaccaacatgacaccatagtggaaaattccacacacgaccctgtgatgggttgcggtcaaaatgcgggcataaggccgggtgtagtggctcacacctataatcccaacactttgggaggccaaagagggagaattgcttgaggccaggagttcaagaccagcctagtcaacatagcaagaccccatctctacaaacaatacaaaaattagctaggcatggttgtgcatacctgtagtcctagctacttgggaagtta

SEQ ID NO: 343463 - DNA, 418 bp, Homo sapiens
ctctgagcatccctcccccttgcttagtcagctccagccaagtgtccttcctgaagacccttcactgtgccaggcacgtcctcaccttagggcattggcacaggttgttccctctgcccagagctccacatggttcattctcacctcctgcaagtctctgctcagatctcatcttcccagtaagaacctattcagctctgcagcctgacctactaccctgagagccccaacactccattatccccaggctctactttttccttttctccctaacatcgatcactttctagcctactatgcgatttgcttattattatgcttattattcactgcctgtctgcatcctgttacaatgtgggctccaggacagcagacagccttgtctgttttgtcctcagctgaattcccagtgcctggc

SEQ ID NO: 343464 - DNA, 468 bp, Homo sapiens
tatctttattaatgcaaccgaagagacctaagagtgcattcacttatcccactttctgttcctgtggtcttctttctcccatgaagcagaaactggataaagctcaagattttccatagacaaaccaaagcccactcatcccctcctaccccaatccaacctctgctggctcctgcatctcacttggaggtcaaacctcctcctgaggccaatgcattcccaacttccagttctttcctttaccctggagagttagtaaggtaagaaccattctttctctccaaaaccactcctccttggctggcaagttggtgtcctaactccgttctcttcctagctcatggcctctctagataataaagttgtctcctcctttctggatctcttcctcctaacacccctcccctgaaaccctggactctgccctctctccaagaaatggcttttcggggatcctcgagaacacta

SEQ ID NO: 343465 - DNA, 1930 bp, Homo sapiens
tatctttattaatgcaaccgaagagacctaagagtgcattcacttatcccactttctgttcctgtggtcttctttctcccatgaagcagaaactggataaagctcaagattttccatagacaaaccaaagcccactcatcccctcctaccccaatccaacctctgctggctcctgcatctcacttggaggtcaaacctcctcctgaggccaatgcattcccaacttccagttctttcctttaccctggagagttagtaaggtaagaaccattctttctctccaaaaccactcctccttggctggcaagttggtgtcctaactccgttctcttcctagctcatggcctctctagataataaagttgtctcctcctttctggatctcttcctcctaacacccctcccctgaaaccctggactctgccctctctccaagaaaatccatctattcaactattcttgcattcaattactctaaatgagagcgtgttggagctatggcaaattccctgttgtcaccttgctattttgcagacaacataatatttaacctctcataaccagagaggttaaataatttgtcaaatgcaatacagtaagacagaggcaaggacaaggtttgacttccagcccagcctcttttccacaacctgctaaatcttgatccatctgaaaacttttctaattagtgaagatgactaataaaaattttccctatctccaaggtaggagctttctggaagtttctagaaattttcaataaccaccagccaaggttacctccaggtaaccttgcagcaccaggctggaagtcagatcggcttcactatcttccaactctacagcctgtatctctccatccccagctttgacctttcctgctcaagtaacctacgggcacatccagcgtcactaaaaactcagggcttttcttcccggttactcctccaagcgttccctggtatcctcaacctcagatcccaggttcagatttctgcagtcaatctatgacccctctcttcttgcatccttcatatgccaccagacaccatgcccagtccagcctgattttgaaacaactttcatgccggtcttctcttccctgacatgttactgtccaggctcaagtcctcagcttctcatatctgcatctttgcaaccaacttcctcccttgcctctctgcttttccatcccacttttcatgtgtcctccataccatctataacagtgatctccctggaacactcaagaagacacaacataccatattatttaaagaccagggtactggacagtggctcacacctgtattcccgaatttgagagtctgaagcgggaggatcacttgaggccaggagttaagagaccagcctgggcaacacagcaagaccctgtctctaaaaaaaaaaattaattaactgggtatggtggcacatgcctgtagtcccagctactcaggaggctgaggtgggaggatgacttgagcccaggagtttgaggctgcaaggagctatgatcatgccagtgcatcccagctctaggtgagacagtgagatccggtctccaaaataaatcaatcaatcaaataaagaccaaagtcaaaccgcacatcaggatctctcacacccttccaattttgccatctaccagcacttagctaaacccatctcccatctcttccaccatgaattcactctttcaaaaaggctaatgtcttcttactcacccttgcctctaagcctttgctatcaccatttcccccaagctggagggccctccctctccctttacccctcttccactacctcccacccctactttttccagatagccatttcctctcttttttctgattgatccttccctctcacccaggattagatgctggaaatgaccacttctggagggcagggaacaagcccttaatct

SEQ ID NO: 343466 - DNA, 1834 bp, Homo sapiens
  misc_feature (1817)..(1818): n is a, c, g, or t
tatctttattaatgcaaccgaagagacctaagagtgcattcacttatcccactttctgttcctgtggtcttctttctcccatgaagcagaaactggataaagctcaagattttccatagacaaaccaaagcccactcatcccctcctaccccaatccaacctctgctggctcctgcatctcacttggaggtcaaacctcctcctgaggccaatgcattcccaacttccagttctttcctttaccctggagagttagtaaggtaagaaccattctttctctccaaaaccactcctccttggctggcaagttggtgtcctaactccgttctcttcctagctcatggcctctctagataataaagttgtctcctcctttctggatctcttcctcctaacacccctcccctgaaaccctggactctgccctctctccaagaaaatccatctattcaactattcttgcattcaattactctaaatgagagcgtgttggagctatggcaaattccctgttgtcaccttgctattttgcagacaacataatatttaacctctcataaccagagaggttaaataatttgtcaaatgcaatacagtaagacagaggcaaggacaaggtttgacttccagcccagcctcttttccacaacctgctaaatcttgatccatctgaaaacttttctaattagtgaagatgactaataaaaattttccctatctccaaggtaggagctttctggaagtttctagaaattttcaataaccaccagccaaggttacctccaggtaaccttgcagcaccaggctggaagtcagatcggcttcactatcttccaactctacagcctgtatctctccatccccagctttgacctttcctgctcaagtaacctacgggcacatccagcgtcactaaaaactcagggcttttcttcccggttactcctccaagcgttccctggtatcctcaacctcagatcccaggttcagatttctgcagtcaatctatgacccctctcttcttgcatccttcatatgccaccagacaccatgcccagtccagcctgattttgaaacaactttcatgccggtcttctcttccctgacatgttactgtccaggctcaagtcctcagcttctcatatctgcatctttgcaaccaacttcctcccttgcctctctgcttttccatcccacttttcatgtgtcctccataccatctataacagtgatctccctggaacactcaagaagacacaacataccatattatttaaagaccagggtactggacagtggctcacacctgtattcccgaatttgagagtctgaagcgggaggatcacttgaggccaggagttaagagaccagcctgggcaacacagcaagaccctgtctctaaaaaaaaaaattaattaactgggtatggtggcacatgcctgtagtcccagctactcaggaggctgaggtgggaggatgacttgagcccaggagtttgaggctgcaaggagctatgatcatgccagtgcatcccagctctaggtgagacagtgagatccggtctccaaaataaatcaatcaatcaaataaagaccaaagtcaaaccgcacatcaggatctctcacacccttccaattttgccatctaccagcacttagctaaacccatctcccatctcttccaccatgaattcactctttcaaaaaggctaatgtcttcttactcacccttgcctctaagcctttgctatcaccatttcccccaagctggagggccctccctctccctttacccctcttccactacctccctaaacnnggatcctctagatcat

SEQ ID NO: 343467 - DNA, 1791 bp, Homo sapiens
tatctttattaatgcaaccgaagagacctaagagtgcattcacttatcccactttctgttcctgtggtcttctttctcccatgaagcagaaactggataaagctcaagattttccatagacaaaccaaagcccactcatcccctcctaccccaatccaacctctgctggctcctgcatctcacttggaggtcaaacctcctcctgaggccaatgcattcccaacttccagttctttcctttaccctggagagttagtaaggtaagaaccattctttctctccaaaaccactcctccttggctggcaagttggtgtcctaactccgttctcttcctagctcatggcctctctagataataaagttgtctcctcctttctggatctcttcctcctaacacccctcccctgaaaccctggactctgccctctctccaagaaaatccatctattcaactattcttgcattcaattactctaaatgagagcgtgttggagctatggcaaattccctgttgtcaccttgctattttgcagacaacataatatttaacctctcataaccagagaggttaaataatttgtcaaatgcaatacagtaagacagaggcaaggacaaggtttgacttccagcccagcctcttttccacaacctgctaaatcttgatccatctgaaaacttttctaattagtgaagatgactaataaaaattttccctatctccaaggtaggagctttctggaagtttctagaaattttcaataaccaccagccaaggttacctccaggtaaccttgcagcaccaggctggaagtcagatcggcttcactatcttccaactctacagcctgtatctctccatccccagctttgacctttcctgctcaagtaacctacgggcacatccagcgtcactaaaaactcagggcttttcttcccggttactcctccaagcgttccctggtatcctcaacctcagatcccaggttcagatttctgcagtcaatctatgacccctctcttcttgcatccttcatatgccaccagacaccatgcccagtccagcctgattttgaaacaactttcatgccggtcttctcttccctgacatgttactgtccaggctcaagtcctcagcttctcatatctgcatctttgcaaccaacttcctcccttgcctctctgcttttccatcccacttttcatgtgtcctccataccatctataacagtgatctccctggaacactcaagaagacacaacataccatattatttaaagaccagggtactggacagtggctcacacctgtattcccgaatttgagagtctgaagcgggaggatcacttgaggccaggagttaagagaccagcctgggcaacacagcaagaccctgtctctaaaaaaaaaaattaattaactgggtatggtggcacatgcctgtagtcccagctactcaggaggctgaggtgggaggatgacttgagcccaggagtttgaggctgcaaggagctatgatcatgccagtgcatcccagctctaggtgagacagtgagatccggtctccaaaataaatcaatcaatcaaataaagaccaaagtcaaaccgcacatcaggatctctcacacccttccaattttgccatctaccagcacttagctaaacccatctcccatctcttccaccatgaattcactctttcaaaaaggctaatgtcttcttactcacccttgcctctaagcctttgctatcaccatttcccccagtgcgtcagagtactcggggagtcctc

SEQ ID NO: 343468 - DNA, 952 bp, Homo sapiens
tatctttattaatgcaaccgaagagacctaagagtgcattcacttatcccactttctgttcctgtggtcttctttctcccatgaagcagaaactggataaagctcaagattttccatagacaaaccaaagcccactcatcccctcctaccccaatccaacctctgctggctcctgcatctcacttggaggtcaaacctcctcctgaggccaatgcattcccaacttccagttctttcctttaccctggagagttagtaaggtaagaaccattctttctctccaaaaccactcctccttggctggcaagttggtgtcctaactccgttctcttcctagctcatggcctctctagataataaagttgtctcctcctttctggatctcttcctcctaacacccctcccctgaaaccctggactctgccctctctccaagaaaatccatctattcaactattcttgcattcaattactctaaatgagagcgtgttggagctatggcaaattccctgttgtcaccttgctattttgcagacaacataatatttaacctctcataaccagagaggttaaataatttgtcaaatgcaatacagtaagacagaggcaaggacaaggtttgacttccagcccagcctcttttccacaacctgctaaatcttgatccatctgaaaacttttctaattagtgaagatgactaataaaaattttccctatctccaaggtaggagctttctggaagtttctagaaattttcaataaccaccagccaaggttacctccaggtaaccttgcagcaccaggctggaagtcagatcggcttcactatcttccaactctacagcctgtatctctccatccccagctttgacctttcctgctcaagtaacctacgggcacatccagcgtcactaaaacccatctatgaaagcaacacaggccttatctgcg

SEQ ID NO: 343469 - DNA, 482 bp, Homo sapiens
tatcgagacggtgaccgtgagaggcataccttaaggctcctaggtttggtgctgaaactgcaactatgatcatgccagtgcatcccagctctaggtgagacagtgagatccggtctccaaaataaatcaatcaatcaaataaagaccaaagtcaaaccgcacatcaggatctctcacacccttccaattttgccatctaccagcacttagctaaacccatctcccatctcttccaccatgaattcactctttcaaaaaggctaatgtcttcttactcacccttgcctctaagcctttgctatcaccatttcccccaagctggagggccctccctctccctttacccctcttccactacctcccacccctactttttccagatagccatttcctctcttttttctgattgatccttccctctcacccaggattagatgctggaaatgaccacttctggagggcagggaacaagcccttaatct

SEQ ID NO: 343470 - DNA, 862 bp, Homo sapiens
ctctcaacccctgccattgcctcttcatggtaccctagtttgagtcctggtaatgggttacaatggaataaggaatgggagcattcctgttctaagtccctctctgtgctttgcacactaaagcccactcaaacaccaggagcctaggtatgcctctgagattaaagggagttttcagaccccaggtccccagtccagagaacaccattatcatcatagcatgccttgaaatgggggcaagggccagtctatattagagtgaactgcatcgattttggtgctaccctttcccacttgtatggccttgggccagtcatctcatatctctatttcctcatctgatcaatggagtttatactcgctgtcttgtaaaaatgttgcattacagtattaaaaacaacagatttgaaagtaacacaatatgtagtagctgaacaagaaatactatttccccttttccaacagagtctaagttaccaaaaagaagaaaaatgtaaaagagagctttttattctccctcatttttttaagtagttaaaactttacaaaatctaaattacctcaaagatctagataaataggtagggggagaaggtgtgtgctggtactctgttctccaggagtctgggaaaagggaaagacccaagctgaaagaaacatgaagacagtggaaaggagaggtatcaaggccaaccctcagctttcttagacaaaacaggtacgttctgtgaaggattactcagaatgtgatgtcaggcagcctcccctctgtgtctctttctccagctctccctcttgagactccatttcccctttgacaaccctgccttatcttcataactgtggactgtctttttctgta

SEQ ID NO: 343471 - DNA, 7281 bp, Homo sapiens
  misc_feature (2618)..(2618): n is a, c, g, or t
  misc_feature (2620)..(2620): n is a, c, g, or t
  misc_feature (2625)..(2626): n is a, c, g, or t
  misc_feature (2629)..(2630): n is a, c, g, or t
  misc_feature (2635)..(2635): n is a, c, g, or t
  misc_feature (2637)..(2637): n is a, c, g, or t
  misc_feature (2705)..(2705): n is a, c, g, or t
  misc_feature (3991)..(3991): n is a, c, g, or t
  misc_feature (4107)..(4107): n is a, c, g, or t
  misc_feature (4315)..(4315): n is a, c, g, or t
acgatctaaaacagacagagatgataaatattttagctattcaaaacttgaatgagatactcggtatgtatcttcccgatgtagatcagaaagagagcgacggcggagcagatctcactctaggtctgagagaggctctagaactaatttatcctattccagatcagaacgatctcattattatgactctgatcgtcgctaccataggagctccccttatcgagagaggacgcgctattctcggccatacacagataacagagcacgagagagttctgactcagaagaagagtataagaagacatactcaaggcgtacctcatctcattcctcttcttacagggacctaaggacatcatcctattctaaatctgatcgggactgtaaaactgagacctcttacttagagatggaaagaagaggcaagtattcttcaaaactagaaagagaatctaaaaggacttcagaaaatgaagcaattaaaagatgttgttctccccctaatgaactgggattccgacgagggtcatcatattctaagcatgacagtagtgcttcccgttataaatctaccctttcaaaacctatacccaagtctgataaatttaaaaattctttctgttgtacagaattaaatgaagaaatcaaacaatctcattcttttagtttacagacaccttgttcaaaaggtagtgaattaagaatgattaataaaaatcctgaaagagaaaaggctgggtctccagctccatcaaatcgattaaatgattcacctactttaaaaaagctagatgaattgcctatttttaagtccgaatttataacacatgatagccatgatagtattaaggaattagactctttatctaaagtgaagaatgatcaattaagaagtttttgtcccatagaattaaatataaatggatctcctggggcagaatctgatttggcaacattttgcacttctaaaactgatgctgttttaatgacttctgatgatagtgtgactggatcggaattatcccctttggtcaaagcatgcatgctttcatcaaatggatttcagaatattagtaggtgcaaagaaaaagacttggatgatacctgcatgctgcataagaagtcagaaagcccatttagagaaacagaacctctggtgtcaccacaccaagataaactcatgtctatgccagttatgactgtggattattccaaaacagtagttaaagaaccagttgatacgagggtttcttgctgcaaaaccaaagattcagacatatactgtactttgaacgatagcaacccttctttgtgtaactctgaagctgaaaatattgagccttcagttatgaagatttcttcaaatagctttatgaatgtgcatttggaatcaaaaccagttatatgtgatagtagaaatttgacagatcactcaaaatttgcatgtgaagaatataagcagagcatcggtagcactagttcagcttctgttaatcattttgatgatttatatcaacctattgggagttcaggtattgcttcatctcttcagagtcttccaccaggaataaaggtggacagtctaactctcttgaaatgcggagagaacacatctccagttctggatgcagtgctaaagagtaaaaaaagttcagagtttttaaagcatgcagggaaagaaacaatagtagaagtaggtagtgaccttcctgattcaggaaagggatttgcttccagggagaacaggcgtaataatgggttatctgggaaatgtttgcaagaggctcaaaaagaagggaattccatattgcctgaaagaagaggaagaccagaaatctctttagatgaaagaggagaaggaggacatgtgcatacttctgatgactcagaagttgtattttcttcttgtgatttgaatttaaccatggaagacagtgatggtgtaacttatgcattaaagtgtgacagtagtggtcatgccccagaaattgtgtctacagttcatgaagattattctggctcttctgaaagttcaaatgatgaaagtgattcagaagatacggattcggatgatagcagtattccaagaaaccgtctccagtctgttgtggttgtgccaaagaattctactttgcccatggaagaaacaagtccttgttcttctcggagcagtcaaagttatagacactattctgaccattgggaagatgagagattggagtcaaggagacatttgtatgaggaaaaatttgaaagtatagcaagtaaagcctgtcctcaaactgataagtttttccttcataaaggaacagagaagaatccggaaatttcttttacacagtccagtagaaaacaaatagataaccgcctgcctgaactttctcatcctcagagtgatggggttgatagtacaagtcatacagatgtgaaatctgaccctctgggtcacccaaattcagaggaaaccgtgaaagccaaaataccttctaggcagcaagaagagctgccaatttattcttctgattttgaagatgtcccaaataagtcttggcaacagaccactttccaaaacaggccagatagtagactgggaaaaacagaattgagtttttcttccncntgtgnnatnncacangnggatggcttgcactcatcagaagagctcagaaacttaggttgggacttctctcaagaaaagccttctnccacgtatcagcaacctgacagtagctatggagcttgtggtggacacaagtatcagcaaaatgcagaacagtatggtgggacacgtgattactggcaaggcaatggttactgggatccaagatcaggtagacctcctggaactggggttgtgtatgatcgaactcaaggacaagtaccagattccctaacagatgatcgtgaagaagaggagaattgggatcaacaggatggatcccatttttcagaccagtccgataaatttcttctatcccttcagaaagacaaggggtcagtgcaagcacctgaaataagcagcaattccattaaggacactttagctgtgaatgaaaagaaagatttttcaaaaaacttagaaaaaaatgatatcaaagatagagggcctcttaaaaaaaggaggcaggaaatagagagtgattctgaaagtgatggtgagcttcaggacagaaagaaagttagagtggaggtagagcagggagagacatcagtgcccccaggttcagcactggttgggccctcctgtgtcatggatgacttcagggacccacagcgatggaaggaatgtgccaagcaagggaaaatgccatgttactttgatcttattgaagaaaatgtttatttaacagaaagaaagaagaataaatctcatcgagatattaagcgaatgcagtgtgagtgtacacctctttctaaagatgaaagagctcaaggtgaaatagcatgtggggaagattgtcttaatcgtcttctcatgattgaatgttcttctcggtgtccaaatggggattattgttccaatagacggtttcagagaaaacagcatgcagatgtggaagtcatactcacagaaaagaaaggctggggcttgagagctgccaaagaccttccttcgaacacctttgtcctagaatattgtggagaggtactcgatcataaagagtttaaagctcgagtgaaggagtatgcacgaaacaaaaacatccattactatttcatggccctgaagaatgatgagataatagatgccactcaaaaaggaaattgctctcgtttcatgaatcacagctgtgaaccaaattgtgaaacccaaaaatggactgtgaacggacaactgagggttgggttttttaccaccaaactggttccttcaggctcagagttaacgtttgactatcagttccagagatatggaaaagaagcccagaaatgtttctgcggatcagccaattgccggggttacctgggaggagaaaacagagtcagcatnagagcagcaggagggaaaatgaagaaggaacgatctcgtaagaaggattcagtggatggagagctagaagctctgatggaaaatggtgagggtctctctgataaaaaccaggtgcncagcttatcccggctaatggttagaattgaaactttggagcagaaacttacctgtctggaactcatacagaacacacactcacagtcctgcctgaagtcctttctggaacgtcatgggctgtctttgttgtggatctggatggcagagctaggtgacggccgggaaagtaaccagaagcttcaggaagagattataaagactttggancacttgcccattcctactaaaaatatgttggaggaaagcaaagtacttccaattattcaacgctggtctcagactaagactgctgtccctccgttgagtgaaggagatgggtattctagtgagaatacatcgcgtgctcatacaccactcaacacacctgatccttccaccaagctgagcacagaagctgacacagacactcccaagaaactaatgtttcgcagactgaaaattataagtgaaaatagcatggacagtgcaatctctgatgcaaccagtgagctagaaggcaaggatggcaaagaggatcttgatcaattagaaaatgtccctgtagaggaagaggaagaattgcagtcacaacagctactcccacaacagctgcctgaatgcaaagttgatagtgaaaccaacatagaagctagtaagctacctacatctgaaccagaagctgacgctgaaatagagcccaaagagagcaacggcacaaaactagaagaacctattaatgaagaaacaccatcccaagatgaagaggagggtgtgtctgatgtggagagtgaaaggagccaagaacagccagataaaacagtggatataagtgatttggccaccaaactcctggacagttggaaagacctaaaggaggtatatcgaattccaaagaaaagtcaaactgaaaaggaaaacacaacaactgaacgaggaagggatgctgttggcttcagagatcaaacacctgccccgaagactcctaataggtcaagagagagagacccagacaagcaaactcaaaataaagagaaaaggaaacgaagaagctccctctcaccaccctcttctgcctatgagcggggaacaaaaaggccagatgacagatatgatacaccaacttctaaaaagaaagtacgaattaaagaccgcaataaactttctacagaggaacgccggaagttgtttgagcaagaggtggctcaacgggaggctcagaaacaacagcaacagatgcagaacctgggaatgacatcaccactgccctatgactctcttggttataatgccccgcatcatccctttgctggttacccaccaggttatcccatgcaggcctatgtggatcccagcaaccctaatgctggaaaggtgctcctgcccacacccagcatggacccagtgtgttctcctgctccttatgatcatgctcagcccttggtgggacattctacagaacccctttctgcccctccaccagtaccagtggtgccacatgtggcagctcctgtggaagtttccagttcccagtatgtggcccagagtgatggtgtagtacaccaagactccagcgttgctgtcttgccagtgccggcccccggcccagttcagggacagaattatagtgtttgggattcaaaccaacagtctgtcagtgtacagcagcagtactctcctgcacagtctcaagcaaccatatattatcaaggacagacatgtccaacagtctatggtgtgacatcaccttattcacagacaactccaccaattgtacagagttatgcccagccaagtcttcagtatatccaggggcaacagattttcacagctcatccacaaggagtggtggtacagccagccgcagcagtgactacaatagttgcaccagggcagcctcagcccttgcagccatctgaaatggttgtgacaaataatctcttggatctgccgcccccctctcctcccaaaccaaaaaccattgtcttacctcccaactggaagacagctcgagatccagaagggaagatttattactaccatgtgatcacaaggcagactcagtgggatcctcctacttgggaaagcccaggagatgatgccagccttgagcatgaagctgagatggacctgggaactccaacatatgatgaaaaccccatgaaggcctcgaaaaagcccaagacagcagaagcagacacctccagtgaactagcaaagaaaagcaaagaagtattcagaaaagagatgtcccagttcatcgtccagtgcctgaacccttaccggaaacctgactgcaaagtgggaagaattaccacaactgaagactttaaacatctggctcgcaagctgactcacggtgttatgaataaggagctgaagtactgtaagaatcctgaggacctggagtgcaatgagaatgtgaaacacaaaaccaaggagtacattaagaagtacatgcagaagtttggggctgtttacaaacccaaagaggacactgaattagagtgactgttgggccagggtgggaggatgggtggtcaggtaagacagactctagggagaggaaatcctgtgggcctttctgtcccacccctgtcagcactgtgctactgatgatacatcaccctggggaattcaaccctgcagatgtcaactgaaggccacaaaaatgaactccatctacaagtgattacctagttgtgagctgttggcatgtggttagaagccatcagaggtgcaagggcttagaaaagaccctggccagacctgactccactcttaaacctgggtcttctccttggcggtgctgtcagcgcacagacccatgcgcatccccacccacaaccctttaccctgatgatctgtattatattttaatgtatatgtgaatatattgaaaataatttgttttttcctggtttttgtttggttttcgttttgcttttagcctctacatgctaggatcacaggaagactttgtaaggacagtttaagttctcctgcaaggtttaatttgttatcatgtaaatattccaaagcaggctgccttgtggttttggccagccttgtgctatgttgataagattgatttactgcttaaaatcactttactttatccaatttttactgaactttttatgtaaaaaaataaaatcaattaaagaacttggcatgtgtgttccctaaaagttaat

SEQ ID NO: 343472 - DNA, 7514 bp, Homo sapiens
  misc_feature (2618)..(2618): n is a, c, g, or t
  misc_feature (2620)..(2620): n is a, c, g, or t
  misc_feature (2625)..(2626): n is a, c, g, or t
  misc_feature (2629)..(2630): n is a, c, g, or t
  misc_feature (2635)..(2635): n is a, c, g, or t
  misc_feature (2637)..(2637): n is a, c, g, or t
  misc_feature (2705)..(2705): n is a, c, g, or t
  misc_feature (3991)..(3991): n is a, c, g, or t
  misc_feature (4107)..(4107): n is a, c, g, or t
  misc_feature (4315)..(4315): n is a, c, g, or t
acgatctaaaacagacagagatgataaatattttagctattcaaaacttgaatgagatactcggtatgtatcttcccgatgtagatcagaaagagagcgacggcggagcagatctcactctaggtctgagagaggctctagaactaatttatcctattccagatcagaacgatctcattattatgactctgatcgtcgctaccataggagctccccttatcgagagaggacgcgctattctcggccatacacagataacagagcacgagagagttctgactcagaagaagagtataagaagacatactcaaggcgtacctcatctcattcctcttcttacagggacctaaggacatcatcctattctaaatctgatcgggactgtaaaactgagacctcttacttagagatggaaagaagaggcaagtattcttcaaaactagaaagagaatctaaaaggacttcagaaaatgaagcaattaaaagatgttgttctccccctaatgaactgggattccgacgagggtcatcatattctaagcatgacagtagtgcttcccgttataaatctaccctttcaaaacctatacccaagtctgataaatttaaaaattctttctgttgtacagaattaaatgaagaaatcaaacaatctcattcttttagtttacagacaccttgttcaaaaggtagtgaattaagaatgattaataaaaatcctgaaagagaaaaggctgggtctccagctccatcaaatcgattaaatgattcacctactttaaaaaagctagatgaattgcctatttttaagtccgaatttataacacatgatagccatgatagtattaaggaattagactctttatctaaagtgaagaatgatcaattaagaagtttttgtcccatagaattaaatataaatggatctcctggggcagaatctgatttggcaacattttgcacttctaaaactgatgctgttttaatgacttctgatgatagtgtgactggatcggaattatcccctttggtcaaagcatgcatgctttcatcaaatggatttcagaatattagtaggtgcaaagaaaaagacttggatgatacctgcatgctgcataagaagtcagaaagcccatttagagaaacagaacctctggtgtcaccacaccaagataaactcatgtctatgccagttatgactgtggattattccaaaacagtagttaaagaaccagttgatacgagggtttcttgctgcaaaaccaaagattcagacatatactgtactttgaacgatagcaacccttctttgtgtaactctgaagctgaaaatattgagccttcagttatgaagatttcttcaaatagctttatgaatgtgcatttggaatcaaaaccagttatatgtgatagtagaaatttgacagatcactcaaaatttgcatgtgaagaatataagcagagcatcggtagcactagttcagcttctgttaatcattttgatgatttatatcaacctattgggagttcaggtattgcttcatctcttcagagtcttccaccaggaataaaggtggacagtctaactctcttgaaatgcggagagaacacatctccagttctggatgcagtgctaaagagtaaaaaaagttcagagtttttaaagcatgcagggaaagaaacaatagtagaagtaggtagtgaccttcctgattcaggaaagggatttgcttccagggagaacaggcgtaataatgggttatctgggaaatgtttgcaagaggctcaaaaagaagggaattccatattgcctgaaagaagaggaagaccagaaatctctttagatgaaagaggagaaggaggacatgtgcatacttctgatgactcagaagttgtattttcttcttgtgatttgaatttaaccatggaagacagtgatggtgtaacttatgcattaaagtgtgacagtagtggtcatgccccagaaattgtgtctacagttcatgaagattattctggctcttctgaaagttcaaatgatgaaagtgattcagaagatacggattcggatgatagcagtattccaagaaaccgtctccagtctgttgtggttgtgccaaagaattctactttgcccatggaagaaacaagtccttgttcttctcggagcagtcaaagttatagacactattctgaccattgggaagatgagagattggagtcaaggagacatttgtatgaggaaaaatttgaaagtatagcaagtaaagcctgtcctcaaactgataagtttttccttcataaaggaacagagaagaatccggaaatttcttttacacagtccagtagaaaacaaatagataaccgcctgcctgaactttctcatcctcagagtgatggggttgatagtacaagtcatacagatgtgaaatctgaccctctgggtcacccaaattcagaggaaaccgtgaaagccaaaataccttctaggcagcaagaagagctgccaatttattcttctgattttgaagatgtcccaaataagtcttggcaacagaccactttccaaaacaggccagatagtagactgggaaaaacagaattgagtttttcttccncntgtgnnatnncacangnggatggcttgcactcatcagaagagctcagaaacttaggttgggacttctctcaagaaaagccttctnccacgtatcagcaacctgacagtagctatggagcttgtggtggacacaagtatcagcaaaatgcagaacagtatggtgggacacgtgattactggcaaggcaatggttactgggatccaagatcaggtagacctcctggaactggggttgtgtatgatcgaactcaaggacaagtaccagattccctaacagatgatcgtgaagaagaggagaattgggatcaacaggatggatcccatttttcagaccagtccgataaatttcttctatcccttcagaaagacaaggggtcagtgcaagcacctgaaataagcagcaattccattaaggacactttagctgtgaatgaaaagaaagatttttcaaaaaacttagaaaaaaatgatatcaaagatagagggcctcttaaaaaaaggaggcaggaaatagagagtgattctgaaagtgatggtgagcttcaggacagaaagaaagttagagtggaggtagagcagggagagacatcagtgcccccaggttcagcactggttgggccctcctgtgtcatggatgacttcagggacccacagcgatggaaggaatgtgccaagcaagggaaaatgccatgttactttgatcttattgaagaaaatgtttatttaacagaaagaaagaagaataaatctcatcgagatattaagcgaatgcagtgtgagtgtacacctctttctaaagatgaaagagctcaaggtgaaatagcatgtggggaagattgtcttaatcgtcttctcatgattgaatgttcttctcggtgtccaaatggggattattgttccaatagacggtttcagagaaaacagcatgcagatgtggaagtcatactcacagaaaagaaaggctggggcttgagagctgccaaagaccttccttcgaacacctttgtcctagaatattgtggagaggtactcgatcataaagagtttaaagctcgagtgaaggagtatgcacgaaacaaaaacatccattactatttcatggccctgaagaatgatgagataatagatgccactcaaaaaggaaattgctctcgtttcatgaatcacagctgtgaaccaaattgtgaaacccaaaaatggactgtgaacggacaactgagggttgggttttttaccaccaaactggttccttcaggctcagagttaacgtttgactatcagttccagagatatggaaaagaagcccagaaatgtttctgcggatcagccaattgccggggttacctgggaggagaaaacagagtcagcatnagagcagcaggagggaaaatgaagaaggaacgatctcgtaagaaggattcagtggatggagagctagaagctctgatggaaaatggtgagggtctctctgataaaaaccaggtgcncagcttatcccggctaatggttagaattgaaactttggagcagaaacttacctgtctggaactcatacagaacacacactcacagtcctgcctgaagtcctttctggaacgtcatgggctgtctttgttgtggatctggatggcagagctaggtgacggccgggaaagtaaccagaagcttcaggaagagattataaagactttggancacttgcccattcctactaaaaatatgttggaggaaagcaaagtacttccaattattcaacgctggtctcagactaagactgctgtccctccgttgagtgaaggagatgggtattctagtgagaatacatcgcgtgctcatacaccactcaacacacctgatccttccaccaagctgagcacagaagctgacacagacactcccaagaaactaatgtttcgcagactgaaaattataagtgaaaatagcatggacagtgcaatctctgatgcaaccagtgagctagaaggcaaggatggcaaagaggatcttgatcaattagaaaatgtccctgtagaggaagaggaagaattgcagtcacaacagctactcccacaacagctgcctgaatgcaaagttgatagtgaaaccaacatagaagctagtaagctacctacatctgaaccagaagctgacgctgaaatagagcccaaagagagcaacggcacaaaactagaagaacctattaatgaagaaacaccatcccaagatgaagaggagggtgtgtctgatgtggagagtgaaaggagccaagaacagccagataaaacagtggatataagtgatttggccaccaaactcctggacagttggaaagacctaaaggaggtatatcgaattccaaagaaaagtcaaactgaaaaggaaaacacaacaactgaacgaggaagggatgctgttggcttcagagatcaaacacctgccccgaagactcctaataggtcaagagagagagtgtgtctgatgtggagagtgaaaggagccaagaacagccagataaaacagtggatataagtgatttggccaccaaactcctggacagttggaaagacctaaaggaggtatatcgaattccaaagaaaagtcaaactgaaaaggaaaacacaacaactgaacgaggaagggatgctgttggcttcagagatcaaacacctgccccgaagactcctaataggtcaagagagagagacccagacaagcaaactcaaaataaagagaaaaggaaacgaagaagctccctctcaccaccctcttctgcctatgagcggggaacaaaaaggccagatgacagatatgatacaccaacttctaaaaagaaagtacgaattaaagaccgcaataaactttctacagaggaacgccggaagttgtttgagcaagaggtggctcaacgggaggctcagaaacaacagcaacagatgcagaacctgggaatgacatcaccactgccctatgactctcttggttataatgccccgcatcatccctttgctggttacccaccaggttatcccatgcaggcctatgtggatcccagcaaccctaatgctggaaaggtgctcctgcccacacccagcatggacccagtgtgttctcctgctccttatgatcatgctcagcccttggtgggacattctacagaacccctttctgcccctccaccagtaccagtggtgccacatgtggcagctcctgtggaagtttccagttcccagtatgtggcccagagtgatggtgtagtacaccaagactccagcgttgctgtcttgccagtgccggcccccggcccagttcagggacagaattatagtgtttgggattcaaaccaacagtctgtcagtgtacagcagcagtactctcctgcacagtctcaagcaaccatatattatcaaggacagacatgtccaacagtctatggtgtgacatcaccttattcacagacaactccaccaattgtacagagttatgcccagccaagtcttcagtatatccaggggcaacagattttcacagctcatccacaaggagtggtggtacagccagccgcagcagtgactacaatagttgcaccagggcagcctcagcccttgcagccatctgaaatggttgtgacaaataatctcttggatctgccgcccccctctcctcccaaaccaaaaaccattgtcttacctcccaactggaagacagctcgagatccagaagggaagatttattactaccatgtgatcacaaggcagactcagtgggatcctcctacttgggaaagcccaggagatgatgccagccttgagcatgaagctgagatggacctgggaactccaacatatgatgaaaaccccatgaaggcctcgaaaaagcccaagacagcagaagcagacacctccagtgaactagcaaagaaaagcaaagaagtattcagaaaagagatgtcccagttcatcgtccagtgcctgaacccttaccggaaacctgactgcaaagtgggaagaattaccacaactgaagactttaaacatctggctcgcaagctgactcacggtgttatgaataaggagctgaagtactgtaagaatcctgaggacctggagtgcaatgagaatgtgaaacacaaaaccaaggagtacattaagaagtacatgcagaagtttggggctgtttacaaacccaaagaggacactgaattagagtgactgttgggccagggtgggaggatgggtggtcaggtaagacagactctagggagaggaaatcctgtgggcctttctgtcccacccctgtcagcactgtgctactgatgatacatcaccctggggaattcaaccctgcagatgtcaactgaaggccacaaaaatgaactccatctacaagtgattacctagttgtgagctgttggcatgtggttagaagccatcagaggtgcaagggcttagaaaagaccctggccagacctgactccactcttaaacctgggtcttctccttggcggtgctgtcagcgcacagacccatgcgcatccccacccacaaccctttaccctgatgatctgtattatattttaatgtatatgtgaatatattgaaaataatttgttttttcctggtttttgtttggttttcgttttgcttttagcctctacatgctaggatcacaggaagactttgtaaggacagtttaagttctcctgcaaggtttaatttgttatcatgtaaatattccaaagcaggctgccttgtggttttggccagccttgtgctatgttgataagattgatttactgcttaaaatcactttactttatccaatttttactgaactttttatgtaaaaaaataaaatcaattaaagaacttggcatgtgtgttccctaaaagttaat

SEQ ID NO: 343473 - DNA, 2269 bp, Homo sapiens
  misc_feature (843)..(843): n is a, c, g, or t
gggatagactgaaggaagagagtttggaggccaggaaaccccagaaaaaccttgagttaaaaggcttatgcagggataaaatttagtttcttatggtccctttgtgaacatactggtatttcagctcattgaaccagcagctgtttatttagtgcctaccttgtgatatagccttgttctttgaacacctgaaggctcactgaattttagtgatgggtagactttgttcaaagtgctctctgatgaaatggctatgactggcctctttattctctttgtcccctatgatcttagcaccacaaatacctctgaaggtcctattcctagagtgtttgggagcacctgggtaggacagaccatacttagacagcccagggaggacatagtaagtggtggaaggaaaaggattctgcttaggttttcctttgctggctgtcatatcatgcttccatctgcttcacatgctgtggtatgaccacttaaagaatctaagtacccttcaatgacaaaattcctgtggttcctgggattgctaagcctcatagaagctctggaacacctgctgtgctctgccttgcctccagggcccagagaacccagctactgtctttatgccaaggacacaaaattcattgactgaaacctggggctgctgaaggactcagcattgaagtcatgctgttgagtccctccagcctcctttaaggcttgcttagtccatccaggggagctctttccctctcaggctgagcccgtatccttttctcagatcttactggcttactagtattccactgtccaaaccagttaacctgagggaggaaaaggagaaggattggctgnctttactcactaccttttctagttatttcctcagtacaactccttgccctctctggactgttgagcaacgtgttctcttttctctgcctgcagatgtcccagttcatcgtccagtgcctgaacccttaccggaaacctgactgcaaagtgggaagaattaccacaactgaagactttaaacatctggctcgcaaggtactccccttgcttttggtagcccaccaggcaatgttctgggcaaactgtgtaccttctaagaagcccttttcatcatagaaagtatttttttttttcttgtcagatgtcagagctggggacccaggaacggggagggaaggtttggggagggatgcgtaccttacatgacagcagtagttctctaagaaattttcagagctcagcttgtcctttctggtgatcatagcaccagcctgccccaacatctacccccttattaacttcctgtcttggtgagaagggccctgaagcagcaggctggattaccacccctgtcctccccctcatataatttctgctctgattggtggctgtggtctctcttcctgtgccctggacagctgactcacggtgttatgaataaggagctgaagtactgtaagaatcctgaggacctggagtgcaatgagaatgtgaaacacaaaaccaaggagtacattaagaagtacatgcagaagtttggggctgtttacaaacccaaagaggacactgaattagagtgactgttgggccagggtgggaggatgggtggtcaggtaagacagactctagggagaggaaatcctgtgggcctttctgtcccacccctgtcagcactgtgctactgatgatacatcaccctggggaattcaaccctgcagatgtcaactgaaggccacaaaaatgaactccatctacaagtgattacctagttgtgagctgttggcatgtggttagaagccatcagaggtgcaagggcttagaaaagaccctggccagacctgactccactcttaaacctgggtcttctccttggcggtgctgtcagcgcacagacccatgcgcatccccacccacaaccctttaccctgatgatctgtattatattttaatgtatatgtgaatatattgaaaataatttgttttttcctggtttttgtttggttttcgttttgcttttagcctctacatgctaggatcacaggaagactttgtaaggacagtttaagttctcctgcaaggtttaatttgttatcatgtaaatattccaaagcaggctgccttgtggttttggccagccttgtgctatgttgataagattgatttactgcttaaaatcactttactttatccaatttttactgaactttttatgtaaaaaaataaaatcaattaaagaacttggcatgtgtgttccctaaaagttaat

SEQ ID NO: 343474 - DNA, 463 bp, Homo sapiens
ctcgtgcgaattcggcagagggaccctggccagacctgactccactcttaaacctgggtcttctccttggcggtgctgtcagcgcacagacccatgcgcatccccacccacaaccctttaccctgatgatctgtattatattttaatgtatatgtgaatatattgaaaataatttgttttttcctggtttttgtttggttttcgttttgcttttagcctctacatgctaggatcacaggaagactttgtaaggacagtttaagttctcctgcaaggtttaatttgttatcatgtaaatattccaaagcaggctgccttgtggttttggccagccttgtgctatgttgataagattgatttactgcttaaaatcactttactttatccaatttttactgaactttttatgtaaaaaaataaaatcaattaaagaacttggcatgtgtgttccctaaaagttaat

SEQ ID NO: 343475 - DNA, 983 bp, Homo sapiens
gcgacctcagtgaccacagaagttcagaaagagatgtcccagttcatcgtccagtgcctgaacccttaccggaaacctgactgcaaagtgggaagaattaccacaactgaagactttaaacatctggctcgcaagctgactcacggtgttatgaataaggagctgaagtactgtaagaatcctgaggacctggagtgcaatgagaatgtgaaacacaaaaccaaggagtacattaagaagtacatgcagaagtttggggctgtttacaaacccaaagaggacactgaattagagtgactgttgggccagggtgggaggatgggtggtcaggtaagacagactctagggagaggaaatcctgtgggcctttctgtcccacccctgtcagcactgtgctactgatgatacatcaccctggggaattcaaccctgcagatgtcaactgaaggccacaaaaatgaactccatctacaagtgattacctagttgtgagctgttggcatgtggttagaagccatcagaggtgcaagggcttagaaaagaccctggccagacctgactccactcttaaacctgggtcttctccttggcggtgctgtcagcgcacagacccatgcgcatccccacccacaaccctttaccctgatgatctgtattatattttaatgtatatgtgaatatattgaaaataatttgttttttcctggtttttgtttggttttcgttttgcttttagcctctacatgctaggatcacaggaagactttgtaaggacagtttaagttctcctgcaaggtttaatttgttatcatgtaaatattccaaagcaggctgccttgtggttttggccagccttgtgctatgttgataagattgatttactgcttaaaatcactttactttatccaatttttactgaactttttatgtaaaaaaataaaatcaattaaagaacttggcatgtgtgttccctaaaagttaat

SEQ ID NO: 343476 - DNA, 359 bp, Homo sapiens
tcttttgtcatcgggggtttcaagtcaaccataaattccttatcaccccctcccccaagaggtttgggtcagtttttgttttcttttaaacccaaattaccaaaactaagatcctctacatgctaggatcacaggaagactttgtaaggacagtttaagttctcctgcaaggtttaatttgttatcatgtaaatattccaaagcaggctgccttgtggttttggccagccttgtgctatgttgataagattgatttactgcttaaaatcactttactttatccaatttttactgaactttttatgtaaaaaaataaaatcaattaaagaacttggcatgtgtgttccctaaaagttaat

SEQ ID NO: 343477 - DNA, 6999 bp, Homo sapiens
  misc_feature (2618)..(2618): n is a, c, g, or t
  misc_feature (2620)..(2620): n is a, c, g, or t
  misc_feature (2625)..(2626): n is a, c, g, or t
  misc_feature (2629)..(2630): n is a, c, g, or t
  misc_feature (2635)..(2635): n is a, c, g, or t
  misc_feature (2637)..(2637): n is a, c, g, or t
  misc_feature (2705)..(2705): n is a, c, g, or t
  misc_feature (3991)..(3991): n is a, c, g, or t
  misc_feature (4107)..(4107): n is a, c, g, or t
  misc_feature (4315)..(4315): n is a, c, g, or t
acgatctaaaacagacagagatgataaatattttagctattcaaaacttgaatgagatactcggtatgtatcttcccgatgtagatcagaaagagagcgacggcggagcagatctcactctaggtctgagagaggctctagaactaatttatcctattccagatcagaacgatctcattattatgactctgatcgtcgctaccataggagctccccttatcgagagaggacgcgctattctcggccatacacagataacagagcacgagagagttctgactcagaagaagagtataagaagacatactcaaggcgtacctcatctcattcctcttcttacagggacctaaggacatcatcctattctaaatctgatcgggactgtaaaactgagacctcttacttagagatggaaagaagaggcaagtattcttcaaaactagaaagagaatctaaaaggacttcagaaaatgaagcaattaaaagatgttgttctccccctaatgaactgggattccgacgagggtcatcatattctaagcatgacagtagtgcttcccgttataaatctaccctttcaaaacctatacccaagtctgataaatttaaaaattctttctgttgtacagaattaaatgaagaaatcaaacaatctcattcttttagtttacagacaccttgttcaaaaggtagtgaattaagaatgattaataaaaatcctgaaagagaaaaggctgggtctccagctccatcaaatcgattaaatgattcacctactttaaaaaagctagatgaattgcctatttttaagtccgaatttataacacatgatagccatgatagtattaaggaattagactctttatctaaagtgaagaatgatcaattaagaagtttttgtcccatagaattaaatataaatggatctcctggggcagaatctgatttggcaacattttgcacttctaaaactgatgctgttttaatgacttctgatgatagtgtgactggatcggaattatcccctttggtcaaagcatgcatgctttcatcaaatggatttcagaatattagtaggtgcaaagaaaaagacttggatgatacctgcatgctgcataagaagtcagaaagcccatttagagaaacagaacctctggtgtcaccacaccaagataaactcatgtctatgccagttatgactgtggattattccaaaacagtagttaaagaaccagttgatacgagggtttcttgctgcaaaaccaaagattcagacatatactgtactttgaacgatagcaacccttctttgtgtaactctgaagctgaaaatattgagccttcagttatgaagatttcttcaaatagctttatgaatgtgcatttggaatcaaaaccagttatatgtgatagtagaaatttgacagatcactcaaaatttgcatgtgaagaatataagcagagcatcggtagcactagttcagcttctgttaatcattttgatgatttatatcaacctattgggagttcaggtattgcttcatctcttcagagtcttccaccaggaataaaggtggacagtctaactctcttgaaatgcggagagaacacatctccagttctggatgcagtgctaaagagtaaaaaaagttcagagtttttaaagcatgcagggaaagaaacaatagtagaagtaggtagtgaccttcctgattcaggaaagggatttgcttccagggagaacaggcgtaataatgggttatctgggaaatgtttgcaagaggctcaaaaagaagggaattccatattgcctgaaagaagaggaagaccagaaatctctttagatgaaagaggagaaggaggacatgtgcatacttctgatgactcagaagttgtattttcttcttgtgatttgaatttaaccatggaagacagtgatggtgtaacttatgcattaaagtgtgacagtagtggtcatgccccagaaattgtgtctacagttcatgaagattattctggctcttctgaaagttcaaatgatgaaagtgattcagaagatacggattcggatgatagcagtattccaagaaaccgtctccagtctgttgtggttgtgccaaagaattctactttgcccatggaagaaacaagtccttgttcttctcggagcagtcaaagttatagacactattctgaccattgggaagatgagagattggagtcaaggagacatttgtatgaggaaaaatttgaaagtatagcaagtaaagcctgtcctcaaactgataagtttttccttcataaaggaacagagaagaatccggaaatttcttttacacagtccagtagaaaacaaatagataaccgcctgcctgaactttctcatcctcagagtgatggggttgatagtacaagtcatacagatgtgaaatctgaccctctgggtcacccaaattcagaggaaaccgtgaaagccaaaataccttctaggcagcaagaagagctgccaatttattcttctgattttgaagatgtcccaaataagtcttggcaacagaccactttccaaaacaggccagatagtagactgggaaaaacagaattgagtttttcttccncntgtgnnatnncacangnggatggcttgcactcatcagaagagctcagaaacttaggttgggacttctctcaagaaaagccttctnccacgtatcagcaacctgacagtagctatggagcttgtggtggacacaagtatcagcaaaatgcagaacagtatggtgggacacgtgattactggcaaggcaatggttactgggatccaagatcaggtagacctcctggaactggggttgtgtatgatcgaactcaaggacaagtaccagattccctaacagatgatcgtgaagaagaggagaattgggatcaacaggatggatcccatttttcagaccagtccgataaatttcttctatcccttcagaaagacaaggggtcagtgcaagcacctgaaataagcagcaattccattaaggacactttagctgtgaatgaaaagaaagatttttcaaaaaacttagaaaaaaatgatatcaaagatagagggcctcttaaaaaaaggaggcaggaaatagagagtgattctgaaagtgatggtgagcttcaggacagaaagaaagttagagtggaggtagagcagggagagacatcagtgcccccaggttcagcactggttgggccctcctgtgtcatggatgacttcagggacccacagcgatggaaggaatgtgccaagcaagggaaaatgccatgttactttgatcttattgaagaaaatgtttatttaacagaaagaaagaagaataaatctcatcgagatattaagcgaatgcagtgtgagtgtacacctctttctaaagatgaaagagctcaaggtgaaatagcatgtggggaagattgtcttaatcgtcttctcatgattgaatgttcttctcggtgtccaaatggggattattgttccaatagacggtttcagagaaaacagcatgcagatgtggaagtcatactcacagaaaagaaaggctggggcttgagagctgccaaagaccttccttcgaacacctttgtcctagaatattgtggagaggtactcgatcataaagagtttaaagctcgagtgaaggagtatgcacgaaacaaaaacatccattactatttcatggccctgaagaatgatgagataatagatgccactcaaaaaggaaattgctctcgtttcatgaatcacagctgtgaaccaaattgtgaaacccaaaaatggactgtgaacggacaactgagggttgggttttttaccaccaaactggttccttcaggctcagagttaacgtttgactatcagttccagagatatggaaaagaagcccagaaatgtttctgcggatcagccaattgccggggttacctgggaggagaaaacagagtcagcatnagagcagcaggagggaaaatgaagaaggaacgatctcgtaagaaggattcagtggatggagagctagaagctctgatggaaaatggtgagggtctctctgataaaaaccaggtgcncagcttatcccggctaatggttagaattgaaactttggagcagaaacttacctgtctggaactcatacagaacacacactcacagtcctgcctgaagtcctttctggaacgtcatgggctgtctttgttgtggatctggatggcagagctaggtgacggccgggaaagtaaccagaagcttcaggaagagattataaagactttggancacttgcccattcctactaaaaatatgttggaggaaagcaaagtacttccaattattcaacgctggtctcagactaagactgctgtccctccgttgagtgaaggagatgggtattctagtgagaatacatcgcgtgctcatacaccactcaacacacctgatccttccaccaagctgagcacagaagctgacacagacactcccaagaaactaatgtttcgcagactgaaaattataagtgaaaatagcatggacagtgcaatctctgatgcaaccagtgagctagaaggcaaggatggcaaagaggatcttgatcaattagaaaatgtccctgtagaggaagaggaagaattgcagtcacaacagctactcccacaacagctgcctgaatgcaaagttgatagtgaaaccaacatagaagctagtaagctacctacatctgaaccagaagctgacgctgaaatagagcccaaagagagcaacggcacaaaactagaagaacctattaatgaagaaacaccatcccaagatgaagaggagggtgtgtctgatgtggagagtgaaaggagccaagaacagccagataaaacagtggatataagtgatttggccaccaaactcctggacagttggaaagacctaaaggaggtatatcgaattccaaagaaaagtcaaactgaaaaggaaaacacaacaactgaacgaggaagggatgctgttggcttcagagatcaaacacctgccccgaagactcctaataggtcaagagagagagacccagacaagcaaactcaaaataaagagaaaaggaaacgaagaagctccctctcaccaccctcttctgcctatgagcggggaacaaaaaggccagatgacagatatgatacaccaacttctaaaaagaaagtacgaattaaagaccgcaataaactttctacagaggaacgccggaagttgtttgagcaagaggtggctcaacgggaggctcagaaacaacagcaacagatgcagaacctgggaatgacatcaccactgccctatgactctcttggttataatgccccgcatcatccctttgctggttacccaccaggttatcccatgcaggcctatgtggatcccagcaaccctaatgctggaaaggtgctcctgcccacacccagcatggacccagtgtgttctcctgctccttatgatcatgctcagcccttggtgggacattctacagaacccctttctgcccctccaccagtaccagtggtgccacatgtggcagctcctgtggaagtttccagttcccagtatgtggcccagagtgatggtgtagtacaccaagactccagcgttgctgtcttgccagtgccggcccccggcccagttcagggacagaattatagtgtttgggattcaaaccaacagtctgtcagtgtacagcagcagtactctcctgcacagtctcaagcaaccatatattatcaaggacagacatgtccaacagtctatggtgtgacatcaccttattcacagacaactccaccaattgtacagagttatgcccagccaagtcttcagtatatccaggggcaacagattttcacagctcatccacaaggagtggtggtacagccagccgcagcagtgactacaatagttgcaccagggcagcctcagcccttgcagccatctgaaatggttgtgacaaataatctcttggatctgccgcccccctctcctcccaaaccaaaaaccattgtcttacctcccaactggaagacagctcgagatccagaagggaagatttattactaccatgtgatcacaaggcagactcagtgggatcctcctacttgggaaagcccaggagatgatgccagccttgagcatgaagctgagatggacctgggaactccaacatatgatgaaaaccccatgaaggcctcgaaaaagcccaagacagcagaagcagacacctccagtgaactagcaaagaaaagcaaagaagtattcagaaaagagatgtcccagttcatcgtccagtgcctgaacccttaccggaaacctgactgcaaagtgggaagaattaccacaactgaagactttaaacatctggctcgcaagctgactcacggtgttatgaataaggagctgaagtactgtaagaatcctgaggacctggagtgcaatgagaatgtgaaacacaaaaccaaggagtacattaagaagtacatgcagaagtttggggctgtttacaaacccaaagaggacactgaattagagtgactgttgggccagggtgggaggatgggtggtcaggtaagacagactctagggagaggaaatcctgtgggcctttctgtcccacccctgtcagcactgtgctactgatgatacatcaccctggggaattcaaccctgcagatgtcaactgaaggccacaaaaatgaactccatctacaagtgattacctagttgtgagctgttggcatgtggttagaagccatcagaggtgcaagggcttagaaaagaccctggccagacctgactccactcttaaacctgggtcttctccttggcggtgctgtcagcgcacagacccatgcgcatccccacccacaaccctttaccctgatgatctgtattatattttaatgtatatgtgaatatattgaaaataatttgttttt

SEQ ID NO: 343478 - DNA, 7788 bp, Homo sapiens
  misc_feature (2618)..(2618): n is a, c, g, or t
  misc_feature (2620)..(2620): n is a, c, g, or t
  misc_feature (2625)..(2626): n is a, c, g, or t
  misc_feature (2629)..(2630): n is a, c, g, or t
  misc_feature (2635)..(2635): n is a, c, g, or t
  misc_feature (2637)..(2637): n is a, c, g, or t
  misc_feature (2705)..(2705): n is a, c, g, or t
  misc_feature (3991)..(3991): n is a, c, g, or t
  misc_feature (4107)..(4107): n is a, c, g, or t
  misc_feature (4315)..(4315): n is a, c, g, or t
acgatctaaaacagacagagatgataaatattttagctattcaaaacttgaatgagatactcggtatgtatcttcccgatgtagatcagaaagagagcgacggcggagcagatctcactctaggtctgagagaggctctagaactaatttatcctattccagatcagaacgatctcattattatgactctgatcgtcgctaccataggagctccccttatcgagagaggacgcgctattctcggccatacacagataacagagcacgagagagttctgactcagaagaagagtataagaagacatactcaaggcgtacctcatctcattcctcttcttacagggacctaaggacatcatcctattctaaatctgatcgggactgtaaaactgagacctcttacttagagatggaaagaagaggcaagtattcttcaaaactagaaagagaatctaaaaggacttcagaaaatgaagcaattaaaagatgttgttctccccctaatgaactgggattccgacgagggtcatcatattctaagcatgacagtagtgcttcccgttataaatctaccctttcaaaacctatacccaagtctgataaatttaaaaattctttctgttgtacagaattaaatgaagaaatcaaacaatctcattcttttagtttacagacaccttgttcaaaaggtagtgaattaagaatgattaataaaaatcctgaaagagaaaaggctgggtctccagctccatcaaatcgattaaatgattcacctactttaaaaaagctagatgaattgcctatttttaagtccgaatttataacacatgatagccatgatagtattaaggaattagactctttatctaaagtgaagaatgatcaattaagaagtttttgtcccatagaattaaatataaatggatctcctggggcagaatctgatttggcaacattttgcacttctaaaactgatgctgttttaatgacttctgatgatagtgtgactggatcggaattatcccctttggtcaaagcatgcatgctttcatcaaatggatttcagaatattagtaggtgcaaagaaaaagacttggatgatacctgcatgctgcataagaagtcagaaagcccatttagagaaacagaacctctggtgtcaccacaccaagataaactcatgtctatgccagttatgactgtggattattccaaaacagtagttaaagaaccagttgatacgagggtttcttgctgcaaaaccaaagattcagacatatactgtactttgaacgatagcaacccttctttgtgtaactctgaagctgaaaatattgagccttcagttatgaagatttcttcaaatagctttatgaatgtgcatttggaatcaaaaccagttatatgtgatagtagaaatttgacagatcactcaaaatttgcatgtgaagaatataagcagagcatcggtagcactagttcagcttctgttaatcattttgatgatttatatcaacctattgggagttcaggtattgcttcatctcttcagagtcttccaccaggaataaaggtggacagtctaactctcttgaaatgcggagagaacacatctccagttctggatgcagtgctaaagagtaaaaaaagttcagagtttttaaagcatgcagggaaagaaacaatagtagaagtaggtagtgaccttcctgattcaggaaagggatttgcttccagggagaacaggcgtaataatgggttatctgggaaatgtttgcaagaggctcaaaaagaagggaattccatattgcctgaaagaagaggaagaccagaaatctctttagatgaaagaggagaaggaggacatgtgcatacttctgatgactcagaagttgtattttcttcttgtgatttgaatttaaccatggaagacagtgatggtgtaacttatgcattaaagtgtgacagtagtggtcatgccccagaaattgtgtctacagttcatgaagattattctggctcttctgaaagttcaaatgatgaaagtgattcagaagatacggattcggatgatagcagtattccaagaaaccgtctccagtctgttgtggttgtgccaaagaattctactttgcccatggaagaaacaagtccttgttcttctcggagcagtcaaagttatagacactattctgaccattgggaagatgagagattggagtcaaggagacatttgtatgaggaaaaatttgaaagtatagcaagtaaagcctgtcctcaaactgataagtttttccttcataaaggaacagagaagaatccggaaatttcttttacacagtccagtagaaaacaaatagataaccgcctgcctgaactttctcatcctcagagtgatggggttgatagtacaagtcatacagatgtgaaatctgaccctctgggtcacccaaattcagaggaaaccgtgaaagccaaaataccttctaggcagcaagaagagctgccaatttattcttctgattttgaagatgtcccaaataagtcttggcaacagaccactttccaaaacaggccagatagtagactgggaaaaacagaattgagtttttcttccncntgtgnnatnncacangnggatggcttgcactcatcagaagagctcagaaacttaggttgggacttctctcaagaaaagccttctnccacgtatcagcaacctgacagtagctatggagcttgtggtggacacaagtatcagcaaaatgcagaacagtatggtgggacacgtgattactggcaaggcaatggttactgggatccaagatcaggtagacctcctggaactggggttgtgtatgatcgaactcaaggacaagtaccagattccctaacagatgatcgtgaagaagaggagaattgggatcaacaggatggatcccatttttcagaccagtccgataaatttcttctatcccttcagaaagacaaggggtcagtgcaagcacctgaaataagcagcaattccattaaggacactttagctgtgaatgaaaagaaagatttttcaaaaaacttagaaaaaaatgatatcaaagatagagggcctcttaaaaaaaggaggcaggaaatagagagtgattctgaaagtgatggtgagcttcaggacagaaagaaagttagagtggaggtagagcagggagagacatcagtgcccccaggttcagcactggttgggccctcctgtgtcatggatgacttcagggacccacagcgatggaaggaatgtgccaagcaagggaaaatgccatgttactttgatcttattgaagaaaatgtttatttaacagaaagaaagaagaataaatctcatcgagatattaagcgaatgcagtgtgagtgtacacctctttctaaagatgaaagagctcaaggtgaaatagcatgtggggaagattgtcttaatcgtcttctcatgattgaatgttcttctcggtgtccaaatggggattattgttccaatagacggtttcagagaaaacagcatgcagatgtggaagtcatactcacagaaaagaaaggctggggcttgagagctgccaaagaccttccttcgaacacctttgtcctagaatattgtggagaggtactcgatcataaagagtttaaagctcgagtgaaggagtatgcacgaaacaaaaacatccattactatttcatggccctgaagaatgatgagataatagatgccactcaaaaaggaaattgctctcgtttcatgaatcacagctgtgaaccaaattgtgaaacccaaaaatggactgtgaacggacaactgagggttgggttttttaccaccaaactggttccttcaggctcagagttaacgtttgactatcagttccagagatatggaaaagaagcccagaaatgtttctgcggatcagccaattgccggggttacctgggaggagaaaacagagtcagcatnagagcagcaggagggaaaatgaagaaggaacgatctcgtaagaaggattcagtggatggagagctagaagctctgatggaaaatggtgagggtctctctgataaaaaccaggtgcncagcttatcccggctaatggttagaattgaaactttggagcagaaacttacctgtctggaactcatacagaacacacactcacagtcctgcctgaagtcctttctggaacgtcatgggctgtctttgttgtggatctggatggcagagctaggtgacggccgggaaagtaaccagaagcttcaggaagagattataaagactttggancacttgcccattcctactaaaaatatgttggaggaaagcaaagtacttccaattattcaacgctggtctcagactaagactgctgtccctccgttgagtgaaggagatgggtattctagtgagaatacatcgcgtgctcatacaccactcaacacacctgatccttccaccaagctgagcacagaagctgacacagacactcccaagaaactaatgtttcgcagactgaaaattataagtgaaaatagcatggacagtgcaatctctgatgcaaccagtgagctagaaggcaaggatggcaaagaggatcttgatcaattagaaaatgtccctgtagaggaagaggaagaattgcagtcacaacagctactcccacaacagctgcctgaatgcaaagttgatagtgaaaccaacatagaagctagtaagctacctacatctgaaccagaagctgacgctgaaatagagcccaaagagagcaacggcacaaaactagaagaacctattaatgaagaaacaccatcccaagatgaagaggagggtgtgtctgatgtggagagtgaaaggagccaagaacagccagataaaacagtggatataagtgatttggccaccaaactcctggacagttggaaagacctaaaggaggtatatcgaattccaaagaaaagtcaaactgaaaaggaaaacacaacaactgaacgaggaagggatgctgttggcttcagagatcaaacacctgccccgaagactcctaataggtcaagagagagagacccagacaagcaaactcaaaataaagagaaaaggaaacgaagaagctccctctcaccaccctcttctgcctatgagcggggaacaaaaaggccagatgacagatatgatacaccaacttctaaaaagaaagtacgaattaaagaccgcaataaactttctacagaggaacgccggaagttgtttgagcaagaggtggctcaacgggaggctcagaaacaacagcaacagatgcagaacctgggaatgacatcaccactgccctatgactctcttggttataatgccccgcatcatccctttgctggttacccaccaggttatcccatgcaggcctatgtggatcccagcaaccctaatgctggaaaggtgctcctgcccacacccagcatggacccagtgtgttctcctgctccttatgatcatgctcagcccttggtgggacattctacagaacccctttctgcccctccaccagtaccagtggtgccacatgtggcagctcctgtggaagtttccagttcccagtatgtggcccagagtgatggtgtagtacaccaagactccagcgttgctgtcttgccagtgccggcccccggcccagttcagggacagaattatagtgtttgggattcaaaccaacagtctgtcagtgtacagcagcagtactctcctgcacagtctcaagcaaccatatattatcaaggacagacatgtccaacagtctatggtgtgacatcaccttattcacagacaactccaccaattgtacagagttatgcccagccaagtcttcagtatatccaggggcaacagattttcacagctcatccacaaggagtggtggtacagccagccgcagcagtgactacaatagttgcaccagggcagcctcagcccttgcagccatctgaaatggttgtgacaaataatctcttggatctgccgcccccctctcctcccaaaccaaaaaccattgtcttacctcccaactggaagacagctcgagatccagaagggaagatttattactaccatgtgatcacaagagacagagtctttctttgttgcccagactgatctgcacgaactcctggcttcaagcgatcctcccacctaagcctcccaaaatgctgggatgacaggcgtgaggcaccacacccagctacaactgcagactcagtgggatcctcctacttgggaaagcccaggagatgatgccagccttgagcatgaagctgagatggacctgggaactccaacatatgatgaaaaccccatgaaggcctcgaaaaagcccaagacagcagaagcagacacctccagtgaactagcaaagaaaagcaaagaagtattcagaaaagagatgtcccagttcatcgtccagtgcctgaacccttaccggaaacctgactgcaaagtgggaagaattaccacaactgaagactttaaacatctggctcgcaaggtactccccttgcttttggtagcccaccaggcaatgttctgggcaaactgtgtaccttctaagaagcccttttcatcatagaaagtatttttttttttcttgtcagatgtcagagctggggacccaggaacggggagggaaggtttggggagggatgcgtaccttacatgacagcagtagttctctaagaaattttcagagctcagcttgtcctttctggtgatcatagcaccagcctgccccaacatctacccccttattaacttcctgtcttggtgagaagggccctgaagcagcaggctggattaccacccctgtcctccccctcatataatttctgctctgattggtggctgtggtctctcttcctgtgccctggacagctgactcacggtgttatgaataaggagctgaagtactgtaagaatcctgaggacctggagtgcaatgagaatgtgaaacacaaaaccaaggagtacattaagaagtacatgcagaagtttggggctgtttacaaacccaaagaggacactgaattagagtgactgttgggccagggtgggaggatgggtggtcaggtaagacagactctagggagaggaaatcctgtgggcctttctgtcccacccctgtcagcactgtgctactgatgatacatcaccctggggaattcaaccctgcagatgtcaactgaaggccacaaaaatgaactccatctacaagtgattacctagttgtgagctgttggcatgtggttagaagccatcagaggtgcaagggcttagaaaagaccctggccagacctgactccactcttaaacctgggtcttctccttggcggtgctgtcagcgcacagacccatgcgcatccccacccacaaccctttaccctgatgatctgtattatattttaatgtatatgtgaatatattgaaaataatttgttttttcctggtttttgtttggttttcgttttgcttttagcctctacatgctaggatcacaggaagactttgtaaggacagtttaagttctcctgcaaggtttaatttgttatcatgtaaatattccaaagcaggctgccttgtggttttggccagccttgtgctatgttgataagattgatttactgcttaaaatcactttactttatccaatttttactgaactttttatgtaaaaaaataaaatcaattaaagaacttggcatgtgtgttccctaaaagttaat

SEQ ID NO: 343479 - DNA, 6690 bp, Homo sapiens
  misc_feature (2618)..(2618): n is a, c, g, or t
  misc_feature (2620)..(2620): n is a, c, g, or t
  misc_feature (2625)..(2626): n is a, c, g, or t
  misc_feature (2629)..(2630): n is a, c, g, or t
  misc_feature (2635)..(2635): n is a, c, g, or t
  misc_feature (2637)..(2637): n is a, c, g, or t
  misc_feature (2705)..(2705): n is a, c, g, or t
  misc_feature (3991)..(3991): n is a, c, g, or t
  misc_feature (4107)..(4107): n is a, c, g, or t
  misc_feature (4315)..(4315): n is a, c, g, or t
acgatctaaaacagacagagatgataaatattttagctattcaaaacttgaatgagatactcggtatgtatcttcccgatgtagatcagaaagagagcgacggcggagcagatctcactctaggtctgagagaggctctagaactaatttatcctattccagatcagaacgatctcattattatgactctgatcgtcgctaccataggagctccccttatcgagagaggacgcgctattctcggccatacacagataacagagcacgagagagttctgactcagaagaagagtataagaagacatactcaaggcgtacctcatctcattcctcttcttacagggacctaaggacatcatcctattctaaatctgatcgggactgtaaaactgagacctcttacttagagatggaaagaagaggcaagtattcttcaaaactagaaagagaatctaaaaggacttcagaaaatgaagcaattaaaagatgttgttctccccctaatgaactgggattccgacgagggtcatcatattctaagcatgacagtagtgcttcccgttataaatctaccctttcaaaacctatacccaagtctgataaatttaaaaattctttctgttgtacagaattaaatgaagaaatcaaacaatctcattcttttagtttacagacaccttgttcaaaaggtagtgaattaagaatgattaataaaaatcctgaaagagaaaaggctgggtctccagctccatcaaatcgattaaatgattcacctactttaaaaaagctagatgaattgcctatttttaagtccgaatttataacacatgatagccatgatagtattaaggaattagactctttatctaaagtgaagaatgatcaattaagaagtttttgtcccatagaattaaatataaatggatctcctggggcagaatctgatttggcaacattttgcacttctaaaactgatgctgttttaatgacttctgatgatagtgtgactggatcggaattatcccctttggtcaaagcatgcatgctttcatcaaatggatttcagaatattagtaggtgcaaagaaaaagacttggatgatacctgcatgctgcataagaagtcagaaagcccatttagagaaacagaacctctggtgtcaccacaccaagataaactcatgtctatgccagttatgactgtggattattccaaaacagtagttaaagaaccagttgatacgagggtttcttgctgcaaaaccaaagattcagacatatactgtactttgaacgatagcaacccttctttgtgtaactctgaagctgaaaatattgagccttcagttatgaagatttcttcaaatagctttatgaatgtgcatttggaatcaaaaccagttatatgtgatagtagaaatttgacagatcactcaaaatttgcatgtgaagaatataagcagagcatcggtagcactagttcagcttctgttaatcattttgatgatttatatcaacctattgggagttcaggtattgcttcatctcttcagagtcttccaccaggaataaaggtggacagtctaactctcttgaaatgcggagagaacacatctccagttctggatgcagtgctaaagagtaaaaaaagttcagagtttttaaagcatgcagggaaagaaacaatagtagaagtaggtagtgaccttcctgattcaggaaagggatttgcttccagggagaacaggcgtaataatgggttatctgggaaatgtttgcaagaggctcaaaaagaagggaattccatattgcctgaaagaagaggaagaccagaaatctctttagatgaaagaggagaaggaggacatgtgcatacttctgatgactcagaagttgtattttcttcttgtgatttgaatttaaccatggaagacagtgatggtgtaacttatgcattaaagtgtgacagtagtggtcatgccccagaaattgtgtctacagttcatgaagattattctggctcttctgaaagttcaaatgatgaaagtgattcagaagatacggattcggatgatagcagtattccaagaaaccgtctccagtctgttgtggttgtgccaaagaattctactttgcccatggaagaaacaagtccttgttcttctcggagcagtcaaagttatagacactattctgaccattgggaagatgagagattggagtcaaggagacatttgtatgaggaaaaatttgaaagtatagcaagtaaagcctgtcctcaaactgataagtttttccttcataaaggaacagagaagaatccggaaatttcttttacacagtccagtagaaaacaaatagataaccgcctgcctgaactttctcatcctcagagtgatggggttgatagtacaagtcatacagatgtgaaatctgaccctctgggtcacccaaattcagaggaaaccgtgaaagccaaaataccttctaggcagcaagaagagctgccaatttattcttctgattttgaagatgtcccaaataagtcttggcaacagaccactttccaaaacaggccagatagtagactgggaaaaacagaattgagtttttcttccncntgtgnnatnncacangnggatggcttgcactcatcagaagagctcagaaacttaggttgggacttctctcaagaaaagccttctnccacgtatcagcaacctgacagtagctatggagcttgtggtggacacaagtatcagcaaaatgcagaacagtatggtgggacacgtgattactggcaaggcaatggttactgggatccaagatcaggtagacctcctggaactggggttgtgtatgatcgaactcaaggacaagtaccagattccctaacagatgatcgtgaagaagaggagaattgggatcaacaggatggatcccatttttcagaccagtccgataaatttcttctatcccttcagaaagacaaggggtcagtgcaagcacctgaaataagcagcaattccattaaggacactttagctgtgaatgaaaagaaagatttttcaaaaaacttagaaaaaaatgatatcaaagatagagggcctcttaaaaaaaggaggcaggaaatagagagtgattctgaaagtgatggtgagcttcaggacagaaagaaagttagagtggaggtagagcagggagagacatcagtgcccccaggttcagcactggttgggccctcctgtgtcatggatgacttcagggacccacagcgatggaaggaatgtgccaagcaagggaaaatgccatgttactttgatcttattgaagaaaatgtttatttaacagaaagaaagaagaataaatctcatcgagatattaagcgaatgcagtgtgagtgtacacctctttctaaagatgaaagagctcaaggtgaaatagcatgtggggaagattgtcttaatcgtcttctcatgattgaatgttcttctcggtgtccaaatggggattattgttccaatagacggtttcagagaaaacagcatgcagatgtggaagtcatactcacagaaaagaaaggctggggcttgagagctgccaaagaccttccttcgaacacctttgtcctagaatattgtggagaggtactcgatcataaagagtttaaagctcgagtgaaggagtatgcacgaaacaaaaacatccattactatttcatggccctgaagaatgatgagataatagatgccactcaaaaaggaaattgctctcgtttcatgaatcacagctgtgaaccaaattgtgaaacccaaaaatggactgtgaacggacaactgagggttgggttttttaccaccaaactggttccttcaggctcagagttaacgtttgactatcagttccagagatatggaaaagaagcccagaaatgtttctgcggatcagccaattgccggggttacctgggaggagaaaacagagtcagcatnagagcagcaggagggaaaatgaagaaggaacgatctcgtaagaaggattcagtggatggagagctagaagctctgatggaaaatggtgagggtctctctgataaaaaccaggtgcncagcttatcccggctaatggttagaattgaaactttggagcagaaacttacctgtctggaactcatacagaacacacactcacagtcctgcctgaagtcctttctggaacgtcatgggctgtctttgttgtggatctggatggcagagctaggtgacggccgggaaagtaaccagaagcttcaggaagagattataaagactttggancacttgcccattcctactaaaaatatgttggaggaaagcaaagtacttccaattattcaacgctggtctcagactaagactgctgtccctccgttgagtgaaggagatgggtattctagtgagaatacatcgcgtgctcatacaccactcaacacacctgatccttccaccaagctgagcacagaagctgacacagacactcccaagaaactaatgtttcgcagactgaaaattataagtgaaaatagcatggacagtgcaatctctgatgcaaccagtgagctagaaggcaaggatggcaaagaggatcttgatcaattagaaaatgtccctgtagaggaagaggaagaattgcagtcacaacagctactcccacaacagctgcctgaatgcaaagttgatagtgaaaccaacatagaagctagtaagctacctacatctgaaccagaagctgacgctgaaatagagcccaaagagagcaacggcacaaaactagaagaacctattaatgaagaaacaccatcccaagatgaagaggagggtgtgtctgatgtggagagtgaaaggagccaagaacagccagataaaacagtggatataagtgatttggccaccaaactcctggacagttggaaagacctaaaggaggtatatcgaattccaaagaaaagtcaaactgaaaaggaaaacacaacaactgaacgaggaagggatgctgttggcttcagagatcaaacacctgccccgaagactcctaataggtcaagagagagagacccagacaagcaaactcaaaataaagagaaaaggaaacgaagaagctccctctcaccaccctcttctgcctatgagcggggaacaaaaaggccagatgacagatatgatacaccaacttctaaaaagaaagtacgaattaaagaccgcaataaactttctacagaggaacgccggaagttgtttgagcaagaggtggctcaacgggaggctcagaaacaacagcaacagatgcagaacctgggaatgacatcaccactgccctatgactctcttggttataatgccccgcatcatccctttgctggttacccaccaggttatcccatgcaggcctatgtggatcccagcaaccctaatgctggaaaggtgctcctgcccacacccagcatggacccagtgtgttctcctgctccttatgatcatgctcagcccttggtgggacattctacagaacccctttctgcccctccaccagtaccagtggtgccacatgtggcagctcctgtggaagtttccagttcccagtatgtggcccagagtgatggtgtagtacaccaagactccagcgttgctgtcttgccagtgccggcccccggcccagttcagggacagaattatagtgtttgggattcaaaccaacagtctgtcagtgtacagcagcagtactctcctgcacagtctcaagcaaccatatattatcaaggacagacatgtccaacagtctatggtgtgacatcaccttattcacagacaactccaccaattgtacagagttatgcccagccaagtcttcagtatatccaggggcaacagattttcacagctcatccacaaggagtggtggtacagccagccgcagcagtgactacaatagttgcaccagggcagcctcagcccttgcagccatctgaaatggttgtgacaaataatctcttggatctgccgcccccctctcctcccaaaccaaaaaccattgtcttacctcccaactggaagacagctcgagatccagaagggaagatttattactaccatgtgatcacaaggcagactcagtgggatcctcctacttgggaaagcccaggagatgatgccagccttgagcatgaagctgagatggacctgggaactccaacatatgatgaaaaccccatgaaggcctcgaaaaagcccaagacagcagaagcagacacctccagtgaactagcaaagaaaagcaaagaagtattcagaaaagagatgtcccagttcatcgtccagtgcctgaacccttaccggaaacatccaggggcaacagattttcacagctcatccacaaggagtggtggtacagccagccgcagcagtgactgattacctagttgtgagctgttggcatgtggttagaagccatcagaggtgcaagggcttagaaaagaccctggccagacctgactccactcttaaacctgggtcttctccttggcggtgctgtcagcgcacagacccatgcgcatccccacccacaaccctttgcaatgagaatgtgaaacccaaaaccaaggagtattctaaagatttttttccataaaaaaataaaatcaattaaagaacttgga

SEQ ID NO: 343480 - DNA, 1156 bp, Homo sapiens
gaactcattgttattttttacaaataactagaaacaatactgttgctagaattcctgttctactgtaatttaatcatcactgtttctttttagccttcagtaaggaggatactagttctttggcattattgggaataaaactttgtcaatttcagctttattgaaagttctcccaaatatattgtttttgtttacacaaaggaaaaggaacaaaaacaataaataaatacctttgtttttttttcttttttgagacggagtctcgctctgttgcccaggctggagtgcagtggtgcgatctcggctcactgcaacctccgcctcccaggttcaagcgattcttcttcctcagcctcccgagtagctggaactataggcacgcaccaccacacccagctaatttttgtatttttagtagagatggggtttcatcatgttggcaaggctggtttcgaactcctgacctcgtgatctgcctacctcagcctcccaaagtgctgggattacaggtatgggccactgggcccagcctatttttatttctttgatgtaggtgatctaaatagtagatgaggacaggaaatggggtgaaggtaataatagtattattagaaaagtcttcactgaaaattgaaggaaatacatattaatcgtggaaaaagatagtgtgaaaaatgtgtaatttcgttaacatttatttgtacaggcacattcttgatgttgtgagtcagatacttgataaatgtccattttttgtagtaattgatgtaaaaatgggccatgtgaagaattttcataatgtaatttgtgtctttgtatattttgaactacatatagatttgtggcacttaaattattaatttttgatttcttaagagtgaagtctgtaaatgatttctctctgctgtacttctgtgtttgtatggttggacattttgaaaactggtgagattgcacagtcccaaacctggatgtcttaaatacaaggaattacaaactgtgatttttgtcttgaagacctggaagaattcattgtgcttcagtatgtatttgtactgcacttgattaattagttaagtattggtctggtgcaattgacattaactgtcatcaactcctctattttgtgctaaataaagtcatttagtcagaatgg

SEQ ID NO: 343481 - DNA, 3039 bp, Homo sapiens
tccatctccctcacccatgcccccacccaatctaaagagacagtgctgtacattctcatagagatagagaagatctaaaaagttgagactactcaatccagttaacaacagcaggagcactagagtttgttcatttattctctctgtaaaacaagctgtgctttttttcttctgcctttaaaatgccacccgtgtattcaaaccatggccacttgatacttatgtagaatccatcgtgggctgatgcaagccctttatttaggcttagtgttgtgggcaccaatgtcgagcatcgttgtgacttgtgctgtatgattctcactgaagaatttcctttcagccaagaagcagtgaggtctgggaatattccaaagtcatgtctctgaatatgtgtccttgacatgcaagctttgtaaaaccccatccccgcttaggtgcgaggcatcaccttctcacaagtgtttagtttcttttaaccacaagtatcattcttgggtgataatatagtttcattctacttagggattgtttagaaaacaaagaaagagccaattaaattttttagtttttgaaatttttatttatatgtatacttagatgagtattttaagctgtcgacctttagtttgccatacgggtaggactgtatttcatgttaacaactggtggtaatgataagccttcttctagcgtattttctcttctttcctgtcactttccttttttaagtttttttttttaaagactggaattttttttggctttatcttgtcttaccgtagagatttgttcaaaactctaagccctaccacctcccctttaataagctctttaaatagttgaatcattaacaacctggtgggaggcaagtcatttaattgaaccactaggaagtgtattttcttttctttttctgccaactttttggtggcatttgtaaaagctgatataaaaggctctgagatgttattttcagttattccataggcaagcctttttacagagcatatgtctccagttggcagcttgagatatttccgagcatccggttctagctaccagtgcctcccaatgcttagtgcacagtactgtagactggccatcacccctctccttggaaaatgccactgtgctgtttgaaaaaaagcagccttttagggctagagtattttatataaacagaagagctaagttcctgaagactaagctagatagctgcagctatatgtaaattgtatatttttatgaacttttgaagcacacactcctgtttccctctgtgtagctttgtggggatttcatgtatatatgctgtctgaaagaatccagaggttggagtgccaatagaaaatgaaaacaaatgccttgtactacaggcagcctctgaaggtgaccacataactgtcttcactgtgaccaatcggagtccctgcttgcttgtgaagaaggggcttttgtaccttgttggagatgccacctcagaagttcacactgtgcaggaaaaaggttttattctctcctggcatacattagaatgtcagatgcttgcatccatgtggaccacgatgggcctctaaaaattggtgggcagggggtttgcttatgagttttctctggaaaccgattttactcctggatgtattgaatgccccttgagctttatgagatacgagtccacatggataaaatgttagagagtggagttctacagaggattccaggaagaggccatgtctgtgcagtcctagttccagacaggtgagaagctccaggaactactggctaccttgacaagctgggtaaatagttatcattctgggtaactggttgaaactctgacttttggacaagtaattcctggggttctgtctttggtagcatcaccagggatatttgggtgggacagacagaagacacacagctgcctgttctctcctgcccatcatgtttggcccactagatgaagctgtactcagcaatttagggaatgtaacccttctcagaactggccattttcaggggaagcttgggagagcaatagtatggtgagccccttagagatgagcgcctactccttcttggcgaatgctgccttcagatgcttaccaagtggtcactgcatctagtaagattatatttccagtacacttccttagggcagaaacaccatcctatcaggtttggtcagtcccttcttcatgaagggagtcatggggaattcctgaaaattttcttccttctgcagacagttggatgagtcccttagagaaggcatccagagacataactaaactgaatatcatcccatattgattttaggaattgactctaaaactctgtgcagaatcttgtgttgggattgtatcttgacattcctgttgtgttatttttcttaactggagtgtgtgctgcctttcaggtacaatttttgtgtaataaaagccagtgcattaagtttatatagactactttctatgcaagactgagatatggaatagataggaagagatatgtactgctgggtacatggacagtaagtgtgttttcagatggagtaccagcaccgaaaatgggttgagggaggatgggttgtatgtatgtttctgcccactaattttgagcagccatattatgaattaaatcgtcacagccaagtaataacccaagaatggtatgagtttcatgtgtaatagctcaaatggaataagcatgaatgctggagtggaccattatcctcaaatattctatgtcacttctcatttaaagactcttgttatgaactattagaaactttaggcaaaatcaaaagtatttgcggcaaaataaaggcctattctactcttatttaaagtgaaacactgtatacttgtttctctccaaagcgaaattaagtatttataatttcaattgcctcgataagtttccaagtcactgaaatctgctgaaggttttactgtattgttgcacaactttaagataatttttgtctcaatgtcaacttttttcactgaataaaaatttaactgggtcaagaaaaca

SEQ ID NO: 343482 - DNA, 376 bp, Homo sapiens
gtcgaccttggattgcttccacattttagctgttgtgaataatgctgctatctgtgaaaggtttttaaggacactgtttcttcgttgaaaagtgctgagtaatcatcctttggtttttaccattacctagaggctagtcttgagtgaaatataatttttggtaatccataaatggaaggcaagtcctactcatttttccttccagttgctattgagagaacacataggtacacagttgtctttcctttcttgcccttgtttgcttttggagcaactgagctggctttggcagtctcagtgcctgccttcacagacagcgtgtcatggaaggtgggatttcagcgggtgtttgatggtgatgccattcaggttgtat

SEQ ID NO: 343483 - DNA, 7816 bp, Homo sapiens
ttgctgcgtcaactgtgttccctttggcctggctgagtttgatactgtggggattcagtttaggcgctggcccgaggatatcccagcggtggtacttcggagacacctgtctgcatctgactgagccggctctcctggcctcgcgctgcacattctctcctggcggcggcgccacctgcagtagcgttcgcccgaacatggcgacacggagcagcaggagggagtcgcgactcccgttcctattcaccctggtcgcactgctgccgcccggagctctctgcgaagtctggacgcagaggctgcacggcggcagcgcgcccttgccccaggaccggggcttcctcgtggtgcagggcgacccgcgcgagctgcggctgtgggcgcgcggggatgccaggggggcgagccgcgcggacgagaagccgctccggaggaaacggagcgctgccctgcagcccgagcccatcaaggtgtacggacaggttagtctgaatgattcccacaatcagatggtggtgcactgggctggagagaaaagcaacgtgatcgtggccttggcccgagatagcctggcattggcgaggcccaagagcagtgatgtgtacgtgtcttacgactatggaaaatcattcaagaaaatttcagacaagttaaactttggcttgggaaataggagtgaagctgttatcgcccagttctaccacagccctgcggacaacaagcggtacatctttgcagacgcttatgcccagtacctctggatcacgtttgacttctgcaacactcttcaaggcttttccatcccatttcgggcagctgatctcctcctacacagtaaggcctccaaccttctcttgggctttgacaggtcccaccccaacaagcagctgtggaagtcagatgactttggccagacctggatcatgattcaggaacatgtcaagtccttttcttggggaattgatccctatgacaaaccaaataccatctacattgaacgacacgaaccctctggctactccactgtcttccgaagtacagatttcttccagtcccgggaaaaccaggaagtgatccttgaggaagtgagagattttcagcttcgggacaagtacatgtttgctacaaaggtggtgcatctcttgggcagtgaacagcagtcttctgtccagctctgggtctcctttggccggaagcccatgagagcagcccagtttgtcacaagacatcctattaatgaatattacatcgcagatgcctccgaggaccaggtgtttgtgtgtgtcagccacagtaacaaccgcaccaatttatacatctcagaggcagaggggctgaagttctccctgtccttggagaacgtgctctattacagcccaggaggggccggcagtgacaccttggtgaggtattttgcaaatgaaccatttgctgacttccaccgagtggaaggattgcaaggagtctacattgctactctgattaatggttctatgaatgaggagaacatgagatcggtcatcacctttgacaaagggggaacctgggagtttcttcaggctccagccttcacgggatatggagagaaaatcaattgtgagctttcccagggctgttcccttcatctggctcagcgcctcagtcagctcctcaacctccagctccggagaatgcccatcctgtccaaggagtcggctccaggcctcatcatcgccactggctcagtgggaaagaacttggctagcaagacaaacgtgtacatctctagcagtgctggagccaggtggcgagaggcacttcctggacctcactactacacatggggagaccacggcggaatcatcacggccattgcccagggcatggaaaccaacgagctaaaatacagtaccaatgaaggggagacctggaaaacattcatcttctctgagaagccagtgtttgtgtatggcctcctcacagaacctggggagaagagcactgtcttcaccatctttggctcgaacaaagagaatgtccacagctggctgatcctccaggtcaatgccacggatgccttgggagttccctgcacagagaatgactacaagctgtggtcaccatctgatgagcgggggaatgagtgtttgctgggacacaagactgttttcaaacggcggaccccccatgccacatgcttcaatggagaggactttgacaggccggtggtcgtgtccaactgctcctgcacccgggaggactatgagtgtgacttcggtttcaagatgagtgaagatttgtcattagaggtttgtgttccagatccggaattttctggaaagtcatactcccctcctgtgccttgccctgtgggttctacttacaggagaacgagaggctaccggaagatttctggggacacttgtagcggaggagatgttgaagcgcgactggaaggagagctggtcccctgtcccctggcagaagagaacgagttcattctgtatgctgtgaggaaatccatctaccgctatgacctggcctcgggagccaccgagcagttgcctctcaccgggctacgggcagcagtggccctggactttgactatgagcacaactgtttgtattggtccgacctggccttggacgtcatccagcgcctctgtttgaatggaagcacagggcaagaggtgatcatcaattctggcctggagacagtagaagctttggcttttgaacccctcagccagctgctttactgggtagatgcaggcttcaaaaagattgaggtagctaatccagatggcgacttccgactcacaatcgtcaattcctctgtgcttgatcgtcccagggctctggtcctcgtgccccaagagggggtgatgttctggacagactggggagacctgaagcctgggatttatcggagcaatatggatggttctgctgcctatcacctggtgtctgaggatgtgaagtggcccaatggcatctctgtggacgaccagtggatttactggacggatgcctacctggagtgcatagagcggatcacgttcagtggccagcagcgctctgtcattctggacaacctcccgcacccctatgccattgctgtctttaagaatgaaatctactgggatgactggtcacagctcagcatattccgagcttccaaatacagtgggtcccagatggagattctggcaaaccagctcacggggctcatggacatgaagattttctacaaggggaagaacactggaagcaatgcctgtgtgcccaggccatgcagcctgctgtgcctgcccaaggccaacaacagtagaagctgcaggtgtccagaggatgtgtccagcagtgtgcttccatcaggggacctgatgtgtgactgccctcagggctatcagctcaagaacaatacctgtgtcaaagaagagaacacctgtcttcgcaaccagtatcgctgcagcaacgggaactgtatcaacagcatttggtggtgtgactttgacaacgactgtggagacatgagcgatgagagaaactgccctaccaccatctgtgacctggacacccagtttcgttgccaggagtctgggacttgtatcccactgtcctataaatgtgaccttgaggatgactgtggagacaacagtgatgaaagtcattgtgaaatgcaccagtgccggagtgacgagtacaactgcagttccggcatgtgcatccgctcctcctgggtatgtgacggggacaacgactgcagggactggtctgatgaagccaactgtaccgccatctatcacacctgtgaggcctccaacttccagtgccgaaacgggcactgcatcccccagcggtgggcgtgtgacggggatacggactgccaggatggttccgatgaggatccagtcaactgtgagaagaagtgcaatggattccgctgcccaaacggcacttgcatcccatccagcaaacattgtgatggtctgcgtgattgctctgatggctccgatgaacagcactgcgagcccctctgtacgcacttcatggactttgtgtgtaagaaccgccagcagtgcctgttccactccatggtctgtgacggaatcatccagtgccgcgacgggtccgatgaggatgcggcgtttgcaggatgctcccaagatcctgagttccacaaggtatgtgatgagttcggtttccagtgtcagaatggagtgtgcatcagtttgatttggaagtgcgacgggatggatgattgcggcgattattctgatgaagccaactgcgaaaaccccacagaagccccaaactgctcccgctacttccagtttcggtgtgagaatggccactgcatccccaacagatggaaatgtgacagggagaacgactgtggggactggtctgatgagaaggattgtggagattcacatattcttcccttctcgactcctgggccctccacgtgtctgcccaattactaccgctgcagcagtgggacctgcgtgatggacacctgggtgtgcgacgggtaccgagattgtgcagatggctctgacgaggaagcctgccccttgcttgcaaacgtcactgctgcctccactcccacccaacttgggcgatgtgaccgatttgagttcgaatgccaccaaccgaagacgtgtattcccaactggaagcgctgtgacggccaccaagattgccaggatggccgggacgaggccaattgccccacacacagcaccttgacttgcatgagcagggagttccagtgcgaggacggggaggcctgcattgtgctctcggagcgctgcgacggcttcctggactgctcggacgagagcgatgaaaaggcctgcagtgatgagttgactgtgtacaaagtacagaatcttcagtggacagctgacttctctggggatgtgactttgacctggatgaggcccaaaaaaatgccctctgcttcttgtgtatataatgtctactacagggtggttggagagagcatatggaagactctggagacccacagcaataagacaaacactgtattaaaagtcttgaaaccagataccacgtatcaggttaaagtacaggttcagtgtctcagcaaggcacacaacaccaatgactttgtgaccctgaggaccccagagggattgccagatgcccctcgaaatctccagctgtcactccccagggaagcagaaggtgtgattgtaggccactgggctcctcccatccacacccatggcctcatccgtgagtacattgtagaatacagcaggagtggttccaagatgtgggcctcccagagggctgctagtaactttacagaaatcaagaacttattggtcaacactctatacaccgtcagagtggctgcggtgactagtcgtggaataggaaactggagcgattctaaatccattaccaccataaaaggaaaagtgatcccaccaccagatatccacattgacagctatggtgaaaattatctaagcttcaccctgaccatggagagtgatatcaaggtgaatggctatgtggtgaaccttttctgggcatttgacacccacaagcaagagaggagaactttgaacttccgaggaagcatattgtcacacaaagttggcaatctgacagctcatacatcctatgagatttctgcctgggccaagactgacttgggggatagccctctggcatttgagcatgttatgaccagaggggttcgcccacctgcacctagcctcaaggccaaagccatcaaccagactgcagtggaatgtacctggaccggcccccggaatgtggtttatggtattttctatgccacgtcctttcttgacctctatcgcaacccgaagagcttgactacttcactccacaacaagacggtcattgtcagtaaggatgagcagtatttgtttctggtccgtgtagtggtaccctaccaggggccatcctctgactacgttgtagtgaagatgatcccggacagcaggcttccaccccgtcacctgcatgtggttcatacgggcaaaacctccgtggtcatcaagtgggaatcaccgtatgactctcctgaccaggacttgttgtatgcaattgcagtcaaagatctcataagaaagactgacaggagctacaaagtaaaatcccgtaacagcactgtggaatacacccttaacaagttggagcctggcgggaaataccacatcattgtccaactggggaacatgagcaaagattccagcataaaaattaccacagtttcattatcagcacctgatgccttaaaaatcataacagaaaatgatcatgttcttctgttttggaaaagcctggctttaaaggaaaagcattttaatgaaagcaggggctatgagatacacatgtttgatagtgccatgaatatcacagcttaccttgggaatactactgacaatttctttaaaatttccaacctgaagatgggtcataattacacgttcaccgtccaagcaagatgcctttttggcaaccagatctgtggggagcctgccatcctgctgtacgatgagctggggtctggtgcagatgcatctgcaacgcaggctgccagatctacggatgttgctgctgtggtggtgcccatcttattcctgatactgctgagcctgggggtggggtttgccatcctgtacacgaagcaccggaggctgcagagcagcttcaccgccttcgccaacagccactacagctccaggctggggtccgcaatcttctcctctggggatgacctgggggaagatgatgaagatgcccctatgataactggattttcagatgacgtccccatggtgatagcctgaaagagctttcctcactagaaaccaaatggtgtaaatattttatttgataaagatagttgatggtttattttaaaagatgcactttgagttgcaatatgttatttttatatgggccaaaaacaaaaaacaaaaaaaaaaaaaaggaaagaaaggaatgaataaactttgtagtaatcaactgtgaacttcaaaccaggttgattttagtaacccaattgctttgatttgacattaatgtagtcttacagggctgtgcttgctgggcatgcttttacgtctgtgagataatttcggttcagtaaattggccaatctttttatttttctaagacacagaaatgtatttaatatattccattttgtttggatatagtttataggaaagtgtgtggatgtattatggcggaaggtttctttatgttattttgttaatttattgggactctgtgtaaggccaggctttagtggtcattagacaccacatgtgttatgagccccttacccatagggttgggggtgggaagagaagcatatttttttgccattccggaagcaatccatttttattcacttgtgtgtcatgtaatggtctttggcaggagagagcactgagtcattgctggagttcagttcaacagagctgcagcttgggaagccctgtaagcccacagcttcctctcttatattaattgatggaattttactgtatgtgcctctgtacaagatgtagctttgagagctacaaaatgataacactgctttattacacactggtttcattgtcattgcaaaaacttaccctggttgtgggggagagttctagatctgtgccatgatccatacactggctaatagagtacataatttttccattttccattttttgtttttacttactactgaaggatctcagatgtaaaattatgtatttggtttgagatggccacttattgtccttaaaaatccatactgata

SEQ ID NO: 343484 - DNA, 7858 bp, Homo sapiens
ttgctgcgtcaactgtgttccctttggcctggctgagtttgatactgtggggattcagtttaggcgctggcccgaggatatcccagcggtggtacttcggagacacctgtctgcatctgactgagccggctctcctggcctcgcgctgcacattctctcctggcggcggcgccacctgcagtagcgttcgcccgaacatggcgacacggagcagcaggagggagtcgcgactcccgttcctattcaccctggtcgcactgctgccgcccggagctctctgcgaagtctggacgcagaggctgcacggcggcagcgcgcccttgccccaggaccggggcttcctcgtggtgcagggcgacccgcgcgagctgcggctgtgggcgcgcggggatgccaggggggcgagccgcgcggacgagaagccgctccggaggaaacggagcgctgccctgcagcccgagcccatcaaggtgtacggacaggttagtctgaatgattcccacaatcagatggtggtgcactgggctggagagaaaagcaacgtgatcgtggccttggcccgagatagcctggcattggcgaggcccaagagcagtgatgtgtacgtgtcttacgactatggaaaatcattcaagaaaatttcagacaagttaaactttggcttgggaaataggagtgaagctgttatcgcccagttctaccacagccctgcggacaacaagcggtacatctttgcagacgcttatgcccagtacctctggatcacgtttgacttctgcaacactcttcaaggcttttccatcccatttcgggcagctgatctcctcctacacagtaaggcctccaaccttctcttgggctttgacaggtcccaccccaacaagcagctgtggaagtcagatgactttggccagacctggatcatgattcaggaacatgtcaagtccttttcttggggaattgatccctatgacaaaccaaataccatctacattgaacgacacgaaccctctggctactccactgtcttccgaagtacagatttcttccagtcccgggaaaaccaggaagtgatccttgaggaagtgagagattttcagcttcgggacaagtacatgtttgctacaaaggtggtgcatctcttgggcagtgaacagcagtcttctgtccagctctgggtctcctttggccggaagcccatgagagcagcccagtttgtcacaagacatcctattaatgaatattacatcgcagatgcctccgaggaccaggtgtttgtgtgtgtcagccacagtaacaaccgcaccaatttatacatctcagaggcagaggggctgaagttctccctgtccttggagaacgtgctctattacagcccaggaggggccggcagtgacaccttggtgaggtattttgcaaatgaaccatttgctgacttccaccgagtggaaggattgcaaggagtctacattgctactctgattaatggttctatgaatgaggagaacatgagatcggtcatcacctttgacaaagggggaacctgggagtttcttcaggctccagccttcacgggatatggagagaaaatcaattgtgagctttcccagggctgttcccttcatctggctcagcgcctcagtcagctcctcaacctccagctccggagaatgcccatcctgtccaaggagtcggctccaggcctcatcatcgccactggctcagtgggaaagaacttggctagcaagacaaacgtgtacatctctagcagtgctggagccaggtggcgagaggcacttcctggacctcactactacacatggggagaccacggcggaatcatcacggccattgcccagggcatggaaaccaacgagctaaaatacagtaccaatgaaggggagacctggaaaacattcatcttctctgagaagccagtgtttgtgtatggcctcctcacagaacctggggagaagagcactgtcttcaccatctttggctcgaacaaagagaatgtccacagctggctgatcctccaggtcaatgccacggatgccttgggagttccctgcacagagaatgactacaagctgtggtcaccatctgatgagcgggggaatgagtgtttgctgggacacaagactgttttcaaacggcggaccccccatgccacatgcttcaatggagaggactttgacaggccggtggtcgtgtccaactgctcctgcacccgggaggactatgagtgtgacttcggtttcaagatgagtgaagatttgtcattagaggtttgtgttccagatccggaattttctggaaagtcatactcccctcctgtgccttgccctgtgggttctacttacaggagaacgagaggctaccggaagatttctggggacacttgtagcggaggagatgttgaagcgcgactggaaggagagctggtcccctgtcccctggcagaagagaacgagttcattctgtatgctgtgaggaaatccatctaccgctatgacctggcctcgggagccaccgagcagttgcctctcaccgggctacgggcagcagtggccctggactttgactatgagcacaactgtttgtattggtccgacctggccttggacgtcatccagcgcctctgtttgaatggaagcacagggcaagaggtgatcatcaattctggcctggagacagtagaagctttggcttttgaacccctcagccagctgctttactgggtagatgcaggcttcaaaaagattgaggtagctaatccagatggcgacttccgactcacaatcgtcaattcctctgtgcttgatcgtcccagggctctggtcctcgtgccccaagagggggtgatgttctggacagactggggagacctgaagcctgggatttatcggagcaatatggatggttctgctgcctatcacctggtgtctgaggatgtgaagtggcccaatggcatctctgtggacgaccagtggatttactggacggatgcctacctggagtgcatagagcggatcacgttcagtggccagcagcgctctgtcattctggacaacctcccgcacccctatgccattgctgtctttaagaatgaaatctactgggatgactggtcacagctcagcatattccgagcttccaaatacagtgggtcccagatggagattctggcaaaccagctcacggggctcatggacatgaagattttctacaaggggaagaacactggaagcaatgcctgtgtgcccaggccatgcagcctgctgtgcctgcccaaggccaacaacagtagaagctgcaggtgtccagaggatgtgtccagcagtgtgcttccatcaggggacctgatgtgtgactgccctcagggctatcagctcaagaacaatacctgtgtcaaagaagagaacacctgtcttcgcaaccagtatcgctgcagcaacgggaactgtatcaacagcatttggtggtgtgactttgacaacgactgtggagacatgagcgatgagagaaactgccctaccaccatctgtgacctggacacccagtttcgttgccaggagtctgggacttgtatcccactgtcctataaatgtgaccttgaggatgactgtggagacaacagtgatgaaagtcattgtgaaatgcaccagtgccggagtgacgagtacaactgcagttccggcatgtgcatccgctcctcctgggtatgtgacggggacaacgactgcagggactggtctgatgaagccaactgtaccgccatctatcacacctgtgaggcctccaacttccagtgccgaaacgggcactgcatcccccagcggtgggcgtgtgacggggatacggactgccaggatggttccgatgaggatccagtcaactgtgagaagaagtgcaatggattccgctgcccaaacggcacttgcatcccatccagcaaacattgtgatggtctgcgtgattgctctgatggctccgatgaacagcactgcgagcccctctgtacgcacttcatggactttgtgtgtaagaaccgccagcagtgcctgttccactccatggtctgtgacggaatcatccagtgccgcgacgggtccgatgaggatgcggcgtttgcaggatgctcccaagatcctgagttccacaaggtatgtgatgagttcggtttccagtgtcagaatggagtgtgcatcagtttgatttggaagtgcgacgggatggatgattgcggcgattattctgatgaagccaactgcgaaaaccccacagaagccccaaactgctcccgctacttccagtttcggtgtgagaatggccactgcatccccaacagatggaaatgtgacagggagaacgactgtggggactggtctgatgagaaggattgtggagattcacatattcttcccttctcgactcctgggccctccacgtgtctgcccaattactaccgctgcagcagtgggacctgcgtgatggacacctgggtgtgcgacgggtaccgagattgtgcagatggctctgacgaggaagcctgccccttgcttgcaaacgtcactgctgcctccactcccacccaacttgggcgatgtgaccgatttgagttcgaatgccaccaaccgaagacgtgtattcccaactggaagcgctgtgacggccaccaagattgccaggatggccgggacgaggccaattgccccacacacagcaccttgacttgcatgagcagggagttccagtgcgaggacggggaggcctgcattgtgctctcggagcgctgcgacggcttcctggactgctcggacgagagcgatgaaaaggcctgcagtgatgagttgactgtgtacaaagtacagaatcttcagtggacagctgacttctctggggatgtgactttgacctggatgaggcccaaaaaaatgccctctgcttcttgtgtatataatgtctactacagggtggttggagagagcatatggaagactctggagacccacagcaataagacaaacactgtattaaaagtcttgaaaccagataccacgtatcaggttaaagtacaggttcagtgtctcagcaaggcacacaacaccaatgactttgtgaccctgaggaccccagagggattgccagatgcccctcgaaatctccagctgtcactccccagggaagcagaaggtgtgattgtaggccactgggctcctcccatccacacccatggcctcatccgtgagtacattgtagaatacagcaggagtggttccaagatgtgggcctcccagagggctgctagtaactttacagaaatcaagaacttattggtcaacactctatacaccgtcagagtggctgcggtgactagtcgtggaataggaaactggagcgattctaaatccattaccaccataaaaggaaaagtgatcccaccaccagatatccacattgacagctatggtgaaaattatctaagcttcaccctgaccatggagagtgatatcaaggtgaatggctatgtggtgaaccttttctgggcatttgacacccacaagcaagagaggagaactttgaacttccgaggaagcatattgtcacacaaagttggcaatctgacagctcatacatcctatgagatttctgcctgggccaagactgacttgggggatagccctctggcatttgagcatgttatgaccagaggggttcgcccacctgcacctagcctcaaggccaaagccatcaaccagactgcagtggaatgtacctggaccggcccccggaatgtggtttatggtattttctatgccacgtcctttcttgacctctatcgcaacccgaagagcttgactacttcactccacaacaagacggtcattgtcagtaaggatgagcagtatttgtttctggtccgtgtagtggtaccctaccaggggccatcctctgactacgttgtagtgaagatgatcccggacagcaggcttccaccccgtcacctgcatgtggttcatacgggcaaaacctccgtggtcatcaagtgggaatcaccgtatgactctcctgaccaggacttgttgtatgcaattgcagtcaaagatctcataagaaagactgacaggagctacaaagtaaaatcccgtaacagcactgtggaatacacccttaacaagttggagcctggcgggaaataccacatcattgtccaactggggaacatgagcaaagattccagcataaaaattaccacagtttcattatcagcacctgatgccttaaaaatcataacagaaaatgatcatgttcttctgttttggaaaagcctggctttaaaggaaaagcattttaatgaaagcaggggctatgagatacacatgtttgatagtgccatgaatatcacagcttaccttgggaatactactgacaatttctttaaaatttccaacctgaagatgggtcataattacacgttcaccgtccaagcaagatgcctttttggcaaccagatctgtggggagcctgccatcctgctgtacgatgagctggggtctggtgcagatgcatctgcaacgcaggctgccagatctacggatgttgctgctgtggtggtgcccatcttattcctgatactgctgagcctgggggtggggtttgccatcctgtacacgaagcaccggaggctgcagagcagcttcaccgccttcgccaacagccactacagctccaggctggggtccgcaatcttctcctctggggatgacctgggggaagatgatgaagatgcccctatgataactggattttcagatgacgtccccatggtgatagcctgaaagagctttcctcactagaaaccaaatggtgtaaatattttatttgataaagatagttgatggtttattttaaaagatgcactttgagttgcaatatgttatttttatatgggccaaaaacaaaaaacaaaaaaaaaaaaaaggaaagaaaggaatgaataaactttgtagtaatcaactgtgaacttcaaaccaggttgattttagtaacccaattgctttgatttgacattaatgtagtcttacagggctgtgcttgctgggcatgcttttacgtctgtgagataatttcggttcagtaaattggccaatctttttatttttctaagacacagaaatgtatttaataaaaacctcgagagagtgaaaaaaaaaaaaaaaaaaaaaaaaaacaaaaaataaaaaaaaaaaaaaaaaaaaaaaaaaaaaaaaaaaaaaaaaaaaaaaaaaaacaaaaaaaaaaaacgaggggcggggcccacaacacaccacacgagggggcgcgacaacaaacagcgcgcgcaccccccactatgtgagaaaaaagaggggagaaacaataagaggggaaatataaataaaaaagagagacgcggaggcggcgtcacaaaaaacggatcgtgaggaggagtggtagaaagcatctcgtgaccctgtctaccgagacacttaggagagaagacaagaaacccctactctttgtcggtggcgggagtccgaccatatcgtgggcgacgacccactcctccaccaacaaaaagttataattgaccccccgccattgagacgagttgacataaaataacaaaaaacatgcctagacgtgtgaaaaaacatgtgtgtgtattcacaaacaagcgggaggacaactcattgatgcgcggcgggccaagcagtgaaatcagtatgtctagggcacacaaggataagaggagaataagagcaagtgccacatctcattatccacacgcgaggtggtcttaatggaactaaagaaagagaaagccggacccaga

SEQ ID NO: 343485 - DNA, 2985 bp, Homo sapiens
tccatctccctcacccatgcccccacccaatctaaagagacagtgctgtacattctcatagagatagagaagatctaaaaagttgagactactcaatccagttaacaacagcaggagcactagagtttgttcatttattctctctgtaaaacaagctgtgctttttttcttctgcctttaaaatgccacccgtgtattcaaaccatggccacttgatacttatgtagaatccatcgtgggctgatgcaagccctttatttaggcttagtgttgtgggcaccaatgtcgagcatcgttgtgacttgtgctgtatgattctcactgaagaatttcctttcagccaagaagcagtgaggtctgggaatattccaaagtcatgtctctgaatatgtgtccttgacatgcaagctttgtaaaaccccatccccgcttaggtgcgaggcatcaccttctcacaagtgtttagtttcttttaaccacaagtatcattcttgggtgataatatagtttcattctacttagggattgtttaggtatacttagatgagtattttaagctgtcgacctttagtttgccatacgggtaggactgtatttcatgttaacaactggtggtaatgataagccttcttctagcgtattttctcttctttcctgtcactttccttttttaagtttttttttttaaagactggaattttttttggctttatcttgtcttaccgtagagatttgttcaaaactctaagccctaccacctcccctttaataagctctttaaatagttgaatcattaacaacctggtgggaggcaagtcatttaattgaaccactaggaagtgtattttcttttctttttctgccaactttttggtggcatttgtaaaagctgatataaaaggctctgagatgttattttcagttattccataggcaagcctttttacagagcatatgtctccagttggcagcttgagatatttccgagcatccggttctagctaccagtgcctcccaatgcttagtgcacagtactgtagactggccatcacccctctccttggaaaatgccactgtgctgtttgaaaaaaagcagccttttagggctagagtattttatataaacagaagagctaagttcctgaagactaagctagatagctgcagctatatgtaaattgtatatttttatgaacttttgaagcacacactcctgtttccctctgtgtagctttgtggggatttcatgtatatatgctgtctgaaagaatccagaggttggagtgccaatagaaaatgaaaacaaatgccttgtactacaggcagcctctgaaggtgaccacataactgtcttcactgtgaccaatcggagtccctgcttgcttgtgaagaaggggcttttgtaccttgttggagatgccacctcagaagttcacactgtgcaggaaaaaggttttattctctcctggcatacattagaatgtcagatgcttgcatccatgtggaccacgatgggcctctaaaaattggtgggcagggggtttgcttatgagttttctctggaaaccgattttactcctggatgtattgaatgccccttgagctttatgagatacgagtccacatggataaaatgttagagagtggagttctacagaggattccaggaagaggccatgtctgtgcagtcctagttccagacaggtgagaagctccaggaactactggctaccttgacaagctgggtaaatagttatcattctgggtaactggttgaaactctgacttttggacaagtaattcctggggttctgtctttggtagcatcaccagggatatttgggtgggacagacagaagacacacagctgcctgttctctcctgcccatcatgtttggcccactagatgaagctgtactcagcaatttagggaatgtaacccttctcagaactggccattttcaggggaagcttgggagagcaatagtatggtgagccccttagagatgagcgcctactccttcttggcgaatgctgccttcagatgcttaccaagtggtcactgcatctagtaagattatatttccagtacacttccttagggcagaaacaccatcctatcaggtttggtcagtcccttcttcatgaagggagtcatggggaattcctgaaaattttcttccttctgcagacagttggatgagtcccttagagaaggcatccagagacataactaaactgaatatcatcccatattgattttaggaattgactctaaaactctgtgcagaatcttgtgttgggattgtatcttgacattcctgttgtgttatttttcttaactggagtgtgtgctgcctttcaggtacaatttttgtgtaataaaagccagtgcattaagtttatatagactactttctatgcaagactgagatatggaatagataggaagagatatgtactgctgggtacatggacagtaagtgtgttttcagatggagtaccagcaccgaaaatgggttgagggaggatgggttgtatgtatgtttctgcccactaattttgagcagccatattatgaattaaatcgtcacagccaagtaataacccaagaatggtatgagtttcatgtgtaatagctcaaatggaataagcatgaatgctggagtggaccattatcctcaaatattctatgtcacttctcatttaaagactcttgttatgaactattagaaactttaggcaaaatcaaaagtatttgcggcaaaataaaggcctattctactcttatttaaagtgaaacactgtatacttgtttctctccaaagcgaaattaagtatttataatttcaattgcctcgataagtttccaagtcactgaaatctgctgaaggttttactgtattgttgcacaactttaagataatttttgtctcaatgtcaacttttttcactgaataaaaatttaactgggtcaagaaaaca

SEQ ID NO: 343486 - DNA, 3123 bp, Homo sapiens
tccatctccctcacccatgcccccacccaatctaaagagacagtgctgtacattctcatagagatagagaagatctaaaaagttgagactactcaatccagttaacaacagcaggagcactagagtttgttcatttattctctctgtaaaacaagctgtgctttttttcttctgcctttaaaatgccacccgtgtattcaaaccatggccacttgatacttatgtagaatccatcgtgggctgatgcaagccctttatttaggcttagtgttgtgggcaccaatgtcgagcatcgttgtgacttgtgctgtatgattctcactgaagaatttcctttcagccaagaagcagtgaggtctgggaatattccaaagtcatgtctctgaatatgtgtccttgacatgcaagctttgtaaaaccccatccccgcttaggtgcgaggcatcaccttctcacaagtgtttagtttcttttaaccacaagtatcattcttgggtgataatatagtttcattctacttagggattgtttagaaaacaaagaaagagccaattaaattttttagtttttgaaatttttatttatatgtatacttagatgagtattttaagctgtcgacctttagtttgccatacgggtaggactgtatttcatgttaacaactggtggtaatgataagccttcttctagcgtattttctcttctttcctgtcactttccttttttaagtttttttttttaaagactggaattttttttggctttatcttgtcttaccgtagagatttgttcaaaactctaagccctaccacctcccctttaataagctctttaaatagttgaatcattaacaacctggtgggaggcaagtcatttaattgaaccactaggaagtgtattttcttttctttttctgccaactttttggtggcatttgtaaaagctgatataaaaggctctgagatgttattttcagttattccataggcaagcctttttacagagcatatgtctccagttggcagcttgagatatttccgagcatccggttctagctaccagtgcctcccaatgcttagtgcacagtactgtagactggccatcacccctctccttggaaaatgccactgtgctgtttgaaaaaaagcagccttttagggctagagtattttatataaacagaagagctaagttcctgaagactaagctagatagctgcagctatatgtaaattgtatatttttatgaacttttgaagcacacactcctgtttccctctgtgtagctttgtggggatttcatgtatatatgctgtctgaaagaatccagaggttggagtgccaatagaaaatgaaaacaaatgccttgtactacaggcagcctctgaaggtgaccacataactgtcttcactgtgaccaatcggagtccctgcttgcttgtgaagaaggggcttttgtaccttgttggagatgccacctcagaagttcacactgtgcaggaaaaaggttttattctctcctggcatacattagaatgtcagatgcttgcatccatgtggaccacgatgggcctctaaaaattggtgggcagggggtttgcttatgagttttctctggaaaccgattttactcctggatgtattgaatgccccttgagctttatgagatacgagtccacatggataaaatgttagagagtggagttctacagaggattccaggaagaggccatgtctgtgcagtcctagttccagacaggtgagaagctccaggaactactggctaccttgacaagctgggtaaatagttatcattctgggtaactggttgaaactctgacttttggacaagtaattcctggggttctgtctttggtagcatcaccagggatatttgggtgggacagacagaagacacacagctgcctgttctctcctgcccatcatgtttggcccactagatgaagctgtactcagcaatttagggaatgtaacccttctcagaactggccattttcaggggaagcttgggagagcaatagtatggtgagccccttagagatgagcgcctactccttcttggcgaatgctgccttcagatgcttaccaagtggtcactgcatctagtaagattatatttccagtacacttccttagggcagaaacaccatcctatcaggtttggtcagtcccttcttcatgaagggagtcatggggaattcctgaaaattttcttccttctgcagacagttggatgagtcccttagagaaggcatccagagacataactaaactgaatatcatcccatattgattttaggaattgactctaaaactctgtgcagaatcttgtgttgggattgtatcttgacattcctgttgtgttatttttcttaactggagtgtgtgctgcctttcaggtacaatttttgtgtaataaaagccagtgcattaagtttatatagactactttctatgcaagactgagatatggaatagataggaagagatatgtactgctgggtacatggacagtaagtgtgttttcagatggagtaccagcaccgaaaatgggttgagggaggatgggttgtatgtatgtttctgcccactaattttgagcagccatattatgaattaaatcgtcacagccaagtaataacccaagaatggtatgagtttcatgtgtaatagctcaaatggaataagcatgaatgctggagtggaccattatcctcaaatattctatgtcacttctcatttaaagactcttgttatgaactattagaaactttaggcaaaatcaaaagtatttgcggcaaaataaaggcctattctactcttatttaaagtgaaacactgtatacttgtttctctccaaagcgaaattaagtatttataatttcaattgcctcgataagtttccaagtcactgaaatctgctgaaggttttactgtattgttgcacaactttaagataatttttgtctcaatgtcaacttttttcactgaataaaaatttaactgggtcaagaaaacacctctttgaaaatccactgtctctgtgtgtctcgagctgttctttagagcgcaataaagatggctgacgcagtctccaaacccc

SEQ ID NO: 343487 - DNA, 2981 bp, Homo sapiens
tccatctccctcacccatgcccccacccaatctaaagagacagtgctgtacattctcatagagatagagaagatctaaaaagttgagactactcaatccagttaacaacagcaggagcactagagtttgttcatttattctctctgtaaaacaagctgtgctttttttcttctgcctttaaaatgccacccgtgtattcaaaccatggccacttgatacttatgtagaatccatcgtgggctgatgcaagccctttatttaggcttagtgttgtgggcaccaatgtcgagcatcgttgtgacttgtgctgtatgattctcactgaagaatttcctttcagccaagaagcagtgaggtctgggaatattccaaagtcatgtctctgaatatgtgtccttgacatgcaagctttgtaaaaccccatccccgcttaggtgcgaggcatcaccttctcacaagtgtttagtttcttttaaccacaagtatcattcttgggtgataatatagtttcattctacttagggattgtttagaaaacaaagaaagagccaattaaattttttagtttttgaaatttttatttatatgtatacttagatgagtattttaagctgtcgacctttagtttgccatacgggtaggactgtatttcatgttaacaactggtggtaatgataagccttcttctagcgtattttctcttctttcctgtcactttccttttttaagtttttttttttaaagactggaattttttttggctttatcttgtcttaccgtagagatttgttcaaaactctaagccctaccacctcccctttaataagctctttaaatagttgaatcattaacaacctggtgggaggcaagtcatttaattgaaccactaggaagtgtattttcttttctttttctgccaactttttggtggcatttgtaaaagctgatataaaaggctctgagatgttattttcagttattccataggcaagcctttttacagagcatatgtctccagttggcagcttgagatatttccgagcatccggttctagctaccagtgcctcccaatgcttagtgcacagtactgtagactggccatcacccctctccttggaaaatgccactgtgctgtttgaaaaaaagcagccttttagggctagagtattttatataaacagaagagctaagttcctgaagactaagctagatagctgcagctatatgtaaattgtatatttttatgaacttttgaagcacacactcctgtttccctctgtgtagctttgtggggatttcatgtatatatgctgtctgaaagaatccagaggttggagtgccaatagaaaatgaaaacaaatgccttgtactacaggcagcctctgaaggtgaccacataactgtcttcactgtgaccaatcggagtccctgcttgcttgtgaagaaggggcttttgtaccttgttggagatgccacctcagaagttcacactgtgcaggaaaaaggttttattctctcctggcatacattagaatgtcagatgcttgcatccatgtggaccacgatgggcctctaaaaattggtgggcagggggtttgcttatgagttttctctggaaaccgattttactcctggatgtattgaatgccccttgagctttatgagatacgagtccacatggataaaatgttagagagtggagttctacagaggattccaggaagaggccatgtctgtgcagtcctagttccagacaggtgagaagctccaggaactactggctaccttgacaagctgggtaaatagttatcattctgggtaactggttgaaactctgacttttggacaagtaattcctggggttctgtctttggtagcatcaccagggatatttgggtgggacagacagaagacacacagctgcctgttctctcctgcccatcatgtttggcccactagatgaagctgtactcagcaatttagggaatgtaacccttctcagaactggccattttcaggggaagcttgggagagcaatagtatggtgagccccttagagatgagcgcctactccttcttggcgaatgctgccttcagatgcttaccaagtggtcactgcatctagtaagattatatttccagtacacttccttagggcagaaacaccatcctatcaggtttggtcagtcccttcttcatgaagggagtcatggggaattcctgaaaattttcttccttctgcagacagttggatgagtcccttagagaaggcatccagagacataactaaactgaatatcatcccatattgattttaggaattgactctaaaactctgtgcagaatcttgtgttgggattgtatcttgacattcctgttgtgttatttttcttaactggagtgtgtgctgcctttcaggtacaatttttgttggaatagataggaagagatatgtactgctgggtacatggacagtaagtgtgttttcagatggagtaccagcaccgaaaatgggttgagggaggatgggttgtatgtatgtttctgcccactaattttgagcagccatattatgaattaaatcgtcacagccaagtaataacccaagaatggtatgagtttcatgtgtaatagctcaaatggaataagcatgaatgctggagtggaccattatcctcaaatattctatgtcacttctcatttaaagactcttgttatgaactattagaaactttaggcaaaatcaaaagtatttgcggcaaaataaaggcctattctactcttatttaaagtgaaacactgtatacttgtttctctccaaagcgaaattaagtatttataatttcaattgcctcgataagtttccaagtcactgaaatctgctgaaggttttactgtattgttgcacaactttaagataatttttgtctcaatgtcaacttttttcactgaataaaaatttaactgggtcaagaaaaca

SEQ ID NO: 343488 - DNA, 2985 bp, Homo sapiens
tccatctccctcacccatgcccccacccaatctaaagagacagtgctgtacattctcatagagatagagaagatctaaaaagttgagactactcaatccagttaacaacagcaggagcactagagtttgttcatttattctctctgtaaaacaagctgtgctttttttcttctgcctttaaaatgccacccgtgtattcaaaccatggccacttgatacttatgtagaatccatcgtgggctgatgcaagccctttatttaggcttagtgttgtgggcaccaatgtcgagcatcgttgtgacttgtgctgtatgattctcactgaagaatttcctttcagccaagaagcagtgaggtctgggaatattccaaagtcatgtctctgaatatgtgtccttgacatgcaagctttgtaaaaccccatccccgcttaggtgcgaggcatcaccttctcacaagtgtttagtttcttttaaccacaagtatcattcttgggtgataatatagtttcattctacttagggattgtttagaaaacaaagaaagagccaattaaattttttagtttttgaaatttttatttatatgtatacttagatgagtattttaagctgtcgacctttagtttgccatacgggtaggactgtatttcatgttaacaactggtggtaatgataagccttcttctagcgtattttctcttctttcctgtcactttccttttttaagtttttttttttaaagactggaattttttttggctttatcttgtcttaccgtagagatttgttcaaaactctaagccctaccacctcccctttaataagctctttaaatagttgaatcattaacaacctggtgggaggcaagtcatttaattgaaccactaggaagtgtattttcttttctttttctgccaactttttggtggcatttgtaaaagctgatataaaaggctctgagatgttattttcagttattccataggcaagcctttttacagagcatatgtctccagttggcagcttgagatatttccgagcatccggttctagctaccagtgcctcccaatgcttagtgcacagtactgtagactggccatcacccctctccttggaaaatgccactgtgctgtttgaaaaaaagcagccttttagggctagagtattttatataaacagaagagctaagttcctgaagactaagctagatagctgcagctatatgtaaattgtatatttttatgaacttttgaagcacacactcctgtttccctctgtgtagctttgtggggatttcatgtatatatgctgtctgaaagaatccagaggttggagtgccaatagaaaatgaaaacaaatgccttgtactacaggcagcctctgaaggtgaccacataactgtcttcactgtgaccaatcggagtccctgcttgcttgtgaagaaggggcttttgtaccttgttggagatgccacctcagaagttcacactgtgcaggaaaaaggttttattctctcctggcatacattagaatgtcagatgcttgcatccatgtggaccacgatgggcctctaaaaattggtgggcagggggtttgcttatgagttttctctggaaaccgattttactcctggatgtattgaatgccccttgagctttatgagatacgagtccacatggataaaatgttagagagtggagttctacagaggattccaggaagaggccatgtctgtgcagtcctagttccagacaggtgagaagctccaggaactactggctaccttgacaagctgggtaaatagttatcattctgggtaactggttgaaactctgacttttggacaagtaattcctggggttctgtctttggtagcatcaccagggatatttgggtgggacagacagaagacacacagctgcctgttctctcctgcccatcatgtttggcccactagatgaagctgtactcagcaatttagggaatgtaacccttctcagaactggccattttcaggggaagcttgggagagcaatagtatggtgagccccttagagatgagcgcctactccttcttggcgaatgctgccttcagatgcttaccaagtggtcactgcatctagtaagattatatttccagtacacttccttagggcagaaacaccatcctatcaggtttggtcagtcccttcttcatgaagggagtcatggggaattcctgaaaattttcttccttctgcagacagttggatgagtcccttagagaaggcatccagagacataactaaactgaatatcatcccatattgattttaggaattgactgttatttttcttaactggagtgtgtgctgcctttcaggtacaatttttgtgtaataaaagccagtgcattaagtttatatagactactttctatgcaagactgagatatggaatagataggaagagatatgtactgctgggtacatggacagtaagtgtgttttcagatggagtaccagcaccgaaaatgggttgagggaggatgggttgtatgtatgtttctgcccactaattttgagcagccatattatgaattaaatcgtcacagccaagtaataacccaagaatggtatgagtttcatgtgtaatagctcaaatggaataagcatgaatgctggagtggaccattatcctcaaatattctatgtcacttctcatttaaagactcttgttatgaactattagaaactttaggcaaaatcaaaagtatttgcggcaaaataaaggcctattctactcttatttaaagtgaaacactgtatacttgtttctctccaaagcgaaattaagtatttataatttcaattgcctcgataagtttccaagtcactgaaatctgctgaaggttttactgtattgttgcacaactttaagataatttttgtctcaatgtcaacttttttcactgaataaaaatttaactgggtcaagaaaaca

SEQ ID NO: 343489 - DNA, 3068 bp, Homo sapiens
tccatctccctcacccatgcccccacccaatctaaagagacagtgctgtacattctcatagagatagagaagatctaaaaagttgagactactcaatccagttaacaacagcaggagcactagagtttgttcatttattctctctgtaaaacaagctgtgctttttttcttctgcctttaaaatgccacccgtgtattcaaaccatggccacttgatacttatgtagaatccatcgtgggctgatgcaagccctttatttaggcttagtgttgtgggcaccaatgtcgagcatcgttgtgacttgtgctgtatgattctcactgaagaatttcctttcagccaagaagcagtgaggtctgggaatattccaaagtcatgtctctgaatatgtgtccttgacatgcaagctttgtaaaaccccatccccgcttaggtgcgaggcatcaccttctcacaagtgtttagtttcttttaaccacaagtatcattcttgggtgataatatagtttcattctacttagggattgtttagaaaacaaagaaagagccaattaaattttttagtttttgaaatttttatttatatgtatacttagatgagtattttaagctgtcgacctttagtttgccatacgggtaggactgtatttcatgttaacaactggtggtaatgataagccttcttctagcgtattttctcttctttcctgtcactttccttttttaagtttttttttttaaagactggaattttttttggctttatcttgtcttaccgtagagatttgttcaaaactctaagccctaccacctcccctttaataagctctttaaatagttgaatcattaacaacctggtgggaggcaagtcatttaattgaaccactaggaagtgtattttcttttctttttctgccaactttttggtggcatttgtaaaagctgatataaaaggctctgagatgttattttcagttattccataggcaagcctttttacagagcatatgtctccagttggcagcttgagatatttccgagcatccggttctagctaccagtgcctcccaatgcttagtgcacagtactgtagactggccatcacccctctccttggaaaatgccactgtgctgtttgaaaaaaagcagccttttagggctagagtattttatataaacagaagagctaagttcctgaagactaagctagatagctgcagctatatgtaaattgtatatttttatgaacttttgaagcacacactcctgtttccctctgtgtagctttgtggggatttcatgtatatatgctgtctgaaagaatccagaggttggagtgccaatagaaaatgaaaacaaatgccttgtactacaggcagcctctgaaggtgaccacataactgtcttcactgtgaccaatcggagtccctgcttgcttgtgaagaaggggcttttgtaccttgttggagatgccacctcagaagttcacactgtgcaggaaaaaggttttattctctcctggcatacattagaatgtcagatgcttgcatccatgtggaccacgatgggcctctaaaaattggtgggcagggggtttgcttatgagttttctctggaaaccgattttactcctggatgtattgaatgccccttgagctttatgagatacgagtccacatggataaaatgttagagagtggagttctacagaggattccaggaagaggccatgtctgtgcagtcctagttccagacaggtgagaagctccaggaactactggctaccttgacaagctgggtaaatagttatcattctgggtaactggttgaaactctgacttttggacaagtaattcctggggttctgtctttggtagcatcaccagggatatttgggtgggacagacagaagacacacagctgcctgttctctcctgcccatcatgtttggcccactagatgaagctgtactcagcaatttagggaatgtaacccttctcagaactggccattttcaggggaagcttgggagagcaatagtatggtgagccccttagagatgagcgcctactccttcttggcgaatgctgccttcagatgcttaccaagtggtcactgcatctagtaagattatatttccagtacacttccttagggcagaaacaccatcctatcaggtttggtcagtcccttcttcatgaagggagtcatggggaattcctgaaaattttcttccttctgcagacagttggatgagtcccttagagaaggcatccagagacataactaaactgaatatcatcccatattgattttaggaattgactctaaaactctgtgcagaatcttgtgttgggattgtatcttgacattcctgttgtgttatttttcttaactggagtgtgtgctgcctttcaggtacaatttttgtgtaataaaagccagtgcattaagtttatatagactactttctatgcaagactgagatatggaatagataggaagagatatgtactgctgggtacatggacagtaagtgtgttttcagatggagtaccagcaccgaaaatgggttgagggaggatgggttgtatgtatgtttctgcccactaattttgagcagccatattatgaattaaatcgtcacagccaagtaataacccaagaatggtatgagtttcatgtgtaatagctcaaatggaataagcatgaatgctggagtggaccattatcctcaaatattctatgtcacttctcatttaaagactcttgttatgaactattagaaactttaggcaaaatcaaaagtatttgcggcctccaaagcgaaattaagtatttataatttcaattgcctcgataagtttccaagtcactgaaatctgctgaaggttttactgtattgttgcacaactttaagataatttttgtctcaatgtcaacttttttcactgaataaaaatttaactgggtcaagaaaacacctctttgaaaatccactgtctctgtgtgtctcgagctgttctttagagcgcaataaagatggctgacgcagtctccaaacccc

SEQ ID NO: 343490 - DNA, 5395 bp, Homo sapiens
atgaaaacctggcttcatgtgtctggaaagtttactaacgtaaaacatctcatcccttgccagtcctgccagttgaataaagggttacccttcatgggactgacttggcagggggtcgtttgaacagttcctagcatttattattacttttctctcttaagcgcctctgtttgaatggaagcacagggcaagaggtgatcatcaattctggcctggagacagtagaagctttggcttttgaacccctcagccagctgctttactgggtagatgcaggcttcaaaaagattgaggtagctaatccagatggcgacttccgactcacaatcgtcaattcctctgtgcttgatcgtcccagggctctggtcctcgtgccccaagagggggtgatgttctggacagactggggagacctgaagcctgggatttatcggagcaatatggatggttctgctgcctatcacctggtgtctgaggatgtgaagtggcccaatggcatctctgtggacgaccagtggatttactggacggatgcctacctggagtgcatagagcggatcacgttcagtggccagcagcgctctgtcattctggacaacctcccgcacccctatgccattgctgtctttaagaatgaaatctactgggatgactggtcacagctcagcatattccgagcttccaaatacagtgggtcccagatggagattctggcaaaccagctcacggggctcatggacatgaagattttctacaaggggaagaacactggaagcaatgcctgtgtgcccaggccatgcagcctgctgtgcctgcccaaggccaacaacagtagaagctgcaggtgtccagaggatgtgtccagcagtgtgcttccatcaggggacctgatgtgtgactgccctcagggctatcagctcaagaacaatacctgtgtcaaagaagagaacacctgtcttcgcaaccagtatcgctgcagcaacgggaactgtatcaacagcatttggtggtgtgactttgacaacgactgtggagacatgagcgatgagagaaactgccctaccaccatctgtgacctggacacccagtttcgttgccaggagtctgggacttgtatcccactgtcctataaatgtgaccttgaggatgactgtggagacaacagtgatgaaagtcattgtgaaatgcaccagtgccggagtgacgagtacaactgcagttccggcatgtgcatccgctcctcctgggtatgtgacggggacaacgactgcagggactggtctgatgaagccaactgtaccgccatctatcacacctgtgaggcctccaacttccagtgccgaaacgggcactgcatcccccagcggtgggcgtgtgacggggatacggactgccaggatggttccgatgaggatccagtcaactgtgagaagaagtgcaatggattccgctgcccaaacggcacttgcatcccatccagcaaacattgtgatggtctgcgtgattgctctgatggctccgatgaacagcactgcgagcccctctgtacgcacttcatggactttgtgtgtaagaaccgccagcagtgcctgttccactccatggtctgtgacggaatcatccagtgccgcgacgggtccgatgaggatgcggcgtttgcaggatgctcccaagatcctgagttccacaaggtatgtgatgagttcggtttccagtgtcagaatggagtgtgcatcagtttgatttggaagtgcgacgggatggatgattgcggcgattattctgatgaagccaactgcgaaaaccccacagaagccccaaactgctcccgctacttccagtttcggtgtgagaatggccactgcatccccaacagatggaaatgtgacagggagaacgactgtggggactggtctgatgagaaggattgtggagattcacatattcttcccttctcgactcctgggccctccacgtgtctgcccaattactaccgctgcagcagtgggacctgcgtgatggacacctgggtgtgcgacgggtaccgagattgtgcagatggctctgacgaggaagcctgccccttgcttgcaaacgtcactgctgcctccactcccacccaacttgggcgatgtgaccgatttgagttcgaatgccaccaaccgaagacgtgtattcccaactggaagcgctgtgacggccaccaagattgccaggatggccgggacgaggccaattgccccacacacagcaccttgacttgcatgagcagggagttccagtgcgaggacggggaggcctgcattgtgctctcggagcgctgcgacggcttcctggactgctcggacgagagcgatgaaaaggcctgcagtgatgagttgactgtgtacaaagtacagaatcttcagtggacagctgacttctctggggatgtgactttgacctggatgaggcccaaaaaaatgccctctgcttcttgtgtatataatgtctactacagggtggttggagagagcatatggaagactctggagacccacagcaataagacaaacactgtattaaaagtcttgaaaccagataccacgtatcaggttaaagtacaggttcagtgtctcagcaaggcacacaacaccaatgactttgtgaccctgaggaccccagagggattgccagatgcccctcgaaatctccagctgtcactccccagggaagcagaaggtgtgattgtaggccactgggctcctcccatccacacccatggcctcatccgtgagtacattgtagaatacagcaggagtggttccaagatgtgggcctcccagagggctgctagtaactttacagaaatcaagaacttattggtcaacactctatacaccgtcagagtggctgcggtgactagtcgtggaataggaaactggagcgattctaaatccattaccaccataaaaggaaaagtgatcccaccaccagatatccacattgacagctatggtgaaaattatctaagcttcaccctgaccatggagagtgatatcaaggtgaatggctatgtggtgaaccttttctgggcatttgacacccacaagcaagagaggagaactttgaacttccgaggaagcatattgtcacacaaagttggcaatctgacagctcatacatcctatgagatttctgcctgggccaagactgacttgggggatagccctctggcatttgagcatgttatgaccagaggggttcgcccacctgcacctagcctcaaggccaaagccatcaaccagactgcagtggaatgtacctggaccggcccccggaatgtggtttatggtattttctatgccacgtcctttcttgacctctatcgcaacccgaagagcttgactacttcactccacaacaagacggtcattgtcagtaaggatgagcagtatttgtttctggtccgtgtagtggtaccctaccaggggccatcctctgactacgttgtagtgaagatgatcccggacagcaggcttccaccccgtcacctgcatgtggttcatacgggcaaaacctccgtggtcatcaagtgggaatcaccgtatgactctcctgaccaggacttgttgtatgcaattgcagtcaaagatctcataagaaagactgacaggagctacaaagtaaaatcccgtaacagcactgtggaatacacccttaacaagttggagcctggcgggaaataccacatcattgtccaactggggaacatgagcaaagattccagcataaaaattaccacagtttcattatcagcacctgatgccttaaaaatcataacagaaaatgatcatgttcttctgttttggaaaagcctggctttaaaggaaaagcattttaatgaaagcaggggctatgagatacacatgtttgatagtgccatgaatatcacagcttaccttgggaatactactgacaatttctttaaaatttccaacctgaagatgggtcataattacacgttcaccgtccaagcaagatgcctttttggcaaccagatctgtggggagcctgccatcctgctgtacgatgagctggggtctggtgcagatgcatctgcaacgcaggctgccagatctacggatgttgctgctgtggtggtgcccatcttattcctgatactgctgagcctgggggtggggtttgccatcctgtacacgaagcaccggaggctgcagagcagcttcaccgccttcgccaacagccactacagctccaggctggggtccgcaatcttctcctctggggatgacctgggggaagatgatgaagatgcccctatgataactggattttcagatgacgtccccatggtgatagcctgaaagagctttcctcactagaaaccaaatggtgtaaatattttatttgataaagatagttgatggtttattttaaaagatgcactttgagttgcaatatgttatttttatatgggccaaaaacaaaaaacaaaaaaaaaaaaaaggaaagaaaggaatgaataaactttgtagtaatcaactgtgaacttcaaaccaggttgattttagtaacccaattgctttgatttgacattaatgtagtcttacagggctgtgcttgctgggcatgcttttacgtctgtgagataatttcggttcagtaaattggccaatctttttatttttctaagacacagaaatgtatttaataaaaacctcgagagagtgatgggtggaaccccttctccttgaaagtgtgtacagatattccattttgtttggatatagtttataggaaagtgtgtggatgtattatggcggaaggtttctttatgttattttgttaatttattgggactctgtgtaaggccaggctttagtggtcattagacaccacatgtgttatgagccccttacccatagggttgggggtgggaagagaagcatatttttttgccattccggaagcaatccatttttattcacttgtgtgtcatgtaatggtctttggcaggagagagcactgagtcattgctggagttcagttcaacagagctgcagcttgggaagccctgtaagcccacagcttcctctcttatattaattgatggaattttactgtatgtgcctctgtacaagatgtagctttgagagctacaaaatgataacactgctttattacacactggtttcattgtcattgcaaaaacttaccctggttgtgggggagagttctagatctgtgccatgatccatacactggctaatagagtacataatttttccattttccattttttgtttttacttactactgaaggatctcagatgtaaaattatgtatttggtttgagatggccacttattgtccttaaaaatccatactgata

SEQ ID NO: 343491 - DNA, 2615 bp, Homo sapiens
tccatctccctcacccatgcccccacccaatctaaagagacagtgctgtacattctcatagagatagagaagatctaaaaagttgagactactcaatccagttaacaacagcaggagcactagagtttgttcatttattctctctgtaaaacaagctgtgctttttttcttctgcctttaaaatgccacccgtgtattcaaaccatggccacttgatacttatgtagaatccatcgtgggctgatgcaagccctttatttaggcttagtgttgtgggcaccaatgtcgagcatcgttgtgacttgtgctgtatgattctcactgaagaatttcctttcagccaagaagcagtgaggtctgggaatattccaaagtcatgtctctgaatatgtgtccttgacatgcaagctttgtaaaaccccatccccgcttaggtgcgaggcatcaccttctcacaagtgtttagtttcttttaaccacaagtatcattcttgggtgataatatagtttcattctacttagggattgtttagaaaacaaagaaagagccaattaaattttttagtttttgaaatttttatttatatgtatacttagatgagtattttaagctgtcgacctttagtttgccatacgggtaggactgtatttcatgttaacaactggtggtaatgataagccttcttctagcgtattttctcttctttcctgtcactttccttttttaagtttttttttttaaagactggaattttttttggctttatcttgtcttaccgtagagatttgttcaaaactctaagccctaccacctcccctttaataagctctttaaatagttgaatcattaacaacctggtgggaggcaagtcatttaattgaaccactaggaagtgtattttcttttctttttctgccaactttttggtggcatttgtaaaagctgatataaaaggctctgagatgttattttcagttattccataggcaagcctttttacagagcatatgtctccagttggcagcttgagatatttccgagcatccggttctagctaccagtgcctcccaatgcttagtgcacagtactgtagactggccatcacccctctccttggaaaatgccactgtgctgtttgaaaaaaagcagccttttagggctagagtattttatataaacagaagagctaagttcctgaagactaagctagatagctgcagctatatgtaaattgtatatttttatgaacttttgaagcacacactcctgtttccctctgtgtagctttgtggggatttcatgtatatatgctgtctgaaagaatccagaggttggagtgccaatagaaaatgaaaacaaatgccttgtactacaggcagcctctgaaggtgaccacataactgtcttcactgtgaccaatcggagtccctgcttgcttgtgaagaaggggcttttgtaccttgttggagatgccacctcagaagttcacactgtgcaggaaaaaggttttattctctcctggcatacattagaatgtcagatgcttgcatccatgtggaccacgatgggcctctaaaaattggtgggcagggggtttgcttatgagttttctctggaaaccgattttactcctggatgtattgaatgccccttgagctttatgagatacgagtccacatggataaaatgttagagagtggagttctacagaggattccaggaagaggccatgtctgtgcagtcctagttccagacaggtgagaagctccaggaactactggctaccttgacaagctgggtaaatagttatcattctgggtaactggttgaaactctgacttttggacaagtaattcctggggttctgtctttggtagcatcaccagggatatttgggtgggacagacagaagacacacagctgcctgttctctcctgcccatcatgtttggcccactagatgaagctgtactcagcaatttagggaatgtaacccttctcagaactggccattttcaggggaagcttgggagagcaatagtatggtgagccccttagagatgagcgcctactccttcttggcgaatgctgccttcagatgcttaccaagtggtcactgcatctagtaagattatatttccagtacacttccttagggcagaaacaccatcctatcaggtttggtcagtcccttcttcatgaagggagtcatggggaattcctgaaaattttcttccttctgcagacagttggatgagtcccttagagaaggcatccagagacataactaaactgaatatcatcccatattgattttaggaattgactctaaaactctgtgcagaatcttgtgttgggattgtatcttgacattcctgttgtgttatttttcttaactggagtgtgtgctgcctttcaggtacaatttttgtgtaataaaagccagtgcattaagtttatatagactactttctatgcaagactgagatatggaatagataggaagagatatgtactgctgggtacatggacagtaagtgtgttttcagatggagtaccagcacccggccgccctattatgaattaaatcggcccacccagttattacccagaag

SEQ ID NO: 343492 - DNA, 2553 bp, Homo sapiens
tccatctccctcacccatgcccccacccaatctaaagagacagtgctgtacattctcatagagatagagaagatctaaaaagttgagactactcaatccagttaacaacagcaggagcactagagtttgttcatttattctctctgtaaaacaagctgtgctttttttcttctgcctttaaaatgccacccgtgtattcaaaccatggccacttgatacttatgtagaatccatcgtgggctgatgcaagccctttatttaggcttagtgttgtgggcaccaatgtcgagcatcgttgtgacttgtgctgtatgattctcactgaagaatttcctttcagccaagaagcagtgaggtctgggaatattccaaagtcatgtctctgaatatgtgtccttgacatgcaagctttgtaaaaccccatccccgcttaggtgcgaggcatcaccttctcacaagtgtttagtttcttttaaccacaagtatcattcttgggtgataatatagtttcattctacttagggattgtttagaaaacaaagaaagagccaattaaattttttagtttttgaaatttttatttatatgtatacttagatgagtattttaagctgtcgacctttagtttgccatacgggtaggactgtatttcatgttaacaactggtggtaatgataagccttcttctagcgtattttctcttctttcctgtcactttccttttttaagtttttttttttaaagactggaattttttttggctttatcttgtcttaccgtagagatttgttcaaaactctaagccctaccacctcccctttaataagctctttaaatagttgaatcattaacaacctggtgggaggcaagtcatttaattgaaccactaggaagtgtattttcttttctttttctgccaactttttggtggcatttgtaaaagctgatataaaaggctctgagatgttattttcagttattccataggcaagcctttttacagagcatatgtctccagttggcagcttgagatatttccgagcatccggttctagctaccagtgcctcccaatgcttagtgcacagtactgtagactggccatcacccctctccttggaaaatgccactgtgctgtttgaaaaaaagcagccttttagggctagagtattttatataaacagaagagctaagttcctgaagactaagctagatagctgcagctatatgtaaattgtatatttttatgaacttttgaagcacacactcctgtttccctctgtgtagctttgtggggatttcatgtatatatgctgtctgaaagaatccagaggttggagtgccaatagaaaatgaaaacaaatgccttgtactacaggcagcctctgaaggtgaccacataactgtcttcactgtgaccaatcggagtccctgcttgcttgtgaagaaggggcttttgtaccttgttggagatgccacctcagaagttcacactgtgcaggaaaaaggttttattctctcctggcatacattagaatgtcagatgcttgcatccatgtggaccacgatgggcctctaaaaattggtgggcagggggtttgcttatgagttttctctggaaaccgattttactcctggatgtattgaatgccccttgagctttatgagatacgagtccacatggataaaatgttagagagtggagttctacagaggattccaggaagaggccatgtctgtgcagtcctagttccagacaggtgagaagctccaggaactactggctaccttgacaagctgggtaaatagttatcattctgggtaactggttgaaactctgacttttggacaagtaattcctggggttctgtctttggtagcatcaccagggatatttgggtgggacagacagaagacacacagctgcctgttctctcctgcccatcatgtttggcccactagatgaagctgtactcagcaatttagggaatgtaacccttctcagaactggccattttcaggggaagcttgggagagcaatagtatggtgagccccttagagatgagcgcctactccttcttggcgaatgctgccttcagatgcttaccaagtggtcactgcatctagtaagattatatttccagtacacttccttagggcagaaacaccatcctatcaggtttggtcagtcccttcttcatgaagggagtcatggggaattcctgaaaattttcttccttctgcagacagttggatgagtcccttagagaaggcatccagagacataactaaactgaatatcatcccatattgattttaggaattgactctaaaactctgtgcagaatcttgtgttgggattgtatcttgacattcctgttgtgttatttttcttaactggagtgtgtgctgcctttcaggtacaatttttgtgtaataaaagccagtgcattaagtttatatagactactttctatgcaagactgagataataatttttgtctcaatgtcaacttttttcactgaataaaaatttaactgggtcaagaaaaca

SEQ ID NO: 343493 - DNA, 2755 bp, Homo sapiens
  misc_feature (56)..(56): n is a, c, g, or t
  misc_feature (59)..(59): n is a, c, g, or t
  misc_feature (62)..(62): n is a, c, g, or t
  misc_feature (69)..(69): n is a, c, g, or t
  misc_feature (71)..(71): n is a, c, g, or t
  misc_feature (96)..(96): n is a, c, g, or t
tcaatcttggcccaggcaagaaatctcaaaaggattgtattgagctgtcaagattnccnacnttgtgtngncaatatgcttccctcggaagttccnaagttcctcctcccatccacacccatggcctcatccgtgagtacattgtagaatacagcaggagtggttccaagatgtgggcctcccagagggctgctagtaactttacagaaatcaagaacttattggtcaacactctatacaccgtcagagtggctgcggtgactagtcgtggaataggaaactggagcgattctaaatccattaccaccataaaaggaaaagtgatcccaccaccagatatccacattgacagctatggtgaaaattatctaagcttcaccctgaccatggagagtgatatcaaggtgaatggctatgtggtgaaccttttctgggcatttgacacccacaagcaagagaggagaactttgaacttccgaggaagcatattgtcacacaaagttggcaatctgacagctcatacatcctatgagatttctgcctgggccaagactgacttgggggatagccctctggcatttgagcatgttatgaccagaggggttcgcccacctgcacctagcctcaaggccaaagccatcaaccagactgcagtggaatgtacctggaccggcccccggaatgtggtttatggtattttctatgccacgtcctttcttgacctctatcgcaacccgaagagcttgactacttcactccacaacaagacggtcattgtcagtaaggatgagcagtatttgtttctggtccgtgtagtggtaccctaccaggggccatcctctgactacgttgtagtgaagatgatcccggacagcaggcttccaccccgtcacctgcatgtggttcatacgggcaaaacctccgtggtcatcaagtgggaatcaccgtatgactctcctgaccaggacttgttgtatgcaattgcagtcaaagatctcataagaaagactgacaggagctacaaagtaaaatcccgtaacagcactgtggaatacacccttaacaagttggagcctggcgggaaataccacatcattgtccaactggggaacatgagcaaagattccagcataaaaattaccacagtttcattatcagcacctgatgccttaaaaatcataacagaaaatgatcatgttcttctgttttggaaaagcctggctttaaaggaaaagcattttaatgaaagcaggggctatgagatacacatgtttgatagtgccatgaatatcacagcttaccttgggaatactactgacaatttctttaaaatttccaacctgaagatgggtcataattacacgttcaccgtccaagcaagatgcctttttggcaaccagatctgtggggagcctgccatcctgctgtacgatgagctggggtctggtgcagatgcatctgcaacgcaggctgccagatctacggatgttgctgctgtggtggtgcccatcttattcctgatactgctgagcctgggggtggggtttgccatcctgtacacgaagcaccggaggctgcagagcagcttcaccgccttcgccaacagccactacagctccaggctggggtccgcaatcttctcctctggggatgacctgggggaagatgatgaagatgcccctatgataactggattttcagatgacgtccccatggtgatagcctgaaagagctttcctcactagaaaccaaatggtgtaaatattttatttgataaagatagttgatggtttattttaaaagatgcactttgagttgcaatatgttatttttatatgggccaaaaacaaaaaacaaaaaaaaaaaaaaggaaagaaaggaatgaataaactttgtagtaatcaactgtgaacttcaaaccaggttgattttagtaacccaattgctttgatttgacattaatgtagtcttacagggctgtgcttgctgggcatgcttttacgtctgtgagataatttcggttcagtaaattggccaatctttttatttttctaagacacagaaatgtatttaataaaaacctcgagagagtgatgggtggaaccccttctccttgaaagtgtgtacagatattccattttgtttggatatagtttataggaaagtgtgtggatgtattatggcggaaggtttctttatgttattttgttaatttattgggactctgtgtaaggccaggctttagtggtcattagacaccacatgtgttatgagccccttacccatagggttgggggtgggaagagaagcatatttttttgccattccggaagcaatccatttttattcacttgtgtgtcatgtaatggtctttggcaggagagagcactgagtcattgctggagttcagttcaacagagctgcagcttgggaagccctgtaagcccacagcttcctctcttatattaattgatggaattttactgtatgtgcctctgtacaagatgtagctttgagagctacaaaatgataacactgctttattacacactggtttcattgtcattgcaaaaacttaccctggttgtgggggagagttctagatctgtgccatgatccatacactggctaatagagtacataatttttccattttccattttttgtttttacttactactgaaggatctcagatgtaaaattatgtatttggtttgagatggccacttattgtccttaaaaatccatactgata

SEQ ID NO: 343494 - DNA, 3417 bp, Homo sapiens
cagactttgacacatctcttttgccaccaaatcttatctgctcctttgagtctctcttgcccagtctatagaaggggcatatgtgtggagagtctaatatgcaagttgttgtttaaataatattttctgataatattgatccattgagctcttttagatcatgctgggccaagcactgtcagccatctggtgggaagaccttccagatgacaagcatggcgctcattggttgaactgagaggggtcttttccttggccacttctccttgccccctcgactcttagcttgagctccagtctttttgagagcaccagtggtttctagttgtttagttggccatatgtgacgctatattggaaaggaagagaaagagagtatcagttgagtgctaggcatcacacatacattattttagttaaccttcccagctctgtgaaatgcagataacatctctaggctccaggaagatcagtaacttgcctaggttacacagatgccagaacaggaattcgaactcaagtttgccagcttccagaggccacaatctttccatttttgccacacgcacgtttaccatttacgatttactccattgtcagccttccgaaaggacttgagattggtgggactttgttagtgccaatcaagatgccactcgcagtgaatgatccctgttcctttaagaaccaggctgaagctgggctgttttgggacctttacaaaatggaacttttctgcctgacctaattgccaggatagccgactgagccaagatagttttgtgttcaccaagcaactgtggaccaaccttagcttcaggaaaacagtggtaaaaaaagatcgatgaggaacactgccaaagaaataccctttcttccccgactgaaagatggctttgtccgttgagttgaaaactattaagtcctgccttcctcacttttcatcacgtggcttctgtttttgaattcctttttgttttcagtgatcccaccaccagatatccacattgacagctatggtgaaaattatctaagcttcaccctgaccatggagagtgatatcaaggtgaatggctatgtggtgaaccttttctgggcatttgacacccacaagcaagagaggagaactttgaacttccgaggaagcatattgtcacacaaagttggcaatctgacagctcatacatcctatgagatttctgcctgggccaagactgacttgggggatagccctctggcatttgagcatgttatgaccagaggggttcgcccacctgcacctagcctcaaggccaaagccatcaaccagactgcagtggaatgtacctggaccggcccccggaatgtggtttatggtattttctatgccacgtcctttcttgacctctatcgcaacccgaagagcttgactacttcactccacaacaagacggtcattgtcagtaaggatgagcagtatttgtttctggtccgtgtagtggtaccctaccaggggccatcctctgactacgttgtagtgaagatgatcccggacagcaggcttccaccccgtcacctgcatgtggttcatacgggcaaaacctccgtggtcatcaagtgggaatcaccgtatgactctcctgaccaggacttgttgtatgcaattgcagtcaaagatctcataagaaagactgacaggagctacaaagtaaaatcccgtaacagcactgtggaatacacccttaacaagttggagcctggcgggaaataccacatcattgtccaactggggaacatgagcaaagattccagcataaaaattaccacagtttcattatcagcacctgatgccttaaaaatcataacagaaaatgatcatgttcttctgttttggaaaagcctggctttaaaggaaaagcattttaatgaaagcaggggctatgagatacacatgtttgatagtgccatgaatatcacagcttaccttgggaatactactgacaatttctttaaaatttccaacctgaagatgggtcataattacacgttcaccgtccaagcaagatgcctttttggcaaccagatctgtggggagcctgccatcctgctgtacgatgagctggggtctggtgcagatgcatctgcaacgcaggctgccagatctacggatgttgctgctgtggtggtgcccatcttattcctgatactgctgagcctgggggtggggtttgccatcctgtacacgaagcaccggaggctgcagagcagcttcaccgccttcgccaacagccactacagctccaggctggggtccgcaatcttctcctctggggatgacctgggggaagatgatgaagatgcccctatgataactggattttcagatgacgtccccatggtgatagcctgaaagagctttcctcactagaaaccaaatggtgtaaatattttatttgataaagatagttgatggtttattttaaaagatgcactttgagttgcaatatgttatttttatatgggccaaaaacaaaaaacaaaaaaaaaaaaaaggaaagaaaggaatgaataaactttgtagtaatcaactgtgaacttcaaaccaggttgattttagtaacccaattgctttgatttgacattaatgtagtcttacagggctgtgcttgctgggcatgcttttacgtctgtgagataatttcggttcagtaaattggccaatctttttatttttctaagacacagaaatgtatttaataaaaacctcgagagagtgatgggtggaaccccttctccttgaaagtgtgtacagatattccattttgtttggatatagtttataggaaagtgtgtggatgtattatggcggaaggtttctttatgttattttgttaatttattgggactctgtgtaaggccaggctttagtggtcattagacaccacatgtgttatgagccccttacccatagggttgggggtgggaagagaagcatatttttttgccattccggaagcaatccatttttattcacttgtgtgtcatgtaatggtctttggcaggagagagcactgagtcattgctggagttcagttcaacagagctgcagcttgggaagccctgtaagcccacagcttcctctcttatattaattgatggaattttactgtatgtgcctctgtacaagatgtagctttgagagctacaaaatgataacactgctttattacacactggtttcattgtcattgcaaaaacttaccctggttgtgggggagagttctagatctgtgccatgatccatacactggctaatagagtacataatttttccattttccattttttgtttttacttactactgaaggatctcagatgtaaaattatgtatttggtttgagatggccacttattgtccttaaaaatccatactgata

SEQ ID NO: 343495 - DNA, 873 bp, Homo sapiens
actgcacagacatggccgtttttcctggaatcctctgtagaactccactctctaacattttatccatgtggactcgtatctcataaagctcaaggggcattcaatgcatccagagacataactaaactgaatatcatcccatattgattttaggaattgactctaaaactctgtgcagaatcttgtgttgggattgtatcttgacattcctgttgtgttatttttcttaactggagtgtgtgctgcctttcaggtacaatttttgtgtaataaaagccagtgcattaagtttatatagactactttctatgcaagactgagatatggaatagataggaagagatatgtactgctgggtacatggacagtaagtgtgttttcagatggagtaccagcaccgaaaatgggttgagggaggatgggttgtatgtatgtttctgcccactaattttgagcagccatattatgaattaaatcgtcacagccaagtaataacccaagaatggtatgagtttcatgtgtaatagctcaaatggaataagcatgaatgctggagtggaccattatcctcaaatattctatgtcacttctcatttaaagactcttgttatgaactattagaaactttaggcaaaatcaaaagtatttgcggcaaaataaaggcctattctactcttatttaaagtgaaacactgtatacttgtttctctccaaagcgaaattaagtatttataatttcaattgcctcgataagtttccaagtcactgaaatctgctgaaggttttactgtattgttgcacaactttaagataatttttgtctcaatgtcaacttttttcactgaataaaaatttaactgggtcaagaaaaca

SEQ ID NO: 343496 - DNA, 3885 bp, Homo sapiens
ttgctgcgtcaactgtgttccctttggcctggctgagtttgatactgtggggattcagtttaggcgctggcccgaggatatcccagcggtggtacttcggagacacctgtctgcatctgactgagccggctctcctggcctcgcgctgcacattctctcctggcggcggcgccacctgcagtagcgttcgcccgaacatggcgacacggagcagcaggagggagtcgcgactcccgttcctattcaccctggtcgcactgctgccgcccggagctctctgcgaagtctggacgcagaggctgcacggcggcagcgcgcccttgccccaggaccggggcttcctcgtggtgcagggcgacccgcgcgagctgcggctgtgggcgcgcggggatgccaggggggcgagccgcgcggacgagaagccgctccggaggaaacggagcgctgccctgcagcccgagcccatcaaggtgtacggacaggttagtctgaatgattcccacaatcagatggtggtgcactgggctggagagaaaagcaacgtgatcgtggccttggcccgagatagcctggcattggcgaggcccaagagcagtgatgtgtacgtgtcttacgactatggaaaatcattcaagaaaatttcagacaagttaaactttggcttgggaaataggagtgaagctgttatcgcccagttctaccacagccctgcggacaacaagcggtacatctttgcagacgcttatgcccagtacctctggatcacgtttgacttctgcaacactcttcaaggcttttccatcccatttcgggcagctgatctcctcctacacagtaaggcctccaaccttctcttgggctttgacaggtcccaccccaacaagcagctgtggaagtcagatgactttggccagacctggatcatgattcaggaacatgtcaagtccttttcttggggaattgatccctatgacaaaccaaataccatctacattgaacgacacgaaccctctggctactccactgtcttccgaagtacagatttcttccagtcccgggaaaaccaggaagtgatccttgaggaagtgagagattttcagcttcgggacaagtacatgtttgctacaaaggtggtgcatctcttgggcagtgaacagcagtcttctgtccagctctgggtctcctttggccggaagcccatgagagcagcccagtttgtcacaagacatcctattaatgaatattacatcgcagatgcctccgaggaccaggtgtttgtgtgtgtcagccacagtaacaaccgcaccaatttatacatctcagaggcagaggggctgaagttctccctgtccttggagaacgtgctctattacagcccaggaggggccggcagtgacaccttggtgaggtattttgcaaatgaaccatttgctgacttccaccgagtggaaggattgcaaggagtctacattgctactctgattaatggttctatgaatgaggagaacatgagatcggtcatcacctttgacaaagggggaacctgggagtttcttcaggctccagccttcacgggatatggagagaaaatcaattgtgagctttcccagggctgttcccttcatctggctcagcgcctcagtcagctcctcaacctccagctccggagaatgcccatcctgtccaaggagtcggctccaggcctcatcatcgccactggctcagtgggaaagaacttggctagcaagacaaacgtgtacatctctagcagtgctggagccaggtggcgagaggcacttcctggacctcactactacacatggggagaccacggcggaatcatcacggccattgcccagggcatggaaaccaacgagctaaaatacagtaccaatgaaggggagacctggaaaacattcatcttctctgagaagccagtgtttgtgtatggcctcctcacagaacctggggagaagagcactgtcttcaccatctttggctcgaacaaagagaatgtccacagctggctgatcctccaggtcaatgccacggatgccttgggagttccctgcacagagaatgactacaagctgtggtcaccatctgatgagcgggggaatgagtgtttgctgggacacaagactgttttcaaacggcggaccccccatgccacatgcttcaatggagaggactttgacaggccggtggtcgtgtccaactgctcctgcacccgggaggactatgagtgtgacttcggtttcaagatgagtgaagatttgtcattagaggtttgtgttccagatccggaattttctggaaagtcatactcccctcctgtgccttgccctgtgggttctacttacaggagaacgagaggctaccggaagatttctggggacacttgtagcggaggagatgttgaagcgcgactggaaggagagctggtcccctgtcccctggcagaagagaacgagttcattctgtatgctgtgaggaaatccatctaccgctatgacctggcctcgggagccaccgagcagttgcctctcaccgggctacgggcagcagtggccctggactttgactatgagcacaactgtttgtattggtccgacctggccttggacgtcatccagcgcctctgtttgaatggaagcacagggcaagaggtgatcatcaattctggcctggagacagtagaagctttggcttttgaacccctcagccagctgctttactgggtagatgcaggcttcaaaaagattgaggtagctaatccagatggcgacttccgactcacaatcgtcaattcctctgtgcttgatcgtcccagggctctggtcctcgtgccccaagagggggtgatgttctggacagactggggagacctgaagcctgggatttatcggagcaatatggatggttctgctgcctatcacctggtgtctgaggatgtgaagtggcccaatggcatctctgtggacgaccagtggatttactggacggatgcctacctggagtgcatagagcggatcacgttcagtggccagcagcgctctgtcattctggacaacctcccgcacccctatgccattgctgtctttaagaatgaaatctactgggatgactggtcacagctcagcatattccgagcttccaaatacagtgggtcccagatggagattctggcaaaccagctcacggggctcatggacatgaagattttctacaaggggaagaacactggaagcaatgcctgtgtgcccaggccatgcagcctgctgtgcctgcccaaggccaacaacagtagaagctgcaggtgtccagaggatgtgtccagcagtgtgcttccatcaggggacctgatgtgtgactgccctcagggctatcagctcaagaacaatacctgtgtcaaagaagagaacacctgtcttcgcaaccagtatcgctgcagcaacgggaactgtatcaacagcatttggtggtgtgactttgacaacgactgtggagacatgagcgatgagagaaactgccgtgagtcttctggattggacgttaagcacttaccattactcagaagcctggttggctcttcccaggctgagggcctaaggtctagggcgagggccacccatgattggtgatgcccatctaagttgatggggcttagatgacagagaaaacatatttccatacacaggtagatattagatatataggattaatattatatacataatatttttttaaccaccccagaagtaccactcgttacaagagatttataaataaacgtcacatggctgaaactgaattgatttggcaatctgggctctaatcttggctgtggctctgtaataaagctggtgacttggggcgagtaaa

SEQ ID NO: 343497 - DNA, 1572 bp, Homo sapiens
cagactttgacacatctcttttgccaccaaatcttatctgctcctttgagtctctcttgcccagtctatagaaggggcatatgtgtggagagtctaatatgcaagttgttgtttaaataatattttctgataatattgatccattgagctcttttagatcatgctgggccaagcactgtcagccatctggtgggaagaccttccagatgacaagcatggcgctcattggttgaactgagaggggtcttttccttggccacttctccttgccccctcgactcttagcttgagctccagtctttttgagagcaccagtggtttctagttgtttagttggccatatgtgacgctatattggaaaggaagagaaagagagtatcagttgagtgctaggcatcacacatacattattttagttaaccttcccagctctgtgaaatgcagataacatctctaggctccaggaagatcagtaacttgcctaggttacacagatgccagaacaggaattcgaactcaagtttgccagcttccagaggccacaatctttccatttttgccacacgcacgtttaccatttacgatttactccattgtcagccttccgaaaggacttgagattggtgggactttgttagtgccaatcaagatgccactcgcagtgaatgatccctgttcctttaagaaccaggctgaagctgggctgttttgggacctttacaaaatggaacttttctgcctgacctaattgccaggatagccgactgagccaagatagttttgtgttcaccaagcaactgtggaccaaccttagcttcaggaaaacagtggtaaaaaaagatcgatgaggaacactgccaaagaaataccctttcttccccgactgaaagatggctttgtccgttgagttgaaaactattaagtcctgccttcctcacttttcatcacgtggcttctgtttttgaattcctttttgttttcagtgatcccaccaccagatatccacattgacagctatggtgaaaattatctaagcttcaccctgaccatggagagtgatatcaaggtaatgtgggaatttcaagccagcagctggatggggctttattttgtatgggaactgaaaggacatagcacagtaagactggaaaaaaacaaaaaacaacttcccccatgaagaacaacttgagtcttcacatgtaattattctgcctcagcctggtgcctttttatccttaaccatataattaaatggttcacagctacagtgcaaataaagagttggtgttaacagaatatgtatgccctgtaattttcagctttattggatttcctggtgctaagcgctaatgctgaggcgctcacagtggaagaacaaccttcttgtgggagagttggataccttggaaacatattcactttccatccacctaagatcttcctcttccagcaccgccatcccctctactggccctctgcatagccgacttcatcattgttacctgtgcccatgtggttcctcaagctgagatccgctttccatagtgttccttcttatctgtccctcctcac

SEQ ID NO: 343498 - DNA, 2579 bp, Homo sapiens
ttgctgcgtcaactgtgttccctttggcctggctgagtttgatactgtggggattcagtttaggcgctggcccgaggatatcccagcggtggtacttcggagacacctgtctgcatctgactgagccggctctcctggcctcgcgctgcacattctctcctggcggcggcgccacctgcagtagcgttcgcccgaacatggcgacacggagcagcaggagggagtcgcgactcccgttcctattcaccctggtcgcactgctgccgcccggagctctctgcgaagtctggacgcagaggctgcacggcggcagcgcgcccttgccccaggaccggggcttcctcgtggtgcagggcgacccgcgcgagctgcggctgtgggcgcgcggggatgccaggggggcgagccgcgcggacgagaagccgctccggaggaaacggagcgctgccctgcagcccgagcccatcaaggtgtacggacaggttagtctgaatgattcccacaatcagatggtggtgcactgggctggagagaaaagcaacgtgatcgtggccttggcccgagatagcctggcattggcgaggcccaagagcagtgatgtgtacgtgtcttacgactatggaaaatcattcaagaaaatttcagacaagttaaactttggcttgggaaataggagtgaagctgttatcgcccagttctaccacagccctgcggacaacaagcggtacatctttgcagacgcttatgcccagtacctctggatcacgtttgacttctgcaacactcttcaaggcttttccatcccatttcgggcagctgatctcctcctacacagtaaggcctccaaccttctcttgggctttgacaggtcccaccccaacaagcagctgtggaagtcagatgactttggccagacctggatcatgattcaggaacatgtcaagtccttttcttggggaattgatccctatgacaaaccaaataccatctacattgaacgacacgaaccctctggctactccactgtcttccgaagtacagatttcttccagtcccgggaaaaccaggaagtgatccttgaggaagtgagagattttcagcttcgggacaagtacatgtttgctacaaaggtggtgcatctcttgggcagtgaacagcagtcttctgtccagctctgggtctcctttggccggaagcccatgagagcagcccagtttgtcacaagacatcctattaatgaatattacatcgcagatgcctccgaggaccaggtgtttgtgtgtgtcagccacagtaacaaccgcaccaatttatacatctcagaggcagaggggctgaagttctccctgtccttggagaacgtgctctattacagcccaggaggggccggcagtgacaccttggtgaggtattttgcaaatgaaccatttgctgacttccaccgagtggaaggattgcaaggagtctacattgctactctgattaatggttctatgaatgaggagaacatgagatcggtcatcacctttgacaaagggggaacctgggagtttcttcaggctccagccttcacgggatatggagagaaaatcaattgtgagctttcccagggctgttcccttcatctggctcagcgcctcagtcagctcctcaacctccagctccggagaatgcccatcctgtccaaggagtcggctccaggcctcatcatcgccactggctcagtgggaaagaacttggctagcaagacaaacgtgtacatctctagcagtgctggagccaggtggcgagaggcacttcctggacctcactactacacatggggagaccacggcggaatcatcacggccattgcccagggcatggaaaccaacgagctaaaatacagtaccaatgaaggggagacctggaaaacattcatcttctctgagaagccagtgtttgtgtatggcctcctcacagaacctggggagaagagcactgtcttcaccatctttggctcgaacaaagagaatgtccacagctggctgatcctccaggtcaatgccacggatgccttgggagttccctgcacagagaatgactacaagctgtggtcaccatctgatgagcgggggaatgagtgtttgctgggacacaagactgttttcaaacggcggaccccccatgccacatgcttcaatggagaggactttgacaggccggtggtcgtgtccaactgctcctgcacccgggaggactatgagtggtcagttcttctttgatggctggggactgagttgtgttttattcactcagcagtgttgggggaagagattaggcatggtccctttccctgagcaaaggaagggaatagaaggaaacaagtatttgtgaagcatcttttagatacacatgctaaagtatttagagataaaatatggtattatagattccttcaaaataatcctgtaaggactagagggcagtgagtggggtatggatgaaagaggattggccctttggtgataatagttgttgctaggaatagagacacatggggattcatcactataaaacaaaaataaacgatttttact

SEQ ID NO: 343499 - DNA, 593 bp, Homo sapiens
aaaaaaacgaacggctagatctagtgaagctaaaataccaggactagggtggttccttcccccatgaagaacaacttgagtcttcacatgtaattattctgcctcagcctggtgcctttttatccttaaccatataattaaatggttcacagctacagtgcaaataaagagttggtgttaacagaatatgtatgccctgtaattttcagctttattggatttcctggtgctaagcgctaatgctgaggcgctcacagtggaagaacaaccttcttgtgggagagttggataccttggaaacatattcactttccatccacctaagatcttcctcttccagcaccgccatcccctctactggccctctgcatagccgacttcatcattgttacctgtgcccatgtggttcctcaagctgagatccgctttccatagtgttccttcttatctgtccctcctcacagcctctccattgatgaatttgtgttgggacaagttgggacaagcaaccttcagagtctttctgccatttacttaactgccatttagtgtcatgaccttggcttcagaatgggttgatataagaaatggcc

SEQ ID NO: 343500 - DNA, 534 bp, Homo sapiens
atttgcttatccctcgtcgaccttggattgcttccacattttagctgttgtgaataatgctgctatctgtgaaaggtttttaaggacactgtttcttcgttgaaaagtgctgagtaatcatcctttggtttttaccattacctagaggctagtcttgagtgaaatataatttttggtaatccataaatggaaggcaagtcctactcatttttccttccagttgctattgagagaacacataggtacacagttgtctttcctttcttgcccttgtttgcttttggagcaactgagctggctttggcagtctcagtgcctgccttcacagacagcgtgtcatggaaggtgggatttcagcgggtgtttgatggtgatgccattcaggttgtattatacatgcctcttgcatcatgaccacttgtctttgcagctgtggaagtcagatgactttggccagacctggatcatgattcaggaacatgtcaagtccttttcttggtaagttgtgtcatctaagaaatcttgatatatgta

SEQ ID NO: 343501 - DNA, 585 bp, Homo sapiens
ctttgggttcagaagagaaagcagacactgaagttcactgtgctagtgtagggtatagataactcaaactggggaacccaaactacccacttagcttttgagtaggtaataagagtcttctcctgagaagctttgttttcctaatttggctacgttcaaacgaccactaaaataaatgtgaggatccatcgatgggtagaaggtggccaggagggacagtgggaagctgggctaggtttcacagctgattatggtggctgcctggctatggcattgaccttctcagctagagggttgtggtagggttgaggggtgggtagagtggtgggatatggggtcaggtgaaaatgtgttggaactcaccaaggcctgactgttttgtctctaggggaagatgatgaagatgcccctatgataactggattttcagatgacgtccccatggtgatagcctgaaagagctttcctcactagaaaccaaatggtgtaaatattttatttgataaagatagttgatggtttattttaaaagatgcactttgagttgcaatatgttatttttatatgggccaaaaacaaaaaaca

SEQ ID NO: 343502 - DNA, 962 bp, Homo sapiens
  misc_feature (655)..(655): n is a, c, g, or t
  misc_feature (669)..(669): n is a, c, g, or t
  misc_feature (678)..(678): n is a, c, g, or t
  misc_feature (701)..(701): n is a, c, g, or t
  misc_feature (705)..(705): n is a, c, g, or t
  misc_feature (713)..(713): n is a, c, g, or t
  misc_feature (729)..(729): n is a, c, g, or t
  misc_feature (731)..(731): n is a, c, g, or t
  misc_feature (740)..(740): n is a, c, g, or t
  misc_feature (745)..(745): n is a, c, g, or t
  misc_feature (753)..(753): n is a, c, g, or t
  misc_feature (755)..(755): n is a, c, g, or t
  misc_feature (773)..(773): n is a, c, g, or t
  misc_feature (777)..(777): n is a, c, g, or t
  misc_feature (779)..(779): n is a, c, g, or t
  misc_feature (782)..(782): n is a, c, g, or t
  misc_feature (788)..(788): n is a, c, g, or t
  misc_feature (826)..(826): n is a, c, g, or t
  misc_feature (840)..(840): n is a, c, g, or t
  misc_feature (844)..(844): n is a, c, g, or t
  misc_feature (850)..(850): n is a, c, g, or t
  misc_feature (853)..(853): n is a, c, g, or t
  misc_feature (856)..(856): n is a, c, g, or t
  misc_feature (859)..(859): n is a, c, g, or t
  misc_feature (878)..(878): n is a, c, g, or t
  misc_feature (898)..(898): n is a, c, g, or t
  misc_feature (929)..(929): n is a, c, g, or t
ggcgcgggcggcctggagccccgggagcggcgcgcgcggtcccggcccagcggctctcctggcctcgcgctgcacattctctcctggcggcggcgccacctgcagtagcgttcgcccgaacatggcgacacggagcagcaggagggagtcgcgactcccgttcctattcaccctggtcgcactgctgccgcccggagctctctgcgaagtctggacgcagaggctgcacggcggcagcgcgcccttgccccaggaccggggcttcctcgtggtgcagggcgacccgcgcgagctgcggctgtgggcgcgcggggatgccaggggggcgagccgcgcggacgagaagccgctccggaggaaacggagcgctgccctgcagcccgagcccatcaaggtgtacggacaggttagtctgaatgattcccacaatcagatggtggtgcactgggctggagagaaaagcaacgtgatcgtggccttggcccgagatagcctggcattggcgaggcccaagagcagtgatgtgtacgtgtcttacgactatggaaaatcattcaagaaaatttcagacaagttaaactttggcttgggaaataggagtgaagctgttatcgcccagttctaccacagccctgcggacaacaagcggtacatntttgcagacgctangccatactntggatcacgttgacttgcacatntcangcttgcanccattcgggagtgttncnctaacagtnaggcncaactttntnggttgaagtccaccacanatgngnatnaagttngcaatggtactgtcagactagcatcttgtgggtgtacntagaacaaactatnatgnagatanacngtncantcgaaattcagcgggacanatatggagattcatcgaatntgtaatggtttagctgaaattctcatagtcnagcgcacaaagacttgcgatatatattatatgt

SEQ ID NO: 343503 - DNA, 7870 bp, Homo sapiens
ttgctgcgtcaactgtgttccctttggcctggctgagtttgatactgtggggattcagtttaggcgctggcccgaggatatcccagcggtggtacttcggagacacctgtctgcatctgactgagccggctctcctggcctcgcgctgcacattctctcctggcggcggcgccacctgcagtagcgttcgcccgaacatggcgacacggagcagcaggagggagtcgcgactcccgttcctattcaccctggtcgcactgctgccgcccggagctctctgcgaagtctggacgcagaggctgcacggcggcagcgcgcccttgccccaggaccggggcttcctcgtggtgcagggcgacccgcgcgagctgcggctgtgggcgcgcggggatgccaggggggcgagccgcgcggacgagaagccgctccggaggaaacggagcgctgccctgcagcccgagcccatcaaggtgtacggacaggttagtctgaatgattcccacaatcagatggtggtgcactgggctggagagaaaagcaacgtgatcgtggccttggcccgagatagcctggcattggcgaggcccaagagcagtgatgtgtacgtgtcttacgactatggaaaatcattcaagaaaatttcagacaagttaaactttggcttgggaaataggagtgaagctgttatcgcccagttctaccacagccctgcggacaacaagcggtacatctttgcagacgcttatgcccagtacctctggatcacgtttgacttctgcaacactcttcaaggcttttccatcccatttcgggcagctgatctcctcctacacagtaaggcctccaaccttctcttgggctttgacaggtcccaccccaacaagcagctgtggaagtcagatgactttggccagacctggatcatgattcaggaacatgtcaagtccttttcttggggaattgatccctatgacaaaccaaataccatctacattgaacgacacgaaccctctggctactccactgtcttccgaagtacagatttcttccagtcccgggaaaaccaggaagtgatccttgaggaagtgagagattttcagcttcgggacaagtacatgtttgctacaaaggtggtgcatctcttgggcagtgaacagcagtcttctgtccagctctgggtctcctttggccggaagcccatgagagcagcccagtttgtcacaagacatcctattaatgaatattacatcgcagatgcctccgaggaccaggtgtttgtgtgtgtcagccacagtaacaaccgcaccaatttatacatctcagaggcagaggggctgaagttctccctgtccttggagaacgtgctctattacagcccaggaggggccggcagtgacaccttggtgaggtattttgcaaatgaaccatttgctgacttccaccgagtggaaggattgcaaggagtctacattgctactctgattaatggttctatgaatgaggagaacatgagatcggtcatcacctttgacaaagggggaacctgggagtttcttcaggctccagccttcacgggatatggagagaaaatcaattgtgagctttcccagggctgttcccttcatctggctcagcgcctcagtcagctcctcaacctccagctccggagaatgcccatcctgtccaaggagtcggctccaggcctcatcatcgccactggctcagtgggaaagaacttggctagcaagacaaacgtgtacatctctagcagtgctggagccaggtggcgagaggcacttcctggacctcactactacacatggggagaccacggcggaatcatcacggccattgcccagggcatggaaaccaacgagctaaaatacagtaccaatgaaggggagacctggaaaacattcatcttctctgagaagccagtgtttgtgtatggcctcctcacagaacctggggagaagagcactgtcttcaccatctttggctcgaacaaagagaatgtccacagctggctgatcctccaggtcaatgccacggatgccttgggagttccctgcacagagaatgactacaagctgtggtcaccatctgatgagcgggggaatgagtgtttgctgggacacaagactgttttcaaacggcggaccccccatgccacatgcttcaatggagaggactttgacaggccggtggtcgtgtccaactgctcctgcacccgggaggactatgagtgtgacttcggtttcaagatgagtgaagatttgtcattagaggtttgtgttccagatccggaattttctggaaagtcatactcccctcctgtgccttgccctgtgggttctacttacaggagaacgagaggctaccggaagatttctggggacacttgtagcggaggagatgttgaagcgcgactggaaggagagctggtcccctgtcccctggcagaagagaacgagttcattctgtatgctgtgaggaaatccatctaccgctatgacctggcctcgggagccaccgagcagttgcctctcaccgggctacgggcagcagtggccctggactttgactatgagcacaactgtttgtattggtccgacctggccttggacgtcatccagcgcctctgtttgaatggaagcacagggcaagaggtgatcatcaattctggcctggagacagtagaagctttggcttttgaacccctcagccagctgctttactgggtagatgcaggcttcaaaaagattgaggtagctaatccagatggcgacttccgactcacaatcgtcaattcctctgtgcttgatcgtcccagggctctggtcctcgtgccccaagagggggtgatgttctggacagactggggagacctgaagcctgggatttatcggagcaatatggatggttctgctgcctatcacctggtgtctgaggatgtgaagtggcccaatggcatctctgtggacgaccagtggatttactggacggatgcctacctggagtgcatagagcggatcacgttcagtggccagcagcgctctgtcattctggacaacctcccgcacccctatgccattgctgtctttaagaatgaaatctactgggatgactggtcacagctcagcatattccgagcttccaaatacagtgggtcccagatggagattctggcaaaccagctcacggggctcatggacatgaagattttctacaaggggaagaacactggaagcaatgcctgtgtgcccaggccatgcagcctgctgtgcctgcccaaggccaacaacagtagaagctgcaggtgtccagaggatgtgtccagcagtgtgcttccatcaggggacctgatgtgtgactgccctcagggctatcagctcaagaacaatacctgtgtcaaagaagagaacacctgtcttcgcaaccagtatcgctgcagcaacgggaactgtatcaacagcatttggtggtgtgactttgacaacgactgtggagacatgagcgatgagagaaactgccctaccaccatctgtgacctggacacccagtttcgttgccaggagtctgggacttgtatcccactgtcctataaatgtgaccttgaggatgactgtggagacaacagtgatgaaagtcattgtgaaatgcaccagtgccggagtgacgagtacaactgcagttccggcatgtgcatccgctcctcctgggtatgtgacggggacaacgactgcagggactggtctgatgaagccaactgtaccgccatctatcacacctgtgaggcctccaacttccagtgccgaaacgggcactgcatcccccagcggtgggcgtgtgacggggatacggactgccaggatggttccgatgaggatccagtcaactgtgagaagaagtgcaatggattccgctgcccaaacggcacttgcatcccatccagcaaacattgtgatggtctgcgtgattgctctgatggctccgatgaacagcactgcgagcccctctgtacgcacttcatggactttgtgtgtaagaaccgccagcagtgcctgttccactccatggtctgtgacggaatcatccagtgccgcgacgggtccgatgaggatgcggcgtttgcaggatgctcccaagatcctgagttccacaaggtatgtgatgagttcggtttccagtgtcagaatggagtgtgcatcagtttgatttggaagtgcgacgggatggatgattgcggcgattattctgatgaagccaactgcgaaaaccccacagaagccccaaactgctcccgctacttccagtttcggtgtgagaatggccactgcatccccaacagatggaaatgtgacagggagaacgactgtggggactggtctgatgagaaggattgtggagattcacatattcttcccttctcgactcctgggccctccacgtgtctgcccaattactaccgctgcagcagtgggacctgcgtgatggacacctgggtgtgcgacgggtaccgagattgtgcagatggctctgacgaggaagcctgccccttgcttgcaaacgtcactgctgcctccactcccacccaacttgggcgatgtgaccgatttgagttcgaatgccaccaaccgaagacgtgtattcccaactggaagcgctgtgacggccaccaagattgccaggatggccgggacgaggccaattgccccacacacagcaccttgacttgcatgagcagggagttccagtgcgaggacggggaggcctgcattgtgctctcggagcgctgcgacggcttcctggactgctcggacgagagcgatgaaaaggcctgcagtgatgagttgactgtgtacaaagtacagaatcttcagtggacagctgacttctctggggatgtgactttgacctggatgaggcccaaaaaaatgccctctgcttcttgtgtatataatgtctactacagggtggttggagagagcatatggaagactctggagacccacagcaataagacaaacactgtattaaaagtcttgaaaccagataccacgtatcaggttaaagtacaggttcagtgtctcagcaaggcacacaacaccaatgactttgtgaccctgaggaccccagagggattgccagatgcccctcgaaatctccagctgtcactccccagggaagcagaaggtgtgattgtaggccactgggctcctcccatccacacccatggcctcatccgtgagtacattgtagaatacagcaggagtggttccaagatgtgggcctcccagagggctgctagtaactttacagaaatcaagaacttattggtcaacactctatacaccgtcagagtggctgcggtgactagtcgtggaataggaaactggagcgattctaaatccattaccaccataaaaggaaaagtgatcccaccaccagatatccacattgacagctatggtgaaaattatctaagcttcaccctgaccatggagagtgatatcaaggtgaatggctatgtggtgaaccttttctgggcatttgacacccacaagcaagagaggagaactttgaacttccgaggaagcatattgtcacacaaagttggcaatctgacagctcatacatcctatgagatttctgcctgggccaagactgacttgggggatagccctctggcatttgagcatgttatgaccagaggggttcgcccacctgcacctagcctcaaggccaaagccatcaaccagactgcagtggaatgtacctggaccggcccccggaatgtggtttatggtattttctatgccacgtcctttcttgacctctatcgcaacccgaagagcttgactacttcactccacaacaagacggtcattgtcagtaaggatgagcagtatttgtttctggtccgtgtagtggtaccctaccaggggccatcctctgactacgttgtagtgaagatgatcccggacagcaggcttccaccccgtcacctgcatgtggttcatacgggcaaaacctccgtggtcatcaagtgggaatcaccgtatgactctcctgaccaggacttgttgtatgcaattgcagtcaaagatctcataagaaagactgacaggagctacaaagtaaaatcccgtaacagcactgtggaatacacccttaacaagttggagcctggcgggaaataccacatcattgtccaactggggaacatgagcaaagattccagcataaaaattaccacagtttcattatcagcacctgatgccttaaaaatcataacagaaaatgatcatgttcttctgttttggaaaagcctggctttaaaggaaaagcattttaatgaaagcaggggctatgagatacacatgtttgatagtgccatgaatatcacagcttaccttgggaatactactgacaatttctttaaaatttccaacctgaagatgggtcataattacacgttcaccgtccaagcaagatgcctttttggcaaccagatctgtggggagcctgccatcctgctgtacgatgagctggggtctggtgcagatgcatctgcaacgcaggctgccagatctacggatgttgctgctgtggtggtgcccatcttattcctgatactgctgagcctgggggtggggtttgccatcctgtacacgaagcaccggaggctgcagagcagcttcaccgccttcgccaacagccactacagctccaggctggggtccgcaatcttctcctctggggatgacctgggggaagatgatgaagatgcccctatgataactggattttcagatgacgtccccatggtgatagcctgaaagagctttcctcactagaaaccaaatggtgtaaatattttatttgataaagatagttgatggtttattttaaaagatgcactttgagttgcaatatgttatttttatatgggccaaaaacaaaaaacaaaaaaaaaaaaaaggaaagaaaggaatgaataaactttgtagtaatcaactgtgaacttcaaaccaggttgattttagtaacccaattgctttgatttgacattaatgtagtcttacagggctgtgcttgctgggcatgcttttacgtctgtgagataatttcggttcagtaaattggccaatctttttatttttctaagacacagaaatgtatttaataaaaacctcgagagagtgatgggtggaaccccttctccttgaaagtgtgtacagatattccattttgtttggatatagtttataggaaagtgtgtggatgtattatggcggaaggtttctttatgttattttgttaatttattgggactctgtgtaaggccaggctttagtggtcattagacaccacatgtgttatgagccccttacccatagggttgggggtgggaagagaagcatatttttttgccattccggaagcaatccatttttattcacttgtgtgtcatgtaatggtctttggcaggagagagcactgagtcattgctggagttcagttcaacagagctgcagcttgggaagccctgtaagcccacagcttcctctcttatattaattgatggaattttactgtatgtgcctctgtacaagatgtagctttgagagctacaaaatgataacactgctttattacacactggtttcattgtcattgcaaaaacttaccctggttgtgggggagagttctagatctgtgccatgatccatacactggctaatagagtacataatttttccattttccattttttgtttttacttactactgaaggatctcagatgtaaaattatgtatttggtttgagatggccacttattgtccttaaaaatccatactgata

SEQ ID NO: 343504 - DNA, 6025 bp, Homo sapiens
ttgctgcgtcaactgtgttccctttggcctggctgagtttgatactgtggggattcagtttaggcgctggcccgaggatatcccagcggtggtacttcggagacacctgtctgcatctgactgagccggctctcctggcctcgcgctgcacattctctcctggcggcggcgccacctgcagtagcgttcgcccgaacatggcgacacggagcagcaggagggagtcgcgactcccgttcctattcaccctggtcgcactgctgccgcccggagctctctgcgaagtctggacgcagaggctgcacggcggcagcgcgcccttgccccaggaccggggcttcctcgtggtgcagggcgacccgcgcgagctgcggctgtgggcgcgcggggatgccaggggggcgagccgcgcggacgagaagccgctccggaggaaacggagcgctgccctgcagcccgagcccatcaaggtgtacggacaggttagtctgaatgattcccacaatcagatggtggtgcactgggctggagagaaaagcaacgtgatcgtggccttggcccgagatagcctggcattggcgaggcccaagagcagtgatgtgtacgtgtcttacgactatggaaaatcattcaagaaaatttcagacaagttaaactttggcttgggaaataggagtgaagctgttatcgcccagttctaccacagccctgcggacaacaagcggtacatctttgcagacgcttatgcccagtacctctggatcacgtttgacttctgcaacactcttcaaggcttttccatcccatttcgggcagctgatctcctcctacacagtaaggcctccaaccttctcttgggctttgacaggtcccaccccaacaagcagctgtggaagtcagatgactttggccagacctggatcatgattcaggaacatgtcaagtccttttcttggggaattgatccctatgacaaaccaaataccatctacattgaacgacacgaaccctctggctactccactgtcttccgaagtacagatttcttccagtcccgggaaaaccaggaagtgatccttgaggaagtgagagattttcagcttcgggacaagtacatgtttgctacaaaggtggtgcatctcttgggcagtgaacagcagtcttctgtccagctctgggtctcctttggccggaagcccatgagagcagcccagtttgtcacaagacatcctattaatgaatattacatcgcagatgcctccgaggaccaggtgtttgtgtgtgtcagccacagtaacaaccgcaccaatttatacatctcagaggcagaggggctgaagttctccctgtccttggagaacgtgctctattacagcccaggaggggccggcagtgacaccttggtgaggtattttgcaaatgaaccatttgctgacttccaccgagtggaaggattgcaaggagtctacattgctactctgattaatggttctatgaatgaggagaacatgagatcggtcatcacctttgacaaagggggaacctgggagtttcttcaggctccagccttcacgggatatggagagaaaatcaattgtgagctttcccagggctgttcccttcatctggctcagcgcctcagtcagctcctcaacctccagctccggagaatgcccatcctgtccaaggagtcggctccaggcctcatcatcgccactggctcagtgggaaagaacttggctagcaagacaaacgtgtacatctctagcagtgctggagccaggtggcgagaggcacttcctggacctcactactacacatggggagaccacggcggaatcatcacggccattgcccagggcatggaaaccaacgagctaaaatacagtaccaatgaaggggagacctggaaaacattcatcttctctgagaagccagtgtttgtgtatggcctcctcacagaacctggggagaagagcactgtcttcaccatctttggctcgaacaaagagaatgtccacagctggctgatcctccaggtcaatgccacggatgccttgggagttccctgcacagagaatgactacaagctgtggtcaccatctgatgagcgggggaatgagtgtttgctgggacacaagactgttttcaaacggcggaccccccatgccacatgcttcaatggagaggactttgacaggccggtggtcgtgtccaactgctcctgcacccgggaggactatgagtgtgacttcggtttcaagatgagtgaagatttgtcattagaggtttgtgttccagatccggaattttctggaaagtcatactcccctcctgtgccttgccctgtgggttctacttacaggagaacgagaggctaccggaagatttctggggacacttgtagcggaggagatgttgaagcgcgactggaaggagagctggtcccctgtcccctggcagaagagaacgagttcattctgtatgctgtgaggaaatccatctaccgctatgacctggcctcgggagccaccgagcagttgcctctcaccgggctacgggcagcagtggccctggactttgactatgagcacaactgtttgtattggtccgacctggccttggacgtcatccagcgcctctgtttgaatggaagcacagggcaagaggtgatcatcaattctggcctggagacagtagaagctttggcttttgaacccctcagccagctgctttactgggtagatgcaggcttcaaaaagattgaggtagctaatccagatggcgacttccgactcacaatcgtcaattcctctgtgcttgatcgtcccagggctctggtcctcgtgccccaagagggggtgatgttctggacagactggggagacctgaagcctgggatttatcggagcaatatggatggttctgctgcctatcacctggtgtctgaggatgtgaagtggcccaatggcatctctgtggacgaccagtggatttactggacggatgcctacctggagtgcatagagcggatcacgttcagtggccagcagcgctctgtcattctggacaacctcccgcacccctatgccattgctgtctttaagaatgaaatctactgggatgactggtcacagctcagcatattccgagcttccaaatacagtgggtcccagatggagattctggcaaaccagctcacggggctcatggacatgaagattttctacaaggggaagaacactggaagcaatgcctgtgtgcccaggccatgcagcctgctgtgcctgcccaaggccaacaacagtagaagctgcaggtgtccagaggatgtgtccagcagtgtgcttccatcaggggacctgatgtgtgactgccctcagggctatcagctcaagaacaatacctgtgtcaaagaagagaacacctgtcttcgcaaccagtatcgctgcagcaacgggaactgtatcaacagcatttggtggtgtgactttgacaacgactgtggagacatgagcgatgagagaaactgccctaccaccatctgtgacctggacacccagtttcgttgccaggagtctgggacttgtatcccactgtcctataaatgtgaccttgaggatgactgtggagacaacagtgatgaaagtcattgtgaaatgcaccagtgccggagtgacgagtacaactgcagttccggcatgtgcatccgctcctcctgggtatgtgacggggacaacgactgcagggactggtctgatgaagccaactgtaccgccatctatcacacctgtgaggcctccaacttccagtgccgaaacgggcactgcatcccccagcggtgggcgtgtgacggggatacggactgccaggatggttccgatgaggatccagtcaactgtgagaagaagtgcaatggattccgctgcccaaacggcacttgcatcccatccagcaaacattgtgatggtctgcgtgattgctctgatggctccgatgaacagcactgcgagcccctctgtacgcacttcatggactttgtgtgtaagaaccgccagcagtgcctgttccactccatggtctgtgacggaatcatccagtgccgcgacgggtccgatgaggatgcggcgtttgcaggatgctcccaagatcctgagttccacaaggtatgtgatgagttcggtttccagtgtcagaatggagtgtgcatcagtttgatttggaagtgcgacgggatggatgattgcggcgattattctgatgaagccaactgcgaaaaccccacagaagccccaaactgctcccgctacttccagtttcggtgtgagaatggccactgcatccccaacagatggaaatgtgacagggagaacgactgtggggactggtctgatgagaaggattgtggagattcacatattcttcccttctcgactcctgggccctccacgtgtctgcccaattactaccgctgcagcagtgggacctgcgtgatggacacctgggtgtgcgacgggtaccgagattgtgcagatggctctgacgaggaagcctgccccttgcttgcaaacgtcactgctgcctccactcccacccaacttgggcgatgtgaccgatttgagttcgaatgccaccaaccgaagacgtgtattcccaactggaagcgctgtgacggccaccaagattgccaggatggccgggacgaggccaattgccccacacacagcaccttgacttgcatgagcagggagttccagtgcgaggacggggaggcctgcattgtgctctcggagcgctgcgacggcttcctggactgctcggacgagagcgatgaaaaggcctgcagtgatgagttgactgtgtacaaagtacagaatcttcagtggacagctgacttctctggggatgtgactttgacctggatgaggcccaaaaaaatgccctctgcttcttgtgtatataatgtctactacagggtggttggagagagcatatggaagactctggagacccacagcaataagacaaacactgtattaaaagtcttgaaaccagataccacgtatcaggttaaagtacaggttcagtgtctcagcaaggcacacaacaccaatgactttgtgaccctgaggaccccagagggattgccagatgcccctcgaaatctccagctgtcactccccagggaagcagaaggtgtgattgtaggccactgggctcctcccatccacacccatggcctcatccgtgagtacattgtagaatacagcaggagtggttccaagatgtgggcctcccagagggctgctagtaactttacagaaatcaagaacttattggtcaacactctatacaccgtcagagtggctgcggtgactagtcgtggaataggaaactggagcgattctaaatccattaccaccataaaaggaaaagtgatcccaccaccagatatccacattgacagctatggtgaaaattatctaagcttcaccctgaccatggagagtgatatcaaggtaatgtgggaatttcaagccagcagctggatggggctttattttgtatgggaactgaaaggacatagcacagtaagactggaaaaaaacaaaaaacaacttcccccatgaagaacaacttgagtcttcacatgtaattattctgcctcagcctggtgcctttttatccttaaccatataattaaatggttcacagctacagtgcaaataaagagttggtgttaacagaatatgtatgccctgtaattttcagctttattggatttcctggtgctaagcgctaatgctgaggcgctcacagtggaagaacaaccttcttgtgggagagttggataccttggaaacatattcactttccatccacctaagatcttcctcttccagcaccgccatcccctctactggccctctgcatagccgacttcatcattgttacctgtgcccatgtggttcctcaagctgagatccgctttccatagtgttccttcttatctgtccctcctcac

SEQ ID NO: 343505 - DNA, 3911 bp, Homo sapiens
ttgctgcgtcaactgtgttccctttggcctggctgagtttgatactgtggggattcagtttaggcgctggcccgaggatatcccagcggtggtacttcggagacacctgtctgcatctgactgagccggctctcctggcctcgcgctgcacattctctcctggcggcggcgccacctgcagtagcgttcgcccgaacatggcgacacggagcagcaggagggagtcgcgactcccgttcctattcaccctggtcgcactgctgccgcccggagctctctgcgaagtctggacgcagaggctgcacggcggcagcgcgcccttgccccaggaccggggcttcctcgtggtgcagggcgacccgcgcgagctgcggctgtgggcgcgcggggatgccaggggggcgagccgcgcggacgagaagccgctccggaggaaacggagcgctgccctgcagcccgagcccatcaaggtgtacggacaggttagtctgaatgattcccacaatcagatggtggtgcactgggctggagagaaaagcaacgtgatcgtggccttggcccgagatagcctggcattggcgaggcccaagagcagtgatgtgtacgtgtcttacgactatggaaaatcattcaagaaaatttcagacaagttaaactttggcttgggaaataggagtgaagctgttatcgcccagttctaccacagccctgcggacaacaagcggtacatctttgcagacgcttatgcccagtacctctggatcacgtttgacttctgcaacactcttcaaggcttttccatcccatttcgggcagctgatctcctcctacacagtaaggcctccaaccttctcttgggctttgacaggtcccaccccaacaagcagctgtggaagtcagatgactttggccagacctggatcatgattcaggaacatgtcaagtccttttcttggggaattgatccctatgacaaaccaaataccatctacattgaacgacacgaaccctctggctactccactgtcttccgaagtacagatttcttccagtcccgggaaaaccaggaagtgatccttgaggaagtgagagattttcagcttcgggacaagtacatgtttgctacaaaggtggtgcatctcttgggcagtgaacagcagtcttctgtccagctctgggtctcctttggccggaagcccatgagagcagcccagtttgtcacaagacatcctattaatgaatattacatcgcagatgcctccgaggaccaggtgtttgtgtgtgtcagccacagtaacaaccgcaccaatttatacatctcagaggcagaggggctgaagttctccctgtccttggagaacgtgctctattacagcccaggaggggccggcagtgacaccttggtgaggtattttgcaaatgaaccatttgctgacttccaccgagtggaaggattgcaaggagtctacattgctactctgattaatggttctatgaatgaggagaacatgagatcggtcatcacctttgacaaagggggaacctgggagtttcttcaggctccagccttcacgggatatggagagaaaatcaattgtgagctttcccagggctgttcccttcatctggctcagcgcctcagtcagctcctcaacctccagctccggagaatgcccatcctgtccaaggagtcggctccaggcctcatcatcgccactggctcagtgggaaagaacttggctagcaagacaaacgtgtacatctctagcagtgctggagccaggtggcgagaggcacttcctggacctcactactacacatggggagaccacggcggaatcatcacggccattgcccagggcatggaaaccaacgagctaaaatacagtaccaatgaaggggagacctggaaaacattcatcttctctgagaagccagtgtttgtgtatggcctcctcacagaacctggggagaagagcactgtcttcaccatctttggctcgaacaaagagaatgtccacagctggctgatcctccaggtcaatgccacggatgccttgggagttccctgcacagagaatgactacaagctgtggtcaccatctgatgagcgggggaatgagtgtttgctgggacacaagactgttttcaaacggcggaccccccatgccacatgcttcaatggagaggactttgacaggccggtggtcgtgtccaactgctcctgcacccgggaggactatgagtgtgacttcggtttcaagatgagtgaagatttgtcattagaggtttgtgttccagatccggaattttctggaaagtcatactcccctcctgtgccttgccctgtgggttctacttacaggagaacgagaggctaccggaagatttctggggacacttgtagcggaggagatgttgaagcgcgactggaaggagagctggtcccctgtcccctggcagaagagaacgagttcattctgtatgctgtgaggaaatccatctaccgctatgacctggcctcgggagccaccgagcagttgcctctcaccgggctacgggcagcagtggccctggactttgactatgagcacaactgtttgtattggtccgacctggccttggacgtcatccagcgcctctgtttgaatggaagcacagggcaagaggtgatcatcaattctggcctggagacagtagaagctttggcttttgaacccctcagccagctgctttactgggtagatgcaggcttcaaaaagattgaggtagctaatccagatggcgacttccgactcacaatcgtcaattcctctgtgcttgatcgtcccagggctctggtcctcgtgccccaagagggggtgatgttctggacagactggggagacctgaagcctgggatttatcggagcaatatggatggttctgctgcctatcacctggtgtctgaggatgtgaagtggcccaatggcatctctgtggacgaccagtggatttactggacggatgcctacctggagtgcatagagcggatcacgttcagtggccagcagcgctctgtcattctggacaacctcccgcacccctatgccattgctgtctttaagaatgaaatctactgggatgactggtcacagctcagcatattccgagcttccaaatacagtgggtcccagatggagattctggcaaaccagctcacggggctcatggacatgaagattttctacaaggggaagaacactggaagcaatgcctgtgtgcccaggccatgcagcctgctgtgcctgcccaaggccaacaacagtagaagctgcaggtgtccagaggatgtgtccagcagtgtgcttccatcaggggacctgatgtgtgactgccctcagggctatcagctcaagaacaatacctgtgtcaaagaagagaacacctgtcttcgcaaccagtatcgctgcagcaacgggaactgtatcaacagcatttggtggtgtgactttgacaacgactgtggagacatgagcgatgagagaaactgccctaccaccatctgtgacctggacacccagtttcgttgccaggagtctgggacttgtatcccactgtcctataaatgtgaccttgaggatgactgtggagacaacagtgatgaaagtcattgtgaaatgcaccagtgccggagtgacgagtacaactgcagttccggcatgtgcatccgctcctcctgggtatgtgacggggacaacgactgcagggactggtctgatgaagccaactgtaccggtcagtacttcctggactcagttgacagcactcatccgttcatgcagtggttaacattatagctttaaacgatcggaaaatctaggctctgagaattagcttggaccttagaaatcagcgagtttcatgcttct

SEQ ID NO: 343506 - DNA, 407 bp, Homo sapiens
actccagagcccatcctatctattgtgtcccacaagggaacacgacattcaaattcaagtaacatttgctaagtgccaaagacatagtacacatcaagctaaatgccttctcatttgcccacaaactctaagatggtaatgttattcctcttttcatggatggactccaaggctttgagaggtgggaactttggtattttctgacatcctgattttgtgacattcttctccagttcccttggatttgtatgaaaactcaagtaatggtagtatcagattcaaactggaaaatccaagtaccagtaaaaggttctctctctttttattttttaatttaaaaaaaaatttttttagagacaaagtctcactctgttgctcaggctagagtacactggtgtgatcacagc

SEQ ID NO: 343507 - DNA, 166 bp, Homo sapiens
tccaagttttgacaattatgaataaagccgtcataaacatctatgtgcacgcaggcttttgcgtaggcataagttttctcaaggattttttcaaatctatcttttttttttttagatggagtctcactctgtcacccaggctggagtgcagtagtgcgatctcagc

SEQ ID NO: 343508 - DNA, 477 bp, Homo sapiens
actttaaccccttgactgctctgatgtgagacgacacccttacagtggctgccttgtatgtgaaacctacccttaactaacccccatttatggctgtaggatatgtaatataattactgggaggggactgtgttggactcttctaatggggcctttttggctgtgacaagccttagattagtgtcgacagaaggacaattcattccctccagtggagccccttctttaggcatatttagcttttaatggtatcataggcaataaccacttttaatttgcagatgattctttctcaaccagtagatgaaataatgatatcaaatggtacatttccccatcaaacttgcttagtttgatgttatgttattatgttatcgattgctgggtaacaaattaccccaacaaattacctctcctacccatctattgctgggtagcaaattaccccccaaaatgtggcagcttaaaattaaaaaa

SEQ ID NO: 343509 - DNA, 392 bp, Homo sapiens
ttgtctagggaacagcgcaggtcgggaggaaaaacactcctggagctcagcaaagtccgggatgtaaccccaactcccggcttctcacctatggcaggtacgcagctccatagggctgtcatgcaagtaacatgaaataaaccaagagcctaagcccgtgtccgtccgccatctgttcccatgaaaccattactgttagtgcacaaaaacataaaaatacaaaacaaaaatagaaaagctcctgtcttgtcaccagtggatgtaaaactgtagatatggtatgtggaacccaatcctacaagcaaatattctccctctccactactccttttgctgaaacatcaagccgtcctcactccagaacagggaaagtcaagacaaagggatacacc

SEQ ID NO: 343510 - DNA, 379 bp, Homo sapiens
gaaaagttatgaaaggggtcttgtctgtcataaccagctctaaattggctacctgtaaagaggaacgtcctggatggcacataaatagcgggtaatccaacaaaaaataatcttcatagctaacatgttcatttttagtattgctccaatttttactcctttttggggggatggggggaacagagcctcgctctgtcacccaggctggatctcgacccactgcaacctccacctcctgggctcaagccatcctcccccgacctcagcctcctgagtagctgaggtgggaatatcgctggagtccaggagttcaaggatgcagtgagctatgatcacgtcactgcaccccagcctggggaaaaagagcgaaactccgtct

SEQ ID NO: 343511 - DNA, 226 bp, Homo sapiens
gtgcagctttaaatattttcattttctaaccatttgttgctagcaatatagaaacgcaattgatttacatacattgatcttgtatccaataaccttatgaaactcacttatggatcctaaccaattatctgtacatttcttctgtattttttcatgtacaaaatctgtaagtgtcagttttctttctttccaatctttgtatctttcatattctgttcttgccttc

SEQ ID NO: 343512 - DNA, 654 bp, Homo sapiens
ttacgaataaattaggtattaagtcaatcgcatttttgaggagccagaaaatggatcggcttgcccatggttctgcaccacctacttaaaactcctaataggtattaaaactttaagcacaattgtggcatctttattgagttaattttcttgaaattaaattttgtcatgaattgactcatttgtaccagggactcattcttgaactgatagtaccctggttataaacctcttcatatcttaagaatcgggggtatttctattttacagggccaagtaaccatgaaattgtattgcatcttttggcaatgaaaatacatagtaatcataggaaagcaatcgggtgattactctcccctaaactggggggtttattagctgagccattacaggttttagttactctttaaccccttacaaggtagcttaaagtcctcttgggacacgtgtcaataaaaggttgtttataagcacctacaccttcccaggccctgaactagatagtatataaaaatgaatgaggggcattgtcatgagggtgacaaaaggcttggaagaggagccaatgatgcagagatagcccagatggaagagaatggccctgctcccccaggggtcgcgtgctccctcatggatgcgtgcatttcaggaaaa

SEQ ID NO: 343513 - DNA, 503 bp, Homo sapiens
ccttccagatcttgctactctccatcacaaggcaaagtctatcttcctttcttttgaatctgggaagacacttgtgactgcctcaatgaataggaagaatacagtggaagtgatgctgcgtggctgctaagaacaggctggaaaaggccatgcagcctctgttcgtctccctcttggaacacttgtctttggaaccctgagttgccaagtaggacatccagggctgccgtgctgtggggaagcccaaaactagcccacacagagagaccacatgaaaaaacactgacattgcatgaagagagggtgatgtgctccagctgcctaaggcttcatctcctgcctgttccagctccagaaaacctgaaggcaacagcatgagacaccctgagctaaaaccatctagctgagctgtttctgaacttctgaccaatttcttatttctgaccaataaaaaataattttattatctgtgattgataataaatttattattgtttcaagcc

SEQ ID NO: 343514 - DNA, 218 bp, Homo sapiens
gggtgactcttgctttgaaacacacatttctatttaactgtttggatttctggagtatgtgtgtaataaatgactttaataatctctattcatatttattcatcaaaatgtgaaagattattataagaattagtgttaggttgaaaaaggtgctttgacgttaattgtgatatagtaattctacatttaaattcaaatgcatgttgaaatttgcaatt

SEQ ID NO: 343515 - DNA, 282 bp, Homo sapiens
tcccactcggctcctcctcccacttcctctccccgcctccgaaagcttacctctcttggaggcctttttcagtgtccccctgcccagtctgggcaccacggatgacatactaatagcagaacgtggtttaaatagctaaggccttggactatccgatccaggcctgccactgaggtgggaattcaataagatgatacagacaaaggaaggcttggcacatagcaagtgctcagttaaaccgttgctaatgtttacagttatcactccgagcctgattactgc

SEQ ID NO: 343516 - DNA, 664 bp, Homo sapiens
tgaggtttatttaacctattcaaggctaactcagcattggagaataaactaatattttactgagcaaagcagagaatcttcttctatgaggttttagaagactttcaatttagcaattagtagactttcaaatgcgggatagtttctggaagggactggtagaatctcccatgtaaaaagaaatgttttcagtttgcaaagcagaccatgaatatttttctaagaaaatgggtactataaaatttcacttatgattttgtcagtaaaattttaatgcagtggagatagcttaagtcctaaaattaggctagatgtgataacatgaggaattgaaaggattaagtatgtactatcatttagagttaataattagaagaaacagaaacttaaaataagtatggccgggcgcagtggttcatgcctgtaatcccagcactttgggaggccaaggtcaggagtttgagaccagcctggccaacatgacgaaaccttgtctgaactaaaaatacaaaaattagctaggcctggtggtgggagcctgtagtcccatctactcaggaggctgaggcagaagcatcgcttgaaccaggaggcaaatgttgcagtgagctcagattgcgccactgcactctagcctgggcgacagagtgagacttcatctcaa

SEQ ID NO: 343517 - DNA, 548 bp, Homo sapiens
agctgaatagccataattaaatagtgttctttgttgctttttatttttaaaaggcatgtaaaacttgaaatgtagttcactgtattttatatttgtaattttaataattttggtttagaatagggaattccaaactgatacttgagttctcaatcatggggtggagtttctgttaatggttatcttgttgaattagtttatctagtgtaaaaaaattgtcatcctcagtttattttcagtatatctcattgatatgagacataattgatttccagttttccttaaagatggttagagattaaaatttcttctgttaaaaaaattgttaatgctattggtcccagatttcccttctttgcatcctgccaaaggaaaaagtgctctgtacttattttgtgccctgtaatgttatagatgcttaataagatcccagattttaagtagcagctgtcattgatttgtttactgaatgaatttttcatgtttcattgtatttgtgcacagaactactctgatgactgtttacttaaataataatcatagtgcac

SEQ ID NO: 343518 - DNA, 500 bp, Homo sapiens
tgtcactacaaaaagagaagaaaagaaagaagaagacgaccttcttctgcagggtacaggcttgctttttgggagattatgtgtagaaatatttccaaactgccaccaacatagttctttggccatctccttatatctctgaatgaatgtgtgattagaaaaagcatttttatgttatcctatgctaagtataattttaaaagcaagcatatggctgcaaaaaaaaaaatcacttaatagatgatgctacttatccagaggttgggagacaggagacataaatttctctaaagcttcttctagttctaacattttctttttctgtgtaaaacaatctcccccactaccttattctactggtgtgcatgttgatattataaagacacggcaaattattgaaatttgagtctcaaaaatgcatctaaggatatgagatgtgcctggatatttagcaatgctggctacttacttgttataaatcatctagagatattacaact

SEQ ID NO: 343519 - DNA, 609 bp, Homo sapiens
aatccaagctactcaggaggctgaggcaggagaatcgcttaaacctgggaggcggaggctgcagtgagctgagattatgccactgcgctccagcctgggcaacagagcaagactccatctcaaaaggaatctaagaggagtcaaaatctaagtctaagataatcattcccaaatactctcttccaaagggtaggaagactgacagtgtcctactgaagggccagaaaaagaaattatctttgctcagtgttgaactattctgttataaagcattgtaaacattatagcaacacttatgaccattataaccctacatgtgttcccattgcatgtttaataatttctctactttaaaaaaattgagaactagatcgagaagacaactgattgtagaacagtcagagagcttcgtgctggtgaacattaatagagctataatagtctgccaaaattatgatgaaatcactggaggcatcaaggcaaaaaaacaaatcaaggggaagctattaacagtttagcatttctagtttgtgtgagaatatggattccagctagcagaagaatacttcaactcagattggctgttaggcattgctagaaatcttgttt

SEQ ID NO: 343520 - DNA, 134 bp, Homo sapiens
tgaagggtccaggaaaactgctctgaatgctacagctacgcttccaactatggtggactctgacctgtgactgtttgcttggttttgcaatctgcccccgggaacaacatagatatggaggtgtaggaactggc

SEQ ID NO: 343521 - DNA, 434 bp, Homo sapiens
agtcgtgtatggcagagcattagctgggagaggtcacactagctgggtgtggaccttgtcctcctgtgcgtcccctcaaaaccaggtaatgtgtcctcaggatttccctggcacaaacgacctcgctctccctcagtcctcaaaggtgatggccagtcctggttacccgggaagcccgtgccctgtgactcccttcctgccactgggcatccctgtagcccccattcctccagcaatcagcctcagtggtgtgtttggttcacaccttgtgcttgcactgtgactgaaacctcccctcctcagcgaggcttctcctgggcccccaggctgggcttatgcccctcaggtccttctcagccctgtgcttttccttagggctttggtgtgattctcgggcacctgtgcttagggagtgcttgtttctgtaactgggt

SEQ ID NO: 343522 - DNA, 271 bp, Homo sapiens
agtgagcattcgtgttccgccacaccctcacgaacacttgcccttgtctgtctctttgatttgagctatcctaatggatgcgaaatggtatcctctggttctgatgtgcacttccctggtggctaatgatgttgagtatcttgtcatggccatttgtatacctctttcttttttgtacagctgcatactattcccctgtttagagaaactgtagttgatttaacctgtttactactgcaatagtcctgcccaagaaattaaaaaaaaaaaa

SEQ ID NO: 343523 - DNA, 382 bp, Homo sapiens
gttcactgacttgggttgatcagttgagtggacaaataacctttaaaaaccaaagtgtaggcctgacgtcacatgaatgtagacagcaaattcatctaccttcaatgaaacagatgactgggacacaggcattctgtgttaccagattaggcaaatgcaggttccttttggcacccctatctctagtgattctagatttgatgacagtataatgacagtataatgatgaaaattcagaaatttaacattgatacaatgctactgtttaattcagtacccatagtcaaattttgtcaattgtctcaatgtttttccctttctcaacacaatttcagtccagaatcactgtgtttaagtctctttagcctcctttaatctggaa

SEQ ID NO: 343524 - DNA, 657 bp, Homo sapiens
ctcgtgatccaccctccttagcctcccaaagtgctgggattacaggcatgagccacaggtcttcctctgtcactgaggctggagcgcagtggcataatcagctcactgcaagctctgcttcaacctccgcctcactgcaacctctgctgggctcaagtgatactcctgcctcagcctcccaagtagctgggactacagatacggaccaccatgcccaactaatttttgtatattttgtagagatgggtttttgccatgttgcccaggctttcaaactcttgagctcaagtgatccacccactttggcctcccaaagtgatgggattataggcatgagccactgcgcctggtctgtgtacaagttttatagttttagatattacgtttaggtctatgatccatcttaaattttgtatatgatgagacgtgtggattaagttcacttttccacaaaaggagagccagttgcgcctgcacagtggattattattcagtcattagaaagaatgaaatgtgatatgtgatactacatggatgagctttgaaaatactatgccaactgaaagaaggcagacacaaaaggtcacatgttgtatgattccatttatatgaaatatccaggatagttaaatccagagacagagtccagattggttg

SEQ ID NO: 343525 - DNA, 437 bp, Homo sapiens
ctcctctttaaggccaataactccagaggctactttctagatgctgtaggcatgctttattattttcttttttttctctgactgtatattttctgtttgcctatcttcaagctcactaagtctttcttctgtttcatccattatattaatacatctctgatgtattcttctgtatgccaattttatcttttagctctggaatttctgcttaattattttaataccccattattctcatggaattctgaatttattctccgtgttatatcaaatttctttgcgtttcaacactggtcttcaaattctctgaggtatcacctccaagataccacccagttgaacaattacaatcctaaagtatcaatggttcttaatacttaaaaaggttttctaaacataaatcattatccaacttagataaagtctgcgatcttcgg

SEQ ID NO: 343526 - DNA, 733 bp, Homo sapiens
gagctgtagagaagagcaaccacagggctgtttgagaatgctggggctgtcttcacatttctcacagttgtggtgaaaggtgtgtcctctggaccctcctaagatggtttcccaatgtgtaggagtcgctcaaccactttctggctctcagagagaattgatccatgtggaaatgtttattctctgcatctgtgggagagagaaaagtaaggaacctcctattccaccatgttgctgacatcagtctctacaaattctgcttccaaaggcaaggaggacccagcagagtttagagatttactctccaactttctccagttactgtatgtttcaaagagtgaacctccaaagagtgaatcaatgggcttgcttgctctctggcttccaggtgaattcagccagtggaaccatggcaggagatcagagggaggaaatacaatgagatcaaggaatgtatttccatggtttcttccctgcagcatcacagcagtgggcatgtacctttcccagacctcttacctcttattacactactctctccatagagctctcttttacctaggtctccaataaccattccttctcctttcctcttcaaggttaggggtagtaacattatcccactttttctgcctcgagattattaaagttttccttatgtttttgctggacacccctcctttgtaaagagtatgtcactttattaaactcaaatgaaacccgattgtgctat

SEQ ID NO: 343527 - DNA, 456 bp, Homo sapiens
agcatttatattttttttattgtggcaaaatcacataaggaattcattagtaaaagccaaatcacagtttttaaatggtagtcaaccataatatctaatggaaagaagccaggcatagcagctccatataatgccttgtaaaaaacattgttagcattgttaaatgcagtcaattccttataatgatctagacggttttgtcatcccattacaaagcactgtgaatttaagctgttggactagtaggagactcagaagtcaaattcctgttacatcgacaattttggatatagtagaacgtcatggaactttctacccattaaatcaaggatgagcgagcttttacttgttgaattttgatatctgtacacttaactgtcgtgatagaaatggtattagaaagctggctgcggtggctcacgcctgtaatcccagcactttgtgaggccgaggcag

SEQ ID NO: 343528 - DNA, 403 bp, Homo sapiens
atgtctgatcccaaattcttgcctcctgaaccaatagtttattcattcattcggaaaataatttttcagcacctatgtccaaagcactcttctaagctaacagacaaaatccacgttctcaggaacttactttctactgagaaagatagaaaaacaaacatgcaagtttagaataagtcagaaagtggtaagtaacttcaataaaaatcaaggagataaggaggataaggaatgtatatgtgtaggtgggtagtcttttacttatgcttctcagagaaggcctcattgataagatgtcatttgagagacaagccatatgccattgttccaggaagagggaaaaccaagtttataccattgttggcattttggagcaacagcagagaggacaataaagctggag

SEQ ID NO: 343529 - DNA, 864 bp, Homo sapiens
gtcccactcattactaccagttgcaaccctcaggaattgagtactagaaacaccctcacagttttcatggggttggtgagcaagtaccttctgttgagaattggtctagtcctttgaagaatgctaggtagctctttctaaaataggttaatttcatgtcatagtgtttaggtaaaagcttcacattggacatgaataaaaaggattagagttcagtgtattcaggaaactaatataagatctttgaatcttcttattttgttccaagattgatgaaattcaggagaggacttgctacagtgtttttggagggtaattttgcactactgtttgaatcaaaattttaaattacgcatttgtcattaactccacttctaggaatctagcctgtaggaatcttggagggcataaaaaattatttgccaggatgttcatttgcagtattattggtaatcacaaaaatagtaaaaactaaaaaaaagaacgaaataaccaacaacaatataaccccacctacctgaatgagtattataaatagagaaaaggttaaatgggcatatagtacatgctatacgtttattatttaaaaggaaccaggactctatatcctgaataaatttttaacaatgtattattaaaggaaaaaaagaacagtatgggccatgcacagtggctcacaccagtgatcccagcactttgggaggccaaggtgggcagatcacaaggtcaagagatcgagactatcctggccaacgtggtgaaaccccgcctttactcaaaatacaaaaattagttgggcatggtggtgcacacctgtagtcccagctactcgggaggctgaggcaggagaatcacttgaacctg

SEQ ID NO: 343530 - DNA, 284 bp, Homo sapiens
aaaatgaacctagtaatatgagacattataactgtcaacaaaacctagaaagtatagatttttatgtcaaatcacccacttcttttcttttcaaggagacagtctcactctgtcacccaggctggagtgcagtggcatgatgtcagctcactgcagcctttgccttctgggttcaagcgattgtcctgcctcagcctcccaagtagctgggactacaggaatatgccaccacgtccagctatttttttttcctttttctttttttttgagatggagtctcgctc

SEQ ID NO: 343531 - DNA, 163 bp, Homo sapiens
ggatgcatagaaatgtaatatttagacaggtgaaggtaatgagtcagcctggtaaaaataaagggagaactgcaatttggggtgactgaaaattaccccaaggtaacgagcaagttgtagagggtgcaggagtttgtgcgtgtgtgtatttgtgtgtgtgtgt

SEQ ID NO: 343532 - DNA, 420 bp, Homo sapiens
atggcccacctgggagtggcacaaagccaaaggaatccccacccccagccaagggaagcagtgagttattgtgcgactactcttaggaaaccacacttctcccacgaatctttgcagcctgcatgcattagtccgttggcggctcacacctgtaatcccagcactttgggaggccaaggcgggcagatcacgaggtcaagagatcgagaccatcctagctaacatggtgaaaccccgtctctactaaaaatacaaaaattagctgggtgtggtgccacacgcctgtagtcccagctacttgggaggctgaggcaggagaatcgcttgaacccgggaaggggaggttgcagtaagccaagatgaggccactactccagcctggcaacagagtgagactctgtctcaaaaagaaaaaaaaaa

SEQ ID NO: 343533 - DNA, 354 bp, Homo sapiens
atgtattgttaccttaaaaattccgtgaaatataaaatgtgaaaatcacagaaacacagtcagacttaaaaagaagatgattagttacagaaagctactaaaagcagcccatggtgctgaagccataggcctgctgaaatctggatctagaatcacatcgagatacctagaattccagctctttagagtaatgaggtcaaagaggctccatttgaaatggtggacctgaacctggcttactactttatcacgaggctacaaaaatttggccaactactgcctggggaaacagcttatatagggctgcaggacctgagagctggaagaataaagatacagcattatgataaaata

SEQ ID NO: 343534 - DNA, 263 bp, Homo sapiens
cgtgaactttattttgttgggtattggatatttttgtattcctgtaaatttttttgagctttgttgtgggacacagttaaattttttttacctttttttaattttatatatatatataattatactttaagttctagggtacatgtgcaaaatgtgcaggtttgttacatatgtatacatgtgccatgttggtgtgctgcactcattaacttgtcatttactttaggtatatctcctaatgctatccctcccccgctctccca

SEQ ID NO: 343535 - DNA, 1587 bp, Homo sapiens
gcagaatacggaaagcgggagggacaaattgccaatgtttggagtctggtttccaggttgccgtttttgggggctctgggtgtggcggttgccgtagctgaaattggctgcaccatgtcggccttcgagaagcctcagatcatcgcccatatccagaagggcttcaactacacggtgtttgactgtaagtgggtgccctgcagcgccaaatttgtgaccatgggcaacttcgcacggggcaccggcgtcattcagctgtacgagatccagcacggggacctgaagctgcttcgggagattgaaaaggccaaacctattaaatgtggaacatttggtgcaacatctttacagcagagatatttagctactggagattttggtggaaaccttcatatatggaatttagaagctccagagatgccagtatattctgtaaagggccataaagaaattataaatgccatagatggcataggtggactaggaattggagaaggagcacctgaaattgtgactggcagccgagatggaactgtgaaggtgtgggacccaaggcaaaaagatgatcctgttgctaatatggaacctgtacaaggagaaaacaagagagactgttggactgtggcatttggcaatgcttataatcaagaagaacgtgttgtttgtgctggctatgacaatggggatatcaaactatttgatctcagaaatatggcattacggtgggagacaaacatcaaaaatggggtgtgtagcttggagtttgacagaaaagacataagtatgaataagttagtagccacatctctggaaggaaagttccatgtttttgacatgagaacacagcatccaaccaaaggttttgcctctgtttcagaaaaggctcataaatctactgtgtggcaggtccgacacctgccgcagaacagggagctctttctgacagctggaggcgccggcggccttcacctctggaagtagtaagtctgccagtgcacactgctccttttaaagttacctgtgggtgtaaagtaggattagattgaacttttttttcttttttttcctgctttgacttagttcattttgatatgatttaaaatttcatggtgttacataacttgttttctaagcattttgtatgaatatactttacacttagtagagtgtacactaatcttcttttgatacattttagtatatcattttagttgtgtcttctaagtatgaaaaagttggcccaagacttttatcagatactatcttgaagtgattagaacactcactgcctctaaaagatggggaaagggttccttgcctaaatttagataacatcattgtgatagaccccaacagagcctgaggctgctgattggtctccaggaaagatcttatcactgaatttgctttctgcatatctaggcagggtgagttacaatgaaagcttttactatgcacaccactttctgaatcccaagggcgctaacatcacagatactagatcatttaaaaggtctgatatcattgctcagggttggcctgtgaaaaggaaacaaaacaaaacaaaacaaaaattaaaggtctgat

SEQ ID NO: 343536 - DNA, 2635 bp, Homo sapiens
gcagaatacggaaagcgggagggacaaattgccaatgtttggagtctggtttccaggttgccgtttttgggggctctgggtgtggcggttgccgtagctgaaattggctgcaccatgtcggccttcgagaagcctcagatcatcgcccatatccagaagggcttcaactacacggtgtttgactgtaagtgggtgccctgcagcgccaaatttgtgaccatgggcaacttcgcacggggcaccggcgtcattcagctgtacgagatccagcacggggacctgaagctgcttcgggagattgaaaaggccaaacctattaaatgtggaacatttggtgcaacatctttacagcagagatatttagctactggagattttggtggaaaccttcatatatggaatttagaagctccagagatgccagtatattctgtaaagggccataaagaaattataaatgccatagatggcataggtggactaggaattggagaaggagcacctgaaattgtgactggcagccgagatggaactgtgaaggtgtgggacccaaggcaaaaagatgatcctgttgctaatatggaacctgtacaaggagaaaacaagagagactgttggactgtggcatttggcaatgcttataatcaagaagaacgtgttgtttgtgctggctatgacaatggggatatcaaactatttgatctcagaaatatggcattacggtgggagacaaacatcaaaaatggggtgtgtagcttggagtttgacagaaaagacataagtatgaataagttagtagccacatctctggaaggaaagttccatgtttttgacatgagaacacagcatccaaccaaaggttttgcctctgtttcagaaaaggctcataaatctactgtgtggcaggtccgacacctgccgcagaacagggagctctttctgacagctggaggcgccggcggccttcacctctggaagtatgaataccctattcagcggtcaaagaaagattctgagggaatagaaatgggagtcgcaggttctgtaagccttctgcagaatgttacgttgtccacccagcccatttcaagtttggattggagtccagataaaaggggtctctgcgtctgtagttcatttgaccaaacggtgagagtactgatcgttacaaagctcaataaaatttgacttcaagactttggacttgaggctgggcacggtggctcactcctgtaatcccagcactttgggaggccgaggcgggtggatcagaaggtcaggagatcgagaccatcctggctaacatggtgaaaccccgtctctactaaaaatataaaaaaaaatttgctgggtgtcatggcgggcatctgtagtcctagctacttgggaggctgaggcaggagaatggcgtgaacccgggaggcggaggttgcagtgagccgagattgtgccactgcactccagcctgggcaactgagcaagactgtctcaaaaaaaaaaaaaaaaaaaaagactttggacttgaaaccttccagaggaacactcacacaatttaagataggttctggagtcctctgaccctcattgaacaaagctggatttggctgatgataaaagaccccagccacaagcctctgggccagcctccagcctctctcggggcttgtttgctgacttgctgctgcacgtgggtatcagaagcaccaagtaaactatctccagggccagttcttttctctcccttccatttctaagtcaatagttgtctataattaaacatatttcagatttgttctgtgtccctgaagttccatattttatctttatgcttgtgttatgttttagtgtctataatgttgtggtgggaatcatttcatttggtttaaaagagtttgccttggaaaaactgaattaaccttcataaatacattttgagagatttcagtgtgagtaattttctggacataatattattgtataaaatatcaaaatggtgggccaggcgtggtagctcacgcctgtaattccagcactttgggaggctgaggcgggtgaatcacgaggtcaggaattcgagaccagcctggccaacatggtcaaaacccgtctctactaaaaatacaaaaaattagctgggcttagtggcgggcgcctgtaatcacagctacttgggaggctgaggcaggagaatcacttgaacccaggaggtggagattgcagtgagctgagattgcgccactgcactccagccctggcgacagagtgagactccgtctcaaaaaaaaaaaaaacaaatatatatatatatatctctctctctcaaaacggcacggttggtctagatttgggtagctattttctgcaatttaattcataaaacaaaatgctttgattttaaagagctcttttttacttaaaatacaggaactgaattggtgagacttttggtttttgactgtggtaagtgatggtgaaatgtacaagattgtaggggttttgtagtcttatttttggtcatactttaaaaatgcattttatgaataaacttctgtttttgagatctacagaagctttgattctgttaccttaacagtagtaataaagttaacattgtcacatcattttgctttataaa

SEQ ID NO: 343537 - DNA, 1810 bp, Homo sapiens
gcagaatacggaaagcgggagggacaaattgccaatgtttggagtctggtttccaggttgccgtttttgggggctctgggtgtggcggttgccgtagctgaaattggctgcaccatgtcggccttcgagaagcctcagatcatcgcccatatccagaagggcttcaactacacggtgtttgactgtaagtgggtgccctgcagcgccaaatttgtgaccatgggcaacttcgcacggggcaccggcgtcattcagctgtacgagatccagcacggggacctgaagctgcttcgggagattgaaaaggccaaacctattaaatgtggaacatttggtgcaacatctttacagcagagatatttagctactggagattttggtggaaaccttcatatatggaatttagaagctccagagatgccagtatattctgtaaagggccataaagaaattataaatgccatagatggcataggtggactaggaattggagaaggagcacctgaaattgtgactggcagccgagatggaactgtgaaggtgtgggacccaaggcaaaaagatgatcctgttgctaatatggaacctgtacaaggagaaaacaagagagactgttggactgtggcatttggcaatgcttataatcaagaagaacgtgttgtttgtgctggctatgacaatggggatatcaaactatttgatctcagaaatatggcattacggtgggagacaaacatcaaaaatggggtgtgtagcttggagtttgacagaaaagacataagtatgaataagttagtagccacatctctggaaggaaagttccatgtttttgacatgagaacacagcatccaaccaaaggttttgcctctgtttcagaaaaggctcataaatctactgtgtggcaggtccgacacctgccgcagaacagggagctctttctgacagctggaggcgccggcggccttcacctctggaagtatgaataccctattcagcggtcaaagaaagattctgagggaatagaaatgggagtcgcaggttctgtaagccttctgcagaatgttacgttgtccacccagcccatttcaagtttggattggagtccagataaaaggggtctctgcgtctgtagttcatttgaccaaacggtgagagtactgatcgttacaaagctcaataaaatttgacttcaagactttggacttgaggctgggcacggtggctcactcctgtaatcccagcactttgggaggccgaggcgggtggatcagaaggtcaggagatcgagaccatcctggctaacatggtgaaaccccgtctctactaaaaatataaaaaaaaatttgctgggtgtcatggcgggcatctgtagtcctagctacttgggaggctgaggcactgagattgcgccactgcactccagccctggcgacagagtgagactccgtctcaaaaaaaaaaaaaacaaatatatatatatatatctctctctctcaaaacggcacggttggtctagatttgggtagctattttctgcaatttaattcataaaacaaaatgctttgattttaaagagctcttttttacttaaaatacaggaactgaattggtgagacttttggtttttgactgtggtaagtgatggtgaaatgtacaagattgtaggggttttgtagtcttatttttggtcatactttaaaaatgcattttatgaataaacttctgtttttgagatctacagaagctttgattctgttaccttaacagtagtaataaagttaacattgtcacatcattttgctttataaa

SEQ ID NO: 343538 - DNA, 1233 bp, Homo sapiens
gcagaatacggaaagcgggagggacaaattgccaatgtttggagtctggtttccaggttgccgtttttgggggctctgggtgtggcggttgccgtagctgaaattggctgcaccatgtcggccttcgagaagcctcagatcatcgcccatatccagaagggcttcaactacacggtgtttgactgtaagtgggtgccctgcagcgccaaatttgtgaccatgggcaacttcgcacggggcaccggcgtcattcagctgtacgagatccagcacggggacctgaagctgcttcgggagattgaaaaggccaaacctattaaatgtggaacatttggtgcaacatctttacagcagagatatttagctactggagattttggtggaaaccttcatatatggaatttagaagctccagagatgccagtatattctgtaaagggccataaagaaattataaatgccatagatggcataggtggactaggaattggagaaggagcacctgaaattgtgactggcagccgagatggaactgtgaaggtgtgggacccaaggcaaaaagatgatcctgttgctaatatggaacctgtacaaggagaaaacaagagagactgttggactgtggcatttggcaatgcttataatcaagaagaacgtgttgtttgtgctggctatgacaatggggatatcaaactatttgatctcagaaatatggcattacggtgggagacaaacatcaaaaatggggtgtgtagcttggagtttgacagaaaagacataagtatgaataagttagtagccacatctctggaaggaaagttccatgtttttgacatgagaacacagcatccaaccaaaggttttgcctctgtttcagaaaaggctcataaatctactgtgtggcaggtccgacacctgccgcagaacagggagctctttctgacagctggaggcgccggcggccttcacctctggaagtagtctaacatctccaccctgtgacgccttcccatagaaatggtacacaaaaggtccttaggcttgggtccgtgtaatggagctcgagggttagaagctggcatcagtttttcattctggaagtgtttagatgaagttctgcaaatgttacttacagccattgcctttgcacattgtttgcctgtgatatccagcaatctatatctggagaaaaattacaataaataaaagattgccaaaagcaccaaaaaaaaa

SEQ ID NO: 343539 - DNA, 319 bp, Homo sapiens
ataacttaggaacacttgttggcttttctgtgtgtctattaatttggaaaccaagtcagatagttacatatgggtgatatctctgatattaaatacaacttacccaattagaagtcagaacaatgtggatattttcagatgtcataacatctgtcatattgccatgtacacaggaagccatagaagaagaatgtagaaaagaaacataatcatttacttttgaatttttgccaactcacttttatgcatggcaggaactgtgaaggtgtgggacccaaggcaaaaagatgatcctgttgctaatatggaacctgtacaa

SEQ ID NO: 343540 - DNA, 1906 bp, Homo sapiens
gcagaatacggaaagcgggagggacaaattgccaatgtttggagtctggtttccaggttgccgtttttgggggctctgggtgtggcggttgccgtagctgaaattggctgcaccatgtcggccttcgagaagcctcagatcatcgcccatatccagaagggcttcaactacacggtgtttgactgtaagtgggtgccctgcagcgccaaatttgtgaccatgggcaacttcgcacggggcaccggcgtcattcagctgtacgagatccagcacggggacctgaagctgcttcgggagattgaaaaggccaaacctattaaatgtggaacatttggtgcaacatctttacagcagagatatttagctactggagattttggtggaaaccttcatatatggaatttagaagctccagagatgccagtatattctgtaaagggccataaagaaattataaatgccatagatggcataggtggactaggaattggagaaggagcacctgaaattgtgactggcagccgagatggaactgtgaaggtgtgggacccaaggcaaaaagatgatcctgttgctaatatggaacctgtacaaggagaaaacaagagagactgttggactgtggcatttggcaatgcttataatcaagaagaacgtgttgtttgtgctggctatgacaatggggatatcaaactatttgatctcagaaatatggcattacggtgggagacaaacatcaaaaatggggtgtgtagcttggagtttgacagaaaagacataagtatgaataagttagtagccacatctctggaaggaaagttccatgtttttgacatgagaacacagcatccaaccaaaggttttgcctctgtttcagaaaaggctcataaatctactgtgtggcaggtccgacacctgccgcagaacagggagctctttctgacagctggaggcgccggcggccttcacctctggaagtagtaagtctgccagtgcacactgctccttttaaagttacctgtgggtgtaaagtaggattagattgaacttttttttcttttttttcctgctttgacttagttcattttgatatgatttaaaatttcatggtgttacataacttgttttctaagcattttgtatgaatatactttacacttagtagagtgtacactaatcttcttttgatacattttagtatatcattttagttgtgtcttctaagtatgaaaaagttggcccaagacttttatcagatactatcttgaagtgattagaacactcactgcctctaaaagatggggaaagggttccttgcctaaatttagataacatcattgtgatagaccccaacagagcctgaggctgctgattggtctccaggaaagatcttatcactgaatttgctttctgcatatctaggcagggtgagttacaatgaaagcttttactatgcacaccactttctgaatcccaagggcgctaacatcacagatactagatcatttaaaaggtctgatatcattgctcagggttggcctgtgaaaaggaaacaaaacaaaacaaaacaaaaattaaaggtctgataaaaattgtgagttaatggtatttctgaatactttattagctaagcaatatgtacttggaggggaaaaattatatctttcttaaacatcactcagggaaaaaacagcaagcccataaatgaaggatatttcaaaaataaagtttcattaataatgtaagaagaaaaacaccatcctcaatatatctgggactttcacatttataaaattcttctctattagctcctttgagaagctggaaggggttctgaaaaacagggctacagttggaaagtacttgttaaagtactgtgtgcagggataccgctgacaaaaagcag

SEQ ID NO: 343541 - DNA, 1321 bp, Homo sapiens
gcagaatacggaaagcgggagggacaaattgccaatgtttggagtctggtttccaggttgccgtttttgggggctctgggtgtggcggttgccgtagctgaaattggctgcaccatgtcggccttcgagaagcctcagatcatcgcccatatccagaagggcttcaactacacggtgtttgactgtaagtgggtgccctgcagcgccaaatttgtgaccatgggcaacttcgcacggggcaccggcgtcattcagctgtacgagatccagcacggggacctgaagctgcttcgggagattgaaaaggccaaacctattaaatgtggaacatttggtgcaacatctttacagcagagatatttagctactggagattttggtggaaaccttcatatatggaatttagaagctccagagatgccagtatattctgtaaagggccataaagaaattataaatgccatagatggcataggtggactaggaattggagaaggagcacctgaaattgtgactggcagccgagatggaactgtgaaggtgtgggacccaaggcaaaaagatgatcctgttgctaatatggaacctgtacaaggagaaaacaagagagactgttggactgtggcatttggcaatgcttataatcaagaagaacgtgttgtttgtgctggctatgacaatggggatatcaaactatttgatctcagaaatatggcattacggtgggagacaaacatcaaaaatggggtgtgtagcttggagtttgacagaaaagacataagtatgaataagttagtagccacatctctggaaggaaagttccatgtttttgacatgagaacacagcatccaaccaaaggttttgcctctgtttcagaaaaggtaaatatgagggaaatgtctttctatgaagaagaatgatagcttggtttagactgataagtagaattagtcaccaaggtttcttccaggtctttatgtgaagggagctatttttgatatattcctgtgagatcttgacaagtttttctgtgcaaagagtacttccccaaagtttatcaactttagacttcttgattataataaagatctcaggtaggaatcttattttgtagtttaggagcaattagaagaaacctagctgatattaggaatttgatcaacaaaacccagcctggtgtttcctaataagtatataatatttgtgctaatacctggttatatatttttcaaaataaactatatgtacatgatgtcatttcattacactttgttttatattccagtttgctatattaaatgaaattatttgaatcactga

SEQ ID NO: 343542 - DNA, 3548 bp, Homo sapiens
  misc_feature (1540)..(1540): n is a, c, g, or t
  misc_feature (2160)..(2160): n is a, c, g, or t
gaaataagtataagtcaatttggggtttccctccagggttgtgctccaagatccagggggacttaggcagcaccaaggcccttgtgaggacatctgttgtggtttatcatcaatctactttggcagctactgggacatcctctttcttattgagtctttggtggttggtctgtgtcagcaatccttctttgttcctcatgtgtccccctctccttggttccttccatgcaatttgctggcaccagaggcgattctgctgctcacacaccacactgggccatgagggaccctggatatttgcctcaggcctgtcttggccacactcaacacttgcttctcccctggtgcctccctagggctctgcctggggaagggatccggcttctctccactcttagattctgtgaatctgtttggtggttgcctcatcatctccctccccgggcttgttcgggatgagttgggcagggtgcagatttttttcttatagatccctgtacctacatatactttgctttactgatttactctccactttggtctaggaaatctttacccatatgctcgtgtggtggggcggggaacaagggtggtatcctggctttgtcatcagacattctgtcaaagctgttttccataaatctcacgttctttctctcctccctaaggacttttgaaaaaatgccaagaattgactctttttctgcattatccctgaggcaatgaacacagaatgccctccctgactgaggagggaccaagggggtcaagaaaatttggagaaaagcattcaatatttcaaagtattaactacagtgaatttccttccttctccatctcctccatcctggcctagcctgccattacctcttgctgggaccagtgcaacccaaagtttctcagggtctcctgactcagagcttctcacccacagttggcattttgggctggatcatttgtggttgaaggtgctgttctgtataacataggatgtttagcagcattcctgacctgtacccactagatgccagtagcatccctgctcccagttgtgacaatcaaaaatgtctccagacatagccaaatgtcccctggggacaaaatcactcctagttgagaaccacagttctaagcggtctccctgcttcttttcttgtcccatagtctactctccccacagcagccagcagtaatctgtacaccatttaaatctggccatgtcacttccctgtttaaaacccttcagtagcatctcattgcatgagactagaatccaagcccctcaactgcacttagaaagccacgctgtgctcacctctttccctcccctggtcactctccccttgtcattctatccagtcatgctggcctgtactggtttctggacttctccaagcttgtacttgctttgggcctttgcacttagattttccatctttctggaatgctcttgccctggattgccacttgattggctccttcttggtattctgctttgaggttgcatgccacctgcagactaacccatcttaagtagccnaacagcaactctctattggatcagctgacctgaattcttagcagagcactaaaagctatatgatatttttcacgctttctttgtttcttctcttcaccaggactgaaactcaataagagctttgatttctcttgttcattagtgttttttggcacctagaacacagtgtaggatgtttagcagcattcctgacctgtactcactagatgccagtagcatccccgctcccagttgtgacaatcaaaaatgtctccagacatagccaaatgtcccctgggggcaatgggtgttctaggtgccaatggtcacaatttttgttgaacgaatgaatgattataggtgttcttgtgatggactttgcatacaagaacacatagatattacgttttggggtgcatactgaagcagatccagtctttccccaaaccctgattgagacgtaatgcaggaagatgaaaaatccagagatgggataattgtatccatgcagagccacccaatggatgacttagaaggaagtgaagtgaacaggtggccgattgcaggaatactgcagggaatctggcatatattctattaattgagttcctagtatgtgtctgagatggggacacaaaaanagtttcatagttttatgaaacttaagtcttatcaaagataagaatgggaactatatttcaccaatttttgcatccccatctcagacacatagttctatgaaaagacagtgttaatctcttctttcactgctataaagaaacacctgagactgggtactttataaagaaaagaggtttaattggctcacagttccacaggctgtacgggaagcatgatgctgacatctacttgggttctggggagacctcaggatacttacaatcatggcagaaggtgaaggggaagcaggcacatcttacatggcaggagtaggaagaagagggggggggaagtgccacacacttttaaacaaccagatctcctgagaactcactcaccatcatgagaacagcaccaaagtgatggtgctaaaccattcatgaaggatccatccccctgatccaatcacctcccaccagcccccacctccaacactggggattacaatttgacatgagatttgggcggggacacaaccaaactatcagaccgttataaaaataggttaataaattatgacacagtgtagtaagtactgggacagtggtagaaccaggcactgtggaaacttacaatgaagtttcaactttaccagggagagctggagaaactcttatagaagaaggatcttttaagcaggattttgaaggatgaatagaagctctccaggtggtgaaaggcattacctgaagagaagacagcatgtgcaaaggtatgggggtcacaaaagggtcagggtacttgagaaatggtgaggagtttgaggtggctaaaatcctgagtaggtggaacaaaatggtggtgggagatgaggctggaaaggagaagagcttgaagttcctgtctgatcatcagatcctgtaagtctttgaccttgaagatggtatggatgagagtcgtatttatttgttgtggtaaaatacacaaacacaaagtttaccgtcttacccatttttaattgtgcagcttagtggtattaaatgcattcacattaaatgccacccatcttcataacttttttcatcttgtgaaatgcaactctgtacccattaaacaatagctccttggccgggcgcggtggctcgtgcttgtaatcccagcactttgggaggctgaggcgggcagatcacggggtcaggagatcgagaccatcctggctaacacggtgaaacactgtctctactgaaaatacaaaaaaattagccagctgcagtggcgggcgcctgtagtcccagctaatcgggaggctgaggcaggagaatggcgtgaatccggcaggtggagcttgcagtgagccgagatcatgccactgcactccagcctgggtgacagagcgagactccatctc

SEQ ID NO: 343543 - DNA, 615 bp, Homo sapiens
gtatttttccttagcttgttaatgaattactgtaaagggggtagaacaatcaagcttattcctaaggattttgttttgacaaataagtgggtggtagtgttgtttattgagataggaaaaactatgggaggaaattatttgaagtgggtggttggaaataaaagttttgtttaaatttgagatgatttattgacatttatgtggagcaatcagaaggtcaatggcatttaagagactcatggtgaggctagggcttcaagtatttatgttggcggcatcaatacgtgtagtgtgttaaattccagggagtggaagaggatacatagggagatggattgtgtggagaaaaaagaacagggcacaggccagcaaagggggctgagaaagagcccagggatgttggagaaaaatcaagagaacatgatgcgtgtacgtcaaggaaaatagatttttttcaaggagaagggagaggccaattgtggtgagtaccactaagcggagggggaagtgagaacgtgacagagaagcaagtgctgggtttggtggagttgatatttgcagtcagtggagtatccagggaggaaactggattggacaatttgaagagcgagtaga

SEQ ID NO: 343544 - DNA, 825 bp, Homo sapiens
ttttccttcagattctcatttacttctataattggtagcaggccaggtggaagtaggtcaaccttcttagtaggattttagggtcaagagaggatctccccagcaggaaaagcagggagtaaggacagaatgagaagagagatgtgggtggctaaaggctagaggcatttccagttacataccttgcaaaatgttctgaaaaaccattagcctatggcagtttttcttgtcaggccatttgcattgacccatagacattggttcagtgccttcctgccttgactgtttctttatctttctcttaaacacacatgcacaaatatgtacagcagcccagaaacataagcatcctcgaatggctttgggcagggatggggtgatgggaacacacagataagaaatcaggcccaagcactggtgccttgtgacatcagttggacagtcttgagttttcagtatggtctaaaaccttgtcttcagttctccagggtttataggccttttctgccttaatgccttgggcctggagttattgtgtgattttaattctgaactctaaaacacattgactgactgcctggtttgtcctcctttttgcttgaaccagggcaggatggatagctgttgtgcatttctcttaaccgggttatttctaggtgtcacggtcgagagtttaagttatatcccagctgggccgggcatggtggctcatgcctgtaatcccagcactttgggagtctgaggtgggtggatcacttgaggtcagtagtttgagacgagcctggtcaacatggtgaaaccccgtctctactaaaaatacaaaaa

SEQ ID NO: 343545 - DNA, 678 bp, Homo sapiens
cacaaacagagcaaccttacgaagatctgccacccacaaggcctctggctctggctgtttccaaaggtcccacccagcttggccttgtgatggttttgactatagctgagtataaaattaaaaaagaaaacacaccctgatttgattaatgggattaccgagtttgttgttcaacaaaatggaaaaaaaaaaattagcctctgaaacacaaggatagaaggttaagcttccacttacccaagataagtaatctgggctaaagaggtactgctatctgggtaagagactaaattttgcctaaggataaaagtttgtcactcattaagtttttccctatgtaatttacatcttctaaaacaaaaaaggtagcttgttatggcaacattttaatatagggcacgtggttaatcttttggtttacactttgcttttccttctgattgtactggaattccccgaagtcataccgggtatccctcagaagcacattcccagagttctccatgtcagcttgtgtgtcacactcacagctccaaaagggctaatgccagtcttaatgggacagggtcagttcttccaggaaatccttaaagtgtgatttgaggagcagctgaaggaactatgatctaaactaccttccccagtgatctcctaagacatttcatcacctacatttat

SEQ ID NO: 343546 - DNA, 197 bp, Homo sapiens
atgaggaggatgaagaggagattcaaggcagagggactcgaaaagccaggtgacagcaggttgtccactgtggtaagagaatgaaggcatctatgtccatgtgaggagagtgtgggatatagttggaacacagtaaattgagactctatattggagacccatatatggagctttaaatttgttttcttttcttttct

SEQ ID NO: 343547 - DNA, 255 bp, Homo sapiens
cacatgtctgagcaataaaagatttcagtacaaagacatgaaatcatacaaatagtggaagaaaacatgggagtgtttattttctcatcatggaatgggaaaatcaggctttaaatgagacacgaacccagaagccaataaggaaaatactgctgaatctaactgtgaaggtcaaatttatacatttctctaactgtataaaggtcaaatttgcttatacgggggggtgggggagtgcagacaggtgcagcgtag

SEQ ID NO: 343548 - DNA, 452 bp, Homo sapiens
gggccccagcccccctcccttcactaaagacaagccagctccttagatcccatgatgccagagctgtgatcttccagtacactggagaagctccttgtatcttcctatctcctagtaggctgatttcatccaccaacagccacagcaccttgaagcaacccaggagctgctgtttcccgtgatcatgtggtcaaccctggtccttcaaacttctttcagaactcacacacacaccacgtccccttatgagttttgagcagaatgctttttctttgaaagtctgtattcaacaccccctttttatttatacaaacttggagggtatgtgagaaattttatggcatgtatataatgcgcagtgatgaagtcagggcattcagggtgcccatcactcaaatacaatacattttggttttggggtttgtttgttttttttttttttttttttgaga

SEQ ID NO: 343549 - DNA, 721 bp, Homo sapiens
ggctctgacagttgatgcctttggccagagtttgcaagactggaagtctatgtgctaaatgaatttggccccacatacagtttatttgttcaggtcaagtttcaaaagtcagcatagacaggtgggcattatgattgttcctcgtgcaagtgtagtttctgtatcatggaagctaaagatctgttttcattggcacttcatgtatttatgatacctggttggtccctgtgggtatttgtgcttgtgacatttgctggtatatggtcacagtgtaatgatgtatgtgtaagttcagaagcagcatagaggaggtggtgattaatctgggtggggaataggacccataaaaggcttcattgaaaggctgtgactggaaagatgagtagatatttgccaggcatagaatttggacaagggagggtattccaggaaaagccaagtgcatatgcaaagacagctgtgtggattagcattatatgttaggggatttctgagtagatccaaagtgctggggcttaataagcaaggtgaattatagcctaagccagaagtacctgaaggactcagtttgccgtgcatgaggaggctggccttggggcaatggggaaccatgggaaggtttgaaacagatcattgccatactagatttctgttttaggaaggttattctccaaacacccaggagaaatagttgcacgcagaacgcgcctagaatagcttt

SEQ ID NO: 343550 - DNA, 99 bp, Homo sapiens
agaggtgtgcatcaatttttagaagtcttcactacaccaaaaagaaacccccaaccccgcagtcatttctccctatttttcccccagcctattaataga

SEQ ID NO: 343551 - DNA, 388 bp, Homo sapiens
caagcgtgaggcaccgtgtctggccaagagtcaatatgttaagatgagaagttagtaatagataaaaattgaacttcccagaaaatataaagtaacagatcaatagcagggccaagttagagtcaataagttgagcttcgtatgtttcttacgtttccaacaaccatggcagaaaggaagacactggatacagacagactgactcctctgaaggcacaaagacttcctggcagataccttttttggtcataacatagggacccatagtgaataagcttccagtgataaccctgaaatgagtgcagcctattgagtcaaactgcttttttaatttttatttcacacaggttccagttttcttttggatgtagtgttgatcagtaaatta

SEQ ID NO: 343552 - DNA, 405 bp, Homo sapiens
atttattaatttctttaaaaaactgctgtggcatcttattttggttgaaacgtttttattttgattgagggagaggtattgtggacataacactgtaattagaattaaacaaattggtttcatattctgccaagttctctaactagctctatgaccttgaacaagggatttatgctttcttcaattttctgatccggaaaaatgaggataatatcagctacctcaccaggatgttgtgagatataaatgggaaaaaacatctaaagagtacttagcaactataagaaattacaggaatgtaagatattattttgatagaaacaataataaatactttgctgtatagtgtaaggttgaagaatgtatgttatagtataaggcaaactatgtctatagaaagttgat

SEQ ID NO: 343553 - DNA, 714 bp, Homo sapiens
cataaacacattttatattttggcaaataaatctatttcttttaaagcattgcccatctcagctaatgatgataatatcaagccagtcgccaagaaaatttagagtatttataccttgactcttccttctaaatgaattattaagttcagctgtttctaccttgaattacctttctattctgccatttctcttctgtgttgctgctaatgttttaatttagttattcatcacatcatgcctgtactgctggaataatcttgactattctttctgactttttcttctaactgcatctcaaaaacttctatctagaatgaaaataagtatatatatatatactatatatacatatatacatatacactatatgtatgtatatagtataagtatagacatgctatatactatatatactatatatttatatacacacacacccactatgcttttaaaaattgtttacttatgtcccatcattgaagggtaaaatacaaaatcactgatattgagagacattctcctcaatcatttaacattttccttcacaaacctgtgctgtagccacacccagaacaggttatgttccttcaaagacacacacacttttctatcactctccttttactccttctattccatctgcttagaccattttttacttgttttctgtctatctccattcatttttcaggatccaattaaaatattgatac

SEQ ID NO: 343554 - DNA, 1177 bp, Homo sapiens
  misc_feature (635)..(635): n is a, c, g, or t
agcgggggtgtgctgggggactgtgcagctcgaggctccagaggcacactccagagagagccaaggttctgacgcgatgaggaagcacctgagctggtggtggctggccactgtctgcatgctgctcttcagccacctctctgcggtccagacgaggggcatcaagcacagaatcaagtggaaccggaaggccctgcccagcactgcccagatcactgaggcccaggtggctgagaaccgcccgggagccttcatcaagcaaggccgcaagctcgacattgacttcggagccgagggcaacaggtactacgaggccaactactggcagttccccgatggcatccactacaacggctgctctgaggctaatgtgaccaaggaggcatttgtcaccggctgcatcaatgccacccaggcggcgaaccagggggagttccagaagccagacaacaagctccaccagcaggtgctctggcggctggtccaggagctctgctccctcaagcattgcgagttttggttggagaggggcgcaggacttcgggtcaccatgcaccagccagtgctcctctgccttctggctttgatctggctcatggtgaaataagcttgccaggaggctggcagtacagagngcagcagcgagcaaatcctggcaagtgacccagctcttctcccccaaacccacgcgtgttctgaaggtgcccaggagcggcgatgcactcgcactgcaaatgccgctcccacgtatgcgccctggtatgtgcctgcgttctgatagatgggggactgtggcttctccgtcactccattctcagcccctagcagagcgtctggcacactagattagtagtaaatgcttgatgagaagaacacatcaggcactgcgccacctgcttcacagtacttcccaacaactcttagaggtaggtgtattcccgttttacagataaggaaactgaggcccagagagctgaagtactgcacccagcatcaccagctagaaagtggcagagccaggattcaaccctggcttgtctaaccccaggttttctgctctgtccaattccagagctgtctggtgatcactttatgtctcacagggacccacatccaaacatgtatctctaatgaaattgtgaaagctccatgtttagaaataaatgaaaacacctga

SEQ ID NO: 343555 - DNA, 1395 bp, Homo sapiens
  misc_feature (635)..(635): n is a, c, g, or t
  misc_feature (1189)..(1189): n is a, c, g, or t
agcgggggtgtgctgggggactgtgcagctcgaggctccagaggcacactccagagagagccaaggttctgacgcgatgaggaagcacctgagctggtggtggctggccactgtctgcatgctgctcttcagccacctctctgcggtccagacgaggggcatcaagcacagaatcaagtggaaccggaaggccctgcccagcactgcccagatcactgaggcccaggtggctgagaaccgcccgggagccttcatcaagcaaggccgcaagctcgacattgacttcggagccgagggcaacaggtactacgaggccaactactggcagttccccgatggcatccactacaacggctgctctgaggctaatgtgaccaaggaggcatttgtcaccggctgcatcaatgccacccaggcggcgaaccagggggagttccagaagccagacaacaagctccaccagcaggtgctctggcggctggtccaggagctctgctccctcaagcattgcgagttttggttggagaggggcgcaggacttcgggtcaccatgcaccagccagtgctcctctgccttctggctttgatctggctcatggtgaaataagcttgccaggaggctggcagtacagagngcagcagcgagcaaatcctggcaagtgacccagctcttctcccccaaacccacgcgtgttctgaaggtgcccaggagcggcgatgcactcgcactgcaaatgccgctcccacgtatgcgccctggtatgtgcctgcgttctgatagatgggggactgtggcttctccgtcactccattctcagcccctagcagagcgtctggcacactagattagtagtaaatgcttgatgagaagaacacatcaggcactgcgccacctgcttcacagtacttcccaacaactcttagaggtaggtgtattcccgttttacagataaggaaactgaggcccagagagctgaagtactgcacccagcatcaccagctagaaagtggcagagccaggattcaaccctggcttgtctaaccccaggttttctgctctgtccaattccagagctgtctggtgatcactttatgtctcacagggacccacatccaaacatgtatctctaatgaaattgtgaaagctccatgtttagaaataaatgaaaacacctgagctggtggctgngtactttgactggtacatggaggctattttaatccttctaactaaactaaaatagattaaaggaattaaactaaaatacaagtaaagctagacaaaggcccagaaatcatactgtaaggaaatgttattggaagctgattcccagagcagaccacatatacagcaggatgtgcctgtggcatgaagattttctttctctttttttt

SEQ ID NO: 343556 - DNA, 187 bp, Homo sapiens
tgctgggattacaggtgtaagcctctccacccagccagcaaaatagaaatatatttaaacacatcaataaacccctacaaatattctagagttcttctcttaatgccagttccttctcactaaggaatttgtgaattttctaggtggatataactacagaaaatgcttgtttctatcttctccttta

SEQ ID NO: 343557 - DNA, 430 bp, Homo sapiens
tgtcgcacaccctgtgagggggataagggaacttttcccatttcactattaagaggaaagaaagcaccatgcctgttctaaataagcaaaatagaaaaaaaaatattgattaagtaaaattcttactatttaaagaagcccaatgtaaaactagtgaccactcttttgatgaaattctttttttaaaccaatattgcagggctttataataatgatttataataattattgtttccattacttgggatcatcttaataccacgataaaaaaaaattctcagattttctttatttccaatggtttcttaccatagaggtcttcagtaattatattatataaacaagtacccctccctcatccagtccacagatataacttcatcaccacatctttcttcacactctctttaccctttattttcctcctagt

SEQ ID NO: 343558 - DNA, 473 bp, Homo sapiens
gcaggttatgaataataatctatatctgaggtcagccagaggttatatctaataaaccatagctgagacgtggaagcaaggcaatttgagaactaacttccttggctattctatttcagggcctttaatttctacaagggaggaaaattgagatcatgataactatgcccataaattaaaaccagttcccttttcctcaaagaaatttttctcaaaagcctataaggcattcctaatctcattttcatttggtggtgtccaggaaataattatgatcaatggggaaacctttgcagtaggaaaaagctgcttgttgtgatattgatattttggttgttagtaatgggggaataaatggtaagggtctggatagagtaatggttgtttgaaataatatttaaactacataatgctcatctggcttcaaacactatatattgagaggctataacttttattttattatttattta

SEQ ID NO: 343559 - DNA, 284 bp, Homo sapiens
agagagagagagagagagacagagagagcaaaagtgcaggggaaactgccgcttttaaaccgtcagatctcatgagaactccctcactatcacaagaacagcatagggaaaactgcccacatgatccagtcacctcccaccaagtccctttcttgacacatgggggattacaatttgagataagatttaggtggggacacagagccaaaccatatcagagggaaacctcgaacagatcctggcagtctaccttagtggagggattagaaattagagttcatgga

SEQ ID NO: 343560 - DNA, 827 bp, Homo sapiens
ggtaattgaagcccctataagttcactttgagttaattaaaaaaggagattattctgaggagtctttacctaatcagatgaacccttgaaagaggatctagaagtgagagagatttcaagcaacagaaatgctgtcttgatggctttgaaggaacaaacaaccatgtgaactacttatggaggagacaatacagcaggaacctaagggtgacctctagtaactgggagtaattcccaactgacagtcagcaagaaaaatagggtcttctgtcctacaatcacacagaactaattctaccaagaagcaatgagcttggaggaggacccaagcttcagatgaaattgtacctgtgagtaacatttcagcttagtaagaccctgaggagagttgccagctaacctgtacttggacatctaacacatggaaactgtgagataataattttgtattgttttaagccactacattttggtaattcattatccagcaacagaaaatgaatgcacaggtctgtcatgcttcatattctatcatactaaagtctattgatacatgtattttttctctctgagagttggatatggccttggggttgagggatggtgtgtgtgtttatgattggttggttgttttatttagcatatattctatttccttacgtaaaacaataagattgctttacttttacaggcatttctaaattatgatcatagtttaaagaatattattaattaaatctttatcattaccaattttggtgagacaaattcatttggtaatgaaataatattaataatagcagcaacaatatcagtaactcctaaca

SEQ ID NO: 343561 - DNA, 451 bp, Homo sapiens
cctccgtaactgaaacttattttgcattaaagtaaattcatatgtaaactttttacattaccaatctttgtggataaaataacaaaaatactaccttctatttatatgatgtattatacttatcaaaatacatttataaacattatttactttgatcctttaacccaggagttggttaggagagatattatctgtgtttgaaagatggaagatattgacattctgcaaggtgaagtatgtgcccaaagtctcacaacagtaaatgcagaatttggacttgaacccaggttactgacttggagctagaaaattattttcattaaagcatatttcccttgaaatgataatggaaattttaaccagaaaatacatgataccccactatagcaaagatgaaatgtagtgttttacattttttcttatttttttttctgaataaaaagtggcactc

SEQ ID NO: 343562 - DNA, 354 bp, Homo sapiens
gtcaaccaggaagtgaaggattggaagagacaaatatgcccagtcatcagtagatgaaagtgaaacacagagaggttgtgctttgcccaagaagcacacagcacagcagggagggagagtgcctggacctgaatccagcttcaacacatttcagggtccacgaagccagcctccaggagaccccacgtgcacagtgcttggtctggtcccacccccaagccctttgtcatcacccagaaaactccctcctccctgtatctggtactaagagagttgggaggggcctccaaagtccccagcatggcctacccccttccttacattaatattacagttgaggtaaccgagtcaaga

SEQ ID NO: 343563 - DNA, 234 bp, Homo sapiens
agagattttaacataccagtagaattcagcagcatgtactggtaggcttctgctgaacaagccgaagtgtgggcagtaaaaatgttggtgtcaggttaaaattcctgagagaactgtttctaatggaatctgtcctggacacttactagtagtaagctttgagacagaatgaaattggagtagaataaaatcccacctccattcacctaaatgttaattgtttccttggcaaag

SEQ ID NO: 343564 - DNA, 295 bp, Homo sapiens
ctgttagtggtactccaaaaacggcatcaccagtattagaggttagacagcagtttaaaacatttcttcctgtctcatttggttcctgcaaaaatctcaatagtaatttttgagttttacctaaggatgtgcagagaaagacatcagtagaaagaggaaacaagaagtatcaaagtaggataactcatctcccattccaagcacttttctttttctttttcttctcttctttttttttttttttttttttttttttgagacattgtctcactttgtcaccctggctggagtgcag

SEQ ID NO: 343565 - DNA, 721 bp, Homo sapiens
tgggaatgtgaatacagcaaaatgaaccatattgatttactaatcataagttgaaccccaggcgtcattttaagaaaactttatggacaactttaaatatctacagaagcaaagagtgaaatgagcccatccatccctcctatggattattctgaagcaaatcccaaatcatatcattttaccaagactaagaaaaaaagagtccctcttatgtgactggtattctctgaggggtttcaaacctactgcctgatgcgaatccttaactgggattctcctcactttacatgtgaggaaggagcacagcgtgcccagggtcacgcctagtcacacagggagccgagaaacaaatccaggcaacccggcttttttttttttttcccccattacacctacagtactgtgaatccaactgtttttaagaaggaaacaaaaagtattaaccggtttaagttgaaacacaacgaatgtatttactaaaactatttaatcaaaaccagaaatctcaaatattctatagactgtttaaatataaaccaaactaaactatttaagttccaggatattagtgactttttacctgagatacttgctcagattatctatctgttgtgaactccattttaaaagcacctcactataccatgcttgaagtcaggtagtctgtagacttcatcacagcccctttatatataattacttctctcacggaggagtatgg

SEQ ID NO: 343566 - DNA, 564 bp, Homo sapiens
tctccaggcggccgctctggtgtggggagggagcgtcatctcaaggacactgaaaaagctgtttgccgttttgctgtttgcctccttgtcacgacctcagcgacggcagatggagccagtggagggagagagacagacggcaatgcttgggtagccagggctccctgccggccccactcctcctgcagacacgagcacgcacacacacacgcgcgcaaaacacacacgctgcccttcgccacacgtagccaagtaaaatacacaaaaagcaactgagataccattcgcacatgaccacatggaaacacacaaatgaacaaacgcattcaggcatagccacatgccagtcacacagatggatagacaagagcctggggtacaaagccacatggcacaaagccacctggatgtatatgcccctacacacgcacacagaaaaaaacatgcaaacttaagtacacacctatccagacaagtgtgagtgcacacacacacacactcacacactctacctgacacgttagtgcatccccattgggccccagtttctctcagcaaattcag

SEQ ID NO: 343567 - DNA, 554 bp, Homo sapiens
tctaagctgttactgtcattttgatttgtctgtccctccaaactgaaccactaaaagcttggcaggattcagttgaagatgaacaggagttaaattttttcactgatattgtttcttttccacttagtgtttcctctactaggagctaactatgtccaaaaacagaattttgattggtgagggtgaaaaatgaagtttagaacaataaaataaatacctgttccaaatgtaacctgcaggtatttcacagtattgcttattaatggaagttattttttgtggtctttgtagaatcagttatgaaattaccaacttggatattttaatgacttcttcttgtaattgtttttgcaattttatattttcaggaagttctatgccaggtctcaagcagtttattaaaatttgcccaagagtaaattctaccacaagtaaatctctttggaaacactaccattatgttgttattttattgtcacaagtctcagtagttgtgaaagagcaaccttggaaattaaggaattgaagcaaagcagatttcctgacagaataaa

SEQ ID NO: 343568 - DNA, 418 bp, Homo sapiens
ctttaggaaaatgatactggagaagtacaaagctatcaaatttacaaatcttagcagcagagaccacgaaaatatctgctttattctagtttggaatttaacacaaggatgaataacatgcacgattttagttcagcgattaaagtgcatactcagttaagggggggtggagcaatagagagagagccttctctttgatctcataggttgcattaaaaactcactactcgtaatgaatttttgatcatcccctgggtacacataacttggtccttgctctttcaaaatgagtggactcaaactgacttacaatgtgactgtgtctacggtgcacttacaaccatctttcagtaaaggtcttcagatttaggctctaggtagaataaggcaggaaaaaaaggacaccaaaattatcagc

SEQ ID NO: 343569 - DNA, 274 bp, Homo sapiens
cctcggttatgtaatccagcccttggctagcagcctgggatcaggacccaggggagagaaaagcaggaagtggcctccccctgatatagaagcatcttggtgaagggagctgagcaggcgccaccccactccctgagagcagctcctcaagaacagccaagggtgcctgggcttcgaccagacaaacacagagctgcacacctactgcaccctcgtgtttacttctcgtaaaagcccactgtgaaattcttaccatctccattttacagaggat

SEQ ID NO: 343570 - DNA, 637 bp, Homo sapiens
ctcagcttccagattacaggtgtgcgccactacgcccagctaattttgtatttttagtagagacagggcttctccatgttggtcaggctgatctcaaactcctgacctcaggtgatccgcccgcctgagactcccaaagtgctgggattacaggcatgggtcaccgcgcccagcccactctcaccctttcttgccctcccaccttccaccatggggtgatacagcatgcaggcccttgtcagatgctggcaccatgctcttggacttcccagactccagaactgtgagccaaataaatttctgttcattgtaaattacccagtctgtgacattgtgttaaagcaacacaaaatgaactaagacaacgtatttgtgaaaagtattctccataagggcaaggaccatatttgttttgtttaccaatctaccgtctgggcttaataggcacaggcacataaggtctctctgagatgcaagcaatgcatatgtttctcttcataacataaagaatattacctaaattcttacatttaattacatgaaagaactgagagaagtcttaaatatctagttgcatcggctaatataaaaaccaaaatggtcattattcaaaatcacagaaaggttttcctatgca

SEQ ID NO: 343571 - DNA, 321 bp, Homo sapiens
aaataaaagcaaaaaaaataaaggggatacttgcaaggtttttgagaggatgagagactctgggacctgcagctaaaatggagggttggcttttgataaaaacagagacacttcatccacagtaacaggagagaagtcagaaaaaatcatgaatgaataggtaatttattcaccagacatttaatgagcgcctgttactatactacttactggggattcaccactaaacaagatcaagtctctaccgtcgtgaaataagtggaagggtcttacccttatttctgttttctcaatgaatctgaattaaagtcatcccctaag

SEQ ID NO: 343572 - DNA, 468 bp, Homo sapiens
ctcatgcactttgtttgggcccaggcattcaagcccactgcagagatcctgctgcacccaggctctactctgagtttggcaataaccttaaaccaaaatcaacaaatctgacaagatgccaggccaacctagccaccctattagctgcttgttcctcctgggatttgcagagagcacctgcagcctaaacaaggacaaaagttgaagcatggatctttctgtgcagcagctgtgatttctgcaccttctagctccctcgccgagcaccactccctcatatcttgctggcagagcaaggcagcatcgtgagcagagcaagtcctaagaagtacatgggttcaaatctggtctctgtcactgaccaacagactctttacctttctgagccttagtttcttcaactcctgcttcatttcacattttaaaaagtagaataaagacaaactccatgtttttatctctggcaaa

SEQ ID NO: 343573 - DNA, 419 bp, Homo sapiens
agtctcgctctgtcacccaggctggagtccagtggcacaatttcagcttactacaacctctgcctttccccgggttcaagcgattttcatgcctcggcctcccaagtagctgggattacagagagcacctgcagcctaaacaaggacaaaagttgaagcatggatctttctgtgcagcagctgtgatttctgcaccttctagctccctcgccgagcaccactccctcatatcttgctggcagagcaaggcagcatcgtgagcagagcaagtcctaagaagtacatgggttcaaatctggtctctgtcactgaccaacagactctttacctttctgagccttagtttcttcaactcctgcttcatttcacattttaaaaagtagaataaagacaaactccatgtttttatctctggcaaa

SEQ ID NO: 343574 - DNA, 2617 bp, Homo sapiens
agcggctgccgtcgtggaagcaggatttccgcggttgtgtaacggcctgtcgcaggcgtgcagggacctggactccgcctcgtccccggggctcgggcagccgagccatggcggggaactgtggggcccgcggcgcgctgtcggcgcacacgctgctgttcgacctgccgcccgcgctgctcggagagctctgcgctgttctggacagctgcgacggcgcgctgggctggcgcggcctggagagactttcaagcagctggctggatgttcgtcatattgaaaagtatgtagaccaaggtaaaagtggaacaagagaattactttggtcctgggcacagaaaaacaagaccatcggtgaccttttacaggtcctccaggagatgggacatcgtcgagctattcatttaattacaaactatggagcagtgttgagtccttcagagaagagttatcaggaaggtggatttccaaatatattattcaaggaaacagccaatgtcaccgtggataatgttcttattcctgaacataatgaaaaaggagtactgcttaaatcttccatcagctttcaaaatatcatagaaggaactagaaatttccacaaagacttcctaattggagaaggagagatttttgaggtatacagagtggagattcaaaacctaacatatgctgtcaaattatttaaacaggagaaaaaaatgcagtgtaagaagcattggaagaggtttttatctgagcttgaagttttactactgtttcatcacccaaacatactagagttggctgcatattttacagagactgagaagttctgtctgatttatccatacatgagaaatggaacactttttgacagattgcagtgtgtaggtgacacggccccactcccttggcacattcgaatcggtatattaataggaatatccaaagccattcactacctgcacaacgttcaaccatgctcggtcatctgtggcagtatatcaagtgcaaacatccttttggatgatcagtttcaacccaaactaactgattttgccatggcacacttccggtcccacctagaacatcagagttgtaccataaatatgaccagcagcagcagtaaacatctgtggtacatgccagaagagtacatcagacaggggaaactttccattaaaacagatgtctacagctttggaattgtaataatggaagttctaacaggatgtagagtagtgttagatgatccaaaacatatccagctgcgggatctccttagagaattgatggagaagagaggcctggattcatgtctctcatttctagataagaaagtgcctccctgccctcggaatttctctgccaagctcttctgtttggcaggccggtgtgctgcaacgcgggcaaagttaagaccatcaatggatgaagttttaaatactcttgaaagtactcaagccagcttgtattttgctgaagatcctcccacatcactaaagtccttcaggtgtccttctcctctattcctggagaatgtaccaagtattccagtggaagatgatgaaagccagaataacaatttactaccttctgatgaaggcctgaggatagacagaatgactcagaaaactccttttgaatgcagccagtctgaggttatgtttctgagcttggacaaaaagccagagagcaagagaaatgaggaagcttgcaacatgcccagttcttcttgtgaagaaagttggttcccaaagtatatagttccatcccaggacttaaggccctataaggtaaatatagatccttcttcagaagctccagggcattcttgcaggagcaggccagtggagagcagctgttcctccaaattttcctgggatgaatatgaacagtacaaaaaagaataaattctaccagaagataaagaaaaaagcaagtattgcataggcacctgagcataggtatgaccttgggaagacattggctccataagcaatgccaagagaatgatcaatagtgagtttgggtgatgcagataaacaatctggataattccatttcttttttcccaaaccctcaaacagagtgccttaaaaaattgttttatcaggataattgtctcatgaccaaatccacgctcaattagagccattcaaaattccttaagatcatgggttctgacttcagccaaacaaaacaatcaaaacctaccaaaaagggactggattgtaatgtcctctccatcatcctcagtgtgagtcctcagagcctccatctgccaagaacattcagttggattccatcgtttggtttagcttgcttgcacgggttgtaggaaatgtctaatttgtaaatgttaatagatacctttggaaagaaaaaacacaaaacaaaaaaaaaaaaaaattttggggcggtgggcctcggaaaaagtttctaaacattcgtgggggcggggccagggttattggacctgggcaaacgtggtgccaggaaatcgggctggacatgcgtctgttctcaccataaaaacgcggggaacggggttctgacaatcagaggcttccggcataggttctacaacggccaggacgttacccccccgcggcgggagaacaacaggaaacac

SEQ ID NO: 343575 - DNA, 479 bp, Homo sapiens
aagatcatgggttctgacttcagccaaacaaaacaatcaaaacctaccaaaaagggactggattgtaatgtcctctccatcatcctcagtgtgagtcctcagagcctccatctgccaagaacattcagttggattccatcgtttggtttagcttgcttgcacgggttgtaggaaatgtctaatttgtaaatgttaatagatacctttggaaagaatcaccttgttattctgattgacccctcttgttttttggttaatccctgactagcctgcttgtctgaaaatgagccaggttcacccttagctacggcatgctctgggttgaaaggggatttcttcccaagatctatcctaaactcttaggacagtttatcctgtattgactattattacagctttttaaaaacagacttagtgacctattatatcttaaggagactatgtgaaatgtccatcaagtaatttttattcctgagaaa

SEQ ID NO: 343576 - DNA, 1084 bp, Homo sapiens
agcggctgccgtcgtggaagcaggatttccgcggttgtgtaacggcctgtcgcaggcgtgcagggacctggactccgcctcgtccccggggctcgggcagccgagccatggcggggaactgtggggcccgcggcgcgctgtcggcgcacacgctgctgttcgacctgccgcccgcgctgctcggagagctctgcgctgttctggacagctgcgacggcgcgctgggctggcgcggcctggtgtctaaaaacaagctttgtgagaatggagtcttaattttgcaggggttttggcatgtggttgtatgcaaatacaaagattccaaatacggatgtgttgcattatttgaaaaaaccccttcagagacatatttgcatatggagacgtgatttctgcaactgaaaacagtcagtcctgcactctcaaaacagccttcaaggacttttgagcatctgatttctgaacttcttaggttgactttttggcttatgtgactccaatacgactttcaacaaagatttgtgttccaaaaaatggttttaaacaatgcttaactaacagcatgtttttcttaatttgtattttcagtttagaatgcttttaactttatcaacataattagtcattgagaacttttctctgtatttttatttgatatgtactgcgagtaaacaaagtcctatattctgaaaggggacacgtaagggagagttgaagaaaatgataaatattgaagaatgtaattaacatgttgagagtttgcattcctgttgtatcagattggagctattttatagaattggatctaaatgaagtatacattttatggatgctaaaaatactctttagcaatgtttctattcagaatgcatcatcattagagaaaagctattaaggttgcagtgtgaatcaccagttggaaaaagagaaaacatatttcatttccagtccggaagcaatccatgcatgcaggcagtattcattttaacagtctggatcagttttttaccatgaacttctgctattagaaaaaatgcctttgtctaatctagctttccttagatgtgatgcaaactcagaacta

SEQ ID NO: 343577 - DNA, 709 bp, Homo sapiens
agcggctgccgtcgtggaagcaggatttccgcggttgtgtaacggcctgtcgcaggcgtgcagggacctggactccgcctcgtccccggggctcgggcagccgagccatggcggggaactgtggggcccgcggcgcgctgtcggcgcacacgctgctgttcgacctgccgcccgcgctgctcggagagctctgcgctgttctggacagctgcgacggcgcgctgggctggcgcggcctggagagactttcaagcagctggctggatgttcgtcatattgaaaagtatgtagaccaaggtaaaagtggaacaagagaattactttggtcctgggcacagaaaaacaagaccatcggtgaccttttacaggtcctccaggagatgggacatcgtcgagctattcatttaattacaaactatggagcagtgttgagtccttcagagaagagttatcaggaaggtggatttccaaatatattattcaaggaaacagccaatgtcaccgtggataatgttcttattcctgaacataatgaaaaaggagtactgcttaaatcttccatcagctttcaaaatatcatagaaggaactagaaatttccacaaagacttcctaattggagaaggagagatttttgaggtatacagagtggagattcaaaacctaacatatgctgtcaaattatttaaacaggtatggaaagaattact

SEQ ID NO: 343578 - DNA, 341 bp, Homo sapiens
caacattccagagatactcaggggggtaaggggccagcaaccgcgacctttctctcgtctcagaaaaattataagcagatgtgggcgcctcggggaggcgtagagcagggagccagagcaagttttgggaacacggaatgcagaccctgaagccggctgcggggatgggcactgcggtaactcatcctctcctgagctcaggagctgaggcagcagagccgtctgaagtgctgggagccaggggtggtggggatggagaggaccccatttccgaatggctgacagggcagtctgagggaggcgggagcttttccttaaatgcaaggccaggttggtgacct

SEQ ID NO: 343579 - DNA, 372 bp, Homo sapiens
agaaacgatacaggtacattgtggcaaaaatagaagatacaaaacaagcaaatatgagaaaaaatatacatgccaccacctatatatgacttttagtactttataatcttttgtctatatatgtctatatggatatatacgtattctttttatccaaatggtattacattgtacattctgttttgaaacctgccttttttagtcatttacatctacttttccatctcagtaacttttcatcttgtgtaatgcccggatcacattaaaatgtttccaattagctcaaaaatgtcctttatggctggtttggctaaaacagtatccaggccagcattgcacctatgaaattggctgttaggaatcttgtatctt

SEQ ID NO: 343580 - DNA, 1405 bp, Homo sapiens
gaggaaacactggatttgaactacactttagaccaaatggccctaccagatatttatagaatattccatacaacagtaacagaatatacattattctcagtgcatatggaacattctccaggatagagcatgttaggccacaaaacaagtcttaacaaatttaagaacactgaaatcatacgaagtatcttatgtgaccacactaacatgaaactagaaatcagtaatcaatgaaaccaaagtttttttttaaagataaacaaatagacaaacctttagctagattaacaaagaaaaagagaagatgccaacaaaatcagaattaaagaggagacattacaactgacatcgaagaaaaagagactactaatcacgactatgttccaataaattggataacctagaagaaatgaagatattactagaaacatgcagcctacaaaagctggagtaaggaagtcatgaaaatctgaataggccaataataattaaggaaactgattcaataaaaagtatcttatcaaagaaagacgaggcactgggcgcagtggctcatgcctgtaatctcagcactttgggaagctaaggcaggtggatcacctgaggtcaggtcaggagttcaagaccagcctggacaacatggtgaaaccctgtctctattaaaaatacaaaaattagctgggtgtggtggcatgggcctataatcccagctactcaacaggctgaggcaggagaatcacttgaacccaggagatggaggttgcaatgagccgagatcgcgccactgcactccagcctgggcaacagagcaagagttggtctcaaaaaaaaaaaaaaagacagacagaccaggacctcatggcttcaccgctgagttctaccaaacatataaagaacagcaaccaatccttaaacttttcaaaaaaattgaagagaaggtaatacttccaaactcattttagaaagccagtatttaccctgatttcgaaggcagaaaaagacactacaaaaaaataaacaaaggaaactacaggccaacagccctgatgaaaaaaaatgcaaaaatccttaataaaatattagtgaaccaaatccaagagcatagtaaaaagatcactcaccatgatcaagtgagatttatcccagagatgcaagagtagtttgatgtacataaatcaataaaaataatacacattaagcaaattaaagacaaaagccacatgattattttgatagatgcagaaaaaacatatgacaaaattcaacatcctttcatgataaaaactacccctgaaaaataaggtatggaaaaaatgtaccccagcataataaaggtcatatacccacagctaacatcatactcagtggtgaaaactgaaaagcttttcctctaagattagaaaca

SEQ ID NO: 343581 - DNA, 408 bp, Homo sapiens
tgtatttccgcattgtcaccatggatagcaacttcgttccagtgaatgacaagtttctctattggacaggatccaaatagcaacaggattgcacagtggctggaagtggtacctgagcaaggcattgtagacctgtccttccaactggcaccagaggcaatgctgggcacctacactgtggcagtggctgagggcaagacctttggtactttcagtgtggaggaatatgtgctgccgaagtttaaggtggaagtggtggaacccaaggagttatcaacggtgcaggaatctttcttagtaaaaatttgttgtaggtacacctatggaaagcccatgctaggggcagtgcaggtatctgtgtgtcagaaggcaaatacttactggtatcgagaggtggaacgggaacag

SEQ ID NO: 343582 - DNA, 2286 bp, Homo sapiens
  misc_feature (1)..(1): n is a, c, g, or t
  misc_feature (4)..(4): n is a, c, g, or t
  misc_feature (6)..(6): n is a, c, g, or t
  misc_feature (8)..(8): n is a, c, g, or t
ngcncnangccggtccgggtgccacctctccctgcttgggcgccgccgcgcgagcgcttcccttccccctgcaagcgcccggataatgtctgagaatgtccatttctgggacgcttagcagctattatgtcgactcgatcataagtcacgagagtgaggacgcgcctccagccaagtttccttctggccagtacgcgagctcgcggcagccgggccacgcggagcacctggagttcccctcgtgcagcttccagcccaaagcgccggtgttcggcgcctcctgggcgccgctgagcccgcacgcgtccgggagcctgccgtccgtctaccacccttacatccagccccagggcgtcccgccggccgagagcaggtacctccgcacctggctggagccggcgccgcgcggcgaagcggccccggggcagggccaggcggcggtgaaggcggagccgctgctgggcgcgcctggggagctgctcaaacagggcacgcccgagtacagtttggaaacttcggcgggcagggaggccgtgctgtctaatcaaagacccggctacggggacaataaaatttgcgaaggaagcgaggacaaagagaggccggatcaaaccaacccctccgccaactggctgcacgctcgctcttcccggaaaaagcgctgtccctacaccaaataccagacgctggagctagagaaggagtttctgttcaatatgtacctcaccagggaccgtaggcacgaagtggccagactcctcaatctgagtgagagacaagtcaaaatctggtttcagaaccggcggatgaaaatgaagaaaatgaataaggagcagggcaaagagtaaagattaaagattacccccagtcctccctagctcttccccatctcactcttagttatgtgacgactgcaaagccagtgctgtctgggatgtattcaagtgaatggggaagggagtctctcttccaagtcctttatctgcacctagaacctccctcctttcctttgcccttacctgtctctctcttctctctaggtgtcagccctcagactgtcaggcaagcccgggttctacccctaatgcaaatacccaccagggagatgtctagaggcagactcctgagtgaggagttgcagcccaaaggctgcagcattgccataccattcccatggagttgccaactattctcaggccaagggccatggggaagatggagcaaacctagcccccaagccggtgggctagaaagtacaagaaaaggcagcacgtggttttatgaaggtatcttaggtggagctactccccacctcccaccaacatatacattttgttgcaggaaatgtttaattccgcatgatgtttccctctccttccaacaaaagaaggtcaaactgtgggtcgtagagccttgacaatgttgtcctcctgttcatctgtgcaccacttgacagactgtagcttctcttgctctcgaccggccctgcattcttccgcaccctccctagctctgaaatcaactctcttcggtcgtatccaccttgcacccgcaagtcaagccgccccttgtagaaaaatccctccaccttccgttccccgctaggtcaaccccactgtagacaggaaagccaggccaggagagtccgaatgagaatttattgtgaatcgattcccaagctcccttccgggacaagtggtctgggacagggaggagcaacggccccagcgcgcaacgctctgcgcgttcctccgaatcccgtcggcttctcgacccacgcagagaagccccgggcttggcggctctagccccagcgccaaaggagacccgccccagggccgggcttggcctcctgcttcatgggcctggatgcagatctgcgtggctggtgcgtgcgcgcgcttctgggaaacagtcccgcgtgcaaaggaaaggggcaaaatggcacctaagcatcagatggaagcttactctctgcttccgttcctccccctgctcccctacttctcagtccccttcaatttgtagactcttgctcctgcttctcctgatcctgcaaggggacattccagtagaagttttttgctttgtcggtggctgtcgtgaaattgtgcttgtgtttcgtgatttctttgggggtgattgtctcgcttgttttcagttgtcgattatatgggagggttctgggtgggagtggggagggcgaggggcctagagctctaattgtttgttttggaagaaaaaaagaaaaagaacaaaaaatatatatcactctagaaaataaat

SEQ ID NO: 343583 - DNA, 2357 bp, Homo sapiens
  misc_feature (1)..(1): n is a, c, g, or t
  misc_feature (4)..(4): n is a, c, g, or t
  misc_feature (6)..(6): n is a, c, g, or t
  misc_feature (8)..(8): n is a, c, g, or t
ngcncnangccggtccgggtgccacctctccctgcttgggcgccgccgcgcgagcgcttcccttccccctgcaagcgcccggataatgtctgagaatgtccatttctgggacgcttagcagctattatgtcgactcgatcataagtcacgagagtgaggacgcgcctccagccaagtttccttctggccagtacgcgagctcgcggcagccgggccacgcggagcacctggagttcccctcgtgcagcttccagcccaaagcgccggtgttcggcgcctcctgggcgccgctgagcccgcacgcgtccgggagcctgccgtccgtctaccacccttacatccagccccagggcgtcccgccggccgagagcaggtacctccgcacctggctggagccggcgccgcgcggcgaagcggccccggggcagggccaggcggcggtgaaggcggagccgctgctgggcgcgcctggggagctgctcaaacagggcacgcccgagtacagtttggaaacttcggcgggcagggaggccgtgctgtctaatcaaagacccggctacggggacaataaaatttgcgaaggaagcgaggacaaagagaggccggatcaaaccaacccctccgccaactggctgcacgctcgctcttcccggaaaaagcgctgtccctacaccaaataccagacgctggagctagagaaggagtttctgttcaatatgtacctcaccagggaccgtaggcacgaagtggccagactcctcaatctgagtgagagacaagtcaaaatctggtttcagaaccggcggatgaaaatgaagaaaatgaataaggagcagggcaaagagtaaagattaaagattacccccagtcctccctagctcttccccatctcactcttagttatgtgacgactgcaaagccagtgctgtctgggatgtattcaagtgaatggggaagggagtctctcttccaagtcctttatctgcacctagaacctccctcctttcctttgcccttacctgtctctctcttctctctaggtgtcaggagaaagttttgttgatttagaagatagaaatagttggttcctaagaatgtgatgggccacaaggaaagagagaccccagtcaagctcctagtatgccctgtaatttttctgggaagtcctagcccctcacttccagcttgcctgtttcttctctacacccacccaaaagtcacccagggacactccaactctacacagctcagcagacatccacacacagtaatggggtgagctcacaaccaccattcagtcaagtgaggtgacactccagttgcagaccatcgcacaccaaatttggcaaaacagccctcagactgtcaggcaagcccgggttctacccctaatgcaaatacccaccagggagatgtctagaggcagactcctgagtgaggagttgcagcccaaaggctgcagcattgccataccattcccatggagttgccaactattctcaggccaagggccatggggaagatggagcaaacctagcccccaagccggtgggctagaaagtacaagaaaaggcagcacgtggttttatgaaggtatcttaggtggagctactccccacctcccaccaacatatacattttgttgcaggaaatgtttaattccgcatgatgtttccctctccttccaacaaaagaaggtcaaactgtgggtcgtagagccttgacaatgttgtcctcctgttcatctgtgcaccacttgacagactgtagcttctcttgctctcgaccggccctgcattcttccgcaccctccctagctctgaaatcaactctcttcggtcgtatccaccttgcacccgcaagtcaagccgccccttgtagaaaaatccctccaccttccgttccccgctaggtcaacccctcctgcttcatgggcctggatgcagatctgcgtggctggtgcgtgcgcgcgcttctgggaaacagtcccgcgtgcaaaggaaaggggcaaaatggcacctaagcatcagatggaagcttactctctgcttccgttcctccccctgctcccctacttctcagtccccttcaatttgtagactcttgctcctgcttctcctgatcctgcaaggggacattccagtagaagttttttgctttgtcggtggctgtcgtgaaattgtgcttgtgtttcgtgatttctttgggggtgattgtctcgcttgttttcagttgtcgattatatgggagggttctgggtgggagtggggagggcgaggggcctagagctctaattgtttgttttggaagaaaaaaagaaaaagaacaaaaaatatatatcactctagaaaataaat

SEQ ID NO: 343584 - DNA, 3411 bp, Homo sapiens
  misc_feature (1)..(1): n is a, c, g, or t
  misc_feature (4)..(4): n is a, c, g, or t
  misc_feature (6)..(6): n is a, c, g, or t
  misc_feature (8)..(8): n is a, c, g, or t
ngcncnangccggtccgggtgccacctctccctgcttgggcgccgccgcgcgagcgcttcccttccccctgcaagcgcccggataatgtctgagaatgtccatttctgggacgcttagcagctattatgtcgactcgatcataagtcacgagagtgaggacgcgcctccagccaagtttccttctggccagtacgcgagctcgcggcagccgggccacgcggagcacctggagttcccctcgtgcagcttccagcccaaagcgccggtgttcggcgcctcctgggcgccgctgagcccgcacgcgtccgggagcctgccgtccgtctaccacccttacatccagccccagggcgtcccgccggccgagagcaggtacctccgcacctggctggagccggcgccgcgcggcgaagcggccccggggcagggccaggcggcggtgaaggcggagccgctgctgggcgcgcctggggagctgctcaaacagggcacgcccgagtacagtttggaaacttcggcgggcagggaggccgtgctgtctaatcaaagacccggctacggggacaataaaatttgcgaaggaagcgaggacaaagagaggccggatcaaaccaacccctccgccaactggctgcacgctcgctcttcccggaaaaagcgctgtccctacaccaaataccagacgctggagctagagaaggagtttctgttcaatatgtacctcaccagggaccgtaggcacgaagtggccagactcctcaatctgagtgagagacaagtcaaaatctggtttcagaaccggcggatgaaaatgaagaaaatgaataaggagcagggcaaagagtaaagattaaagattacccccagtcctccctagctcttccccatctcactcttagttatgtgacgactgcaaagccagtgctgtctgggatgtattcaagtgaatggggaagggagtctctcttccaagtcctttatctgcacctagaacctccctcctttcctttgcccttacctgtctctctcttctctctaggtgtcaggagaaagttttgttgatttagaagatagaaatagttggttcctaagaatgtgatgggccacaaggaaagagagaccccagtcaagctcctagtatgccctgtaatttttctgggaagtcctagcccctcacttccagcttgcctgtttcttctctacacccacccaaaagtcacccagggacactccaactctacacagctcagcagacatccacacacaacacacacacacacacactcaggtccggcggggccagacgtctgggcgcgggcagcctcttgattcttttacagtctcatcctatcctctcaggcctcctctcccccgacaaaaagcccaactgtttctcctcagaatttgaaacaatcgcgtggagtttgaaaactgctcggtccccctttttacacgccataaagggcgcactgctttgcggtctccgctagaaattaggggcaggggtgggaggtgtacgtagaaagaaaaaagcttagggcttcttttttttcctcccctctgttgtgttttttttctattttttagcttatctacacaatttcatgaaccgtttcctgattccgatgcccactccctatccctccccttttactgctagttatgaaagtttctcctgctggccacctctgcggctgctctcccagaaaactggtggagccggtggctgcggcgccttttcgcagagcagccgctagatggcacccttgctccatgtgaaactccctggagcggcagctgcggatgtctgctcccggcaccgcgccttggtcggccctgaatccaggaactgagtgctaccaaaagtcatgaataatttgtacctaataaaaaaaatagggctcgttatggccttacccccattttatagatttcagttatagtagtgttcccccatctcctcaaatggtcaattttctgaattttccccaagaggagggctcagtgattctcacccagttgctgtgttcggtggggcaacaaatgcgtgaaaacggggaataatagtaataataggaataatgggtccaaatccaaaaggagaattgattcgaaacaacgagattttccgtgaaaggaggcgaaaggaatgtccctggatgcgggtcagcaggtcaggtgagaggggctagccggcaaaagaaggtaggatggagaggaagctgcccatcggctggagagaaaatcacgtaagccagcccgagaccccccagtttgtgtgtgtgggggaatggagccatagcttttgtggggattcggagatgcccaaagccggcagggcggcttcgcacgggcgcaagctctggagcctttgtatgagtccagggctgggctgggctcgcgcagggcgacctaggcacggggcaggggctccccagggcagcagggtgcgggaaggctcggatgtggtctctggatgctttgcgcgctcccaaagaatgcgcgttttcccatgggcgcgaaggcgggcgcggcgtcaggacgcaggagctctgttctccctgggttcctgggcttccaggtgagaggtgcggcttcagtgcgccttggccctggccgcaggcaaacctgggggcgccggtcctttcctcattgagcagctggaggtctggactccgggcactttcgttctgagacccgcaccctggttgttcacagccccttgcattccaaatctcctgtgtcctcccggccccgccggatccctgccttccatccgacaaacctgcgccagcaatagatactcccaccccctcaaaatcaccccagctgcagcctctcctctcccccaccaggacttagtgcaaggaggtaagcggagtttctcctcaacttgagtttctctaataaatctgcgctccgctgggtgtttataaattgtctcctcgctctttcgttttttttttttttttcctataacagaaacattttccttccatcaggaatttctggcacggtgtagagatgatttagaacaagccattgaatttgtacctcgccggtgagttttcaaataatgaccataaaatcctctgcacttgataaaaatgtttgcttcggcaacaatttaactcggccctccgttgcctcacggtcccctcagccacgcgctgaaaattcaaagccctggttctctccattcctcctcttttcctttatctctctcccgcttctagcccctctctcattctctaggttcacttttgaagaaccaaatgacctcactggtaaggttccctttggaaaagtgatagtttcatttttacaaatgttggggtgtatggggtccccaaaaggtgcccgtcaaaaaaacaaaccactgtttcctgaataaacaatggattgaatat

SEQ ID NO: 343585 - DNA, 3488 bp, Homo sapiens
  misc_feature (1)..(1): n is a, c, g, or t
  misc_feature (4)..(4): n is a, c, g, or t
  misc_feature (6)..(6): n is a, c, g, or t
  misc_feature (8)..(8): n is a, c, g, or t
ngcncnangccggtccgggtgccacctctccctgcttgggcgccgccgcgcgagcgcttcccttccccctgcaagcgcccggataatgtctgagaatgtccatttctgggacgcttagcagctattatgtcgactcgatcataagtcacgagagtgaggacgcgcctccagccaagtttccttctggccagtacgcgagctcgcggcagccgggccacgcggagcacctggagttcccctcgtgcagcttccagcccaaagcgccggtgttcggcgcctcctgggcgccgctgagcccgcacgcgtccgggagcctgccgtccgtctaccacccttacatccagccccagggcgtcccgccggccgagagcaggtacctccgcacctggctggagccggcgccgcgcggcgaagcggccccggggcagggccaggcggcggtgaaggcggagccgctgctgggcgcgcctggggagctgctcaaacagggcacgcccgagtacagtttggaaacttcggcgggcagggaggccgtgctgtctaatcaaagacccggctacggggacaataaaatttgcgaaggaagcgaggacaaagagaggccggatcaaaccaacccctccgccaactggctgcacgctcgctcttcccggaaaaagcgctgtccctacaccaaataccagacgctggagctagagaaggagtttctgttcaatatgtacctcaccagggaccgtaggcacgaagtggccagactcctcaatctgagtgagagacaagtcaaaatctggtttcagaaccggcggatgaaaatgaagaaaatgaataaggagcagggcaaagagtaaagattaaagattacccccagtcctccctagctcttccccatctcactcttagttatgtgacgactgcaaagccagtgctgtctgggatgtattcaagtgaatggggaagggagtctctcttccaagtcctttatctgcacctagaacctccctcctttcctttgcccttacctgtctctctcttctctctaggtgtcaggagaaagttttgttgatttagaagatagaaatagttggttcctaagaatgtgatgggccacaaggaaagagagaccccagtcaagctcctagtatgccctgtaatttttctgggaagtcctagcccctcacttccagcttgcctgtttcttctctacacccacccaaaagtcacccagggacactccaactctacacagctcagcagacatccacacacaacacacacacacacacactcaggtccggcggggccagacgtctgggcgcgggcagcctcttgattcttttacagtctcatcctatcctctcaggcctcctctcccccgacaaaaagcccaactgtttctcctcagaatttgaaacaatcgcgtggagtttgaaaactgctcggtccccctttttacacgccataaagggcgcactgctttgcggtctccgctagaaattaggggcaggggtgggaggtgtacgtagaaagaaaaaagcttagggcttcttttttttcctcccctctgttgtgttttttttctattttttagcttatctacacaatttcatgaaccgtttcctgattccgatgcccactccctatccctccccttttactgctagttatgaaagtttctcctgctggccacctctgcggctgctctcccagaaaactggtggagccggtggctgcggcgccttttcgcagagcagccgctagatggcacccttgctccatgtgaaactccctggagcggcagctgcggatgtctgctcccggcaccgcgccttggtcggccctgaatccaggaactgagtgctaccaaaagtcatgaataatttgtacctaataaaaaaaatagggctcgttatggccttacccccattttatagatttcagttatagtagtgttcccccatctcctcaaatggtcaattttctgaattttccccaagaggagggctcagtgattctcacccagttgctgtgttcggtggggcaacaaatgcgtgaaaacggggaataatagtaataataggaataatgggtccaaatccaaaaggagaattgattcgaaacaacgagattttccgtgaaaggaggcgaaaggaatgtccctggatgcgggtcagcaggtcaggtgagaggggctagccggcaaaagaaggtaggatggagaggaagctgcccatcggctggagagaaaatcacgtaagccagcccgagaccccccagtttgtgtgtgtgggggaatggagccatagcttttgtggggattcggagatgcccaaagccggcagggcggcttcgcacgggcgcaagctctggagcctttgtatgagtccagggctgggctgggctcgcgcagggcgacctaggcacggggcaggggctccccagggcagcagggtgcgggaaggctcggatgtggtctctggatgctttgcgcgctcccaaagaatgcgcgttttcccatgggcgcgaaggcgggcgcggcgtcaggacgcaggagctctgttctccctgggttcctgggcttccaggtgagaggtgcggcttcagtgcgccttggccctggccgcaggcaaacctgggggcgccggtcctttcctcattgagcagctggaggtctggactccgggcactttcgttctgagacccgcaccctggttgttcacagccccttgcattccaaatctcctgtgtcctcccggccccgccggatccctgccttccatccgacaaacctgcgccagcaatagatactcccaccccctcaaaatcaccccagctgcagcctctcctctcccccaccaggacttagtgcaaggaggtaagcggagtttctcctcaacttgagtttctctaataaatctgcgctccgctgggtgtttataaattgtctcctcgctctttcgttttttttttttttttcctataacagaaacattttccttccatcaggaatttctggcacggtgtagagatgatttagaacaagccattgaatttgtacctcgccggtgagttttcaaataatgaccataaaatcctctgcacttgataaaaatgtttgcttcggcaacaatttaactcggccctccgttgcctcacggtcccctcagccacgcgctgaaaattcaaagccctggttctctccattcctcctcttttcctttatctctctcccgcttctagcccctctctcattctctaggttcacttttgaagaaccaaatgacctcactggtaaggttccctttggaaaagtgatagtttcatttttacaaatgttggggtgtatggggtccccaaaaggtgcccgtcaaaaaaacaaaccactgtttcctgaataaacaatggattgaatatatttgtaaagcctccacttttgttgctcaaaattttctttctgtctctcattcctctcccttgccgaagcttgatca

SEQ ID NO: 343586 - DNA, 2593 bp, Homo sapiens
  misc_feature (1)..(1): n is a, c, g, or t
  misc_feature (4)..(4): n is a, c, g, or t
  misc_feature (6)..(6): n is a, c, g, or t
  misc_feature (8)..(8): n is a, c, g, or t
ngcncnangccggtccgggtgccacctctccctgcttgggcgccgccgcgcgagcgcttcccttccccctgcaagcgcccggataatgtctgagaatgtccatttctgggacgcttagcagctattatgtcgactcgatcataagtcacgagagtgaggacgcgcctccagccaagtttccttctggccagtacgcgagctcgcggcagccgggccacgcggagcacctggagttcccctcgtgcagcttccagcccaaagcgccggtgttcggcgcctcctgggcgccgctgagcccgcacgcgtccgggagcctgccgtccgtctaccacccttacatccagccccagggcgtcccgccggccgagagcaggtacctccgcacctggctggagccggcgccgcgcggcgaagcggccccggggcagggccaggcggcggtgaaggcggagccgctgctgggcgcgcctggggagctgctcaaacagggcacgcccgagtacagtttggaaacttcggcgggcagggaggccgtgctgtctaatcaaagacccggctacggggacaataaaatttgcgaaggaagcgaggacaaagagaggccggatcaaaccaacccctccgccaactggctgcacgctcgctcttcccggaaaaagcgctgtccctacaccaaataccagacgctggagctagagaaggagtttctgttcaatatgtacctcaccagggaccgtaggcacgaagtggccagactcctcaatctgagtgagagacaagtcaaaatctggtttcagaaccggcggatgaaaatgaagaaaatgaataaggagcagggcaaagagtaaagattaaagattacccccagtcctccctagctcttccccatctcactcttagttatgtgacgactgcaaagccagtgctgtctgggatgtattcaagtgaatggggaagggagtctctcttccaagtcctttatctgcacctagaacctccctcctttcctttgcccttacctgtctctctcttctctctaggtgtcaggagaaagttttgttgatttagaagatagaaatagttggttcctaagaatgtgatgggccacaaggaaagagagaccccagtcaagctcctagtatgccctgtaatttttctgggaagtcctagcccctcacttccagcttgcctgtttcttctctacacccacccaaaagtcacccagggacactccaactctacacagctcagcagacatccacacacagtaatggggtgagctcacaaccaccattcagtcaagtgaggtgacactccagttgcagaccatcgcacaccaaatttggcaaaacagccctcagactgtcaggcaagcccgggttctacccctaatgcaaatacccaccagggagatgtctagaggcagactcctgagtgaggagttgcagcccaaaggctgcagcattgccataccattcccatggagttgccaactattctcaggccaagggccatggggaagatggagcaaacctagcccccaagccggtgggctagaaagtacaagaaaaggcagcacgtggttttatgaaggtatcttaggtggagctactccccacctcccaccaacatatacattttgttgcaggaaatgtttaattccgcatgatgtttccctctccttccaacaaaagaaggtcaaactgtgggtcgtagagccttgacaatgttgtcctcctgttcatctgtgcaccacttgacagactgtagcttctcttgctctcgaccggccctgcattcttccgcaccctccctagctctgaaatcaactctcttcggtcgtatccaccttgcacccgcaagtcaagccgccccttgtagaaaaatccctccaccttccgttccccgctaggtcaaccccactgtagacaggaaagccaggccaggagagtccgaatgagaatttattgtgaatcgattcccaagctcccttccgggacaagtggtctgggacagggaggagcaacggccccagcgcgcaacgctctgcgcgttcctccgaatcccgtcggcttctcgacccacgcagagaagccccgggcttggcggctctagccccagcgccaaaggagacccgccccagggccgggcttggcctcctgcttcatgggcctggatgcagatctgcgtggctggtgcgtgcgcgcgcttctgggaaacagtcccgcgtgcaaaggaaaggggcaaaatggcacctaagcatcagatggaagcttactctctgcttccgttcctccccctgctcccctacttctcagtccccttcaatttgtagactcttgctcctgcttctcctgatcctgcaaggggacattccagtagaagttttttgctttgtcggtggctgtcgtgaaattgtgcttgtgtttcgtgatttctttgggggtgattgtctcgcttgttttcagttgtcgattatatgggagggttctgggtgggagtggggagggcgaggggcctagagctctaattgtttgttttggaagaaaaaaagaaaaagaacaaaaaatatatatcactctagaaaataaat

SEQ ID NO: 343587 - DNA, 2008 bp, Homo sapiens
  misc_feature (1)..(1): n is a, c, g, or t
  misc_feature (4)..(4): n is a, c, g, or t
  misc_feature (6)..(6): n is a, c, g, or t
  misc_feature (8)..(8): n is a, c, g, or t
ngcncnangccggtccgggtgccacctctccctgcttgggcgccgccgcgcgagcgcttcccttccccctgcaagcgcccggataatgtctgagaatgtccatttctgggacgcttagcagctattatgtcgactcgatcataagtcacgagagtgaggacgcgcctccagccaagtttccttctggccagtacgcgagctcgcggcagccgggccacgcggagcacctggagttcccctcgtgcagcttccagcccaaagcgccggtgttcggcgcctcctgggcgccgctgagcccgcacgcgtccgggagcctgccgtccgtctaccacccttacatccagccccagggcgtcccgccggccgagagcaggtacctccgcacctggctggagccggcgccgcgcggcgaagcggccccggggcagggccaggcggcggtgaaggcggagccgctgctgggcgcgcctggggagctgctcaaacagggcacgcccgagtacagtttggaaacttcggcgggcagggaggccgtgctgtctaatcaaagacccggctacggggacaataaaatttgcgaaggaagcgaggacaaagagaggccggatcaaaccaacccctccgccaactggctgcacgctcgctcttcccggaaaaagcgctgtccctacaccaaataccagacgctggagctagagaaggagtttctgttcaatatgtacctcaccagggaccgtaggcacgaagtggccagactcctcaatctgagtgagagacaagtcaaaatctggtttcagaaccggcggatgaaaatgaagaaaatgaataaggagcagggcaaagagtaaagattaaagattacccccagtcctccctagctcttccccatctcactcttagttatgtgacgactgcaaagccagtgctgtctgggatgtattcaagtgaatggggaagggagtctctcttccaagtcctttatctgcacctagaacctccctcctttcctttgcccttacctgtctctctcttctctctaggtgtcaggagaaagttttgttgatttagaagatagaaatagttggttcctaagaatgtgatgggccacaaggaaagagagaccccagtcaagctcctagtatgccctgtaatttttctgggaagtcctagcccctcacttccagcttgcctgtttcttctctacacccacccaaaagtcacccagggacactccaactctacacagctcagcagacatccacacacagtaatggggtgagctcacaaccaccattcagtcaagtgaggtgacactccagttgcagaccatcgcacaccaaatttggcaaaacagccctcagactgtcaggcaagcccgggttctacccctaatgcaaatacccaccagggagatgtctagaggcagactcctgagtgaggagttgcagcccaaaggctgcagcattgccataccattcccatggagttgccaactattctcaggccaagggccatggggaagatggagcaaacctagcccccaagccggtgggctagaaagtacaagaaaaggcagcacgtggttttatgaaggtatcttaggtggagctactccccacctcccaccaacatatacattttgttgcaggaaatgtttaattccgcatgatgtttccctctccttccaacaaaagaaggtcaaactgtgggtcgtagagccttgacaatgttgtcctcctgttcatctgtgcaccacttgacagactgtagcttctcttgctctcgacattccagtagaagttttttgctttgtcggtggctgtcgtgaaattgtgcttgtgtttcgtgatttctttgggggtgattgtctcgcttgttttcagttgtcgattatatgggagggttctgggtgggagtggggagggcgaggggcctagagctctaattgtttgttttggaagaaaaaaagaaaaagaacaaaaaatatatatcactctagaaaataaat

SEQ ID NO: 343588 - DNA, 918 bp, Homo sapiens
gagcaagaacatattctgggaaagataaggcatattgcaactgcttattctgagacagatgctccaaatctcagaatttgctttctagtcttgtgtcctttttactgacatgttgtgccagactagaaggaaaggaatgaaaataaatgtgggtttgggggaaggggaggcatggaggaaggcctacgtaggccaatttgtccatgcgcctggttgggtatttctagacttcttttcttccctcgagagctgtgggcatgtgaataagcagagggtcttaatgctgagaagaggtagacagcctgtgatggcaaagggtcattatctcggaagtcctccacattgattatcattgaatgtgtccttggagaaacagtcaatacaaaagaacatggtcactgtcctaaaggacatacatcctaaaggacaactaaagaagtcttaatgatatatacaatttatatatcaggatttagtgtggtgtgtcctaagtcagagagatgggacagaatgggcaaattcttcaacaaaacagataccatcttccagggctcaagaaacacaatgcccaggctgattagtttagatttatgtgtgtggaaaggaaagcattgttttgaaaagtgtctttgctgggcgcggtggctcacccctgtaatcccaatgctttgggaggccgaggcgggcggatcatgaggtcaggagatcgagaccatcctgactaacacagtgaaaccctgtctctactaaaaatacaaaaaattagccaggtatggtggtgggtgcctgtagtcccagctactcgggaggctgaggcaggagaatggcgtgaacccgggaggcggaacttgcagtgagccgagattgtgccactgcactccagcctgggcaacagagcgagattcgtctcaaaaaaag

SEQ ID NO: 343589 - DNA, 280 bp, Homo sapiens
gagcaagaacatattctgggaaagataaggcatattgcaactgcttattctgagacagatgctccaaatctcagaatttgctttctagtcttgtgtcctttttactgacatgttgtgccagactagaaggaaaggaatgaaaataaatgtgggtttgggggaaggggaggcatggaggaaggcctacgtaggccaatttgtccatgcgcctggttgctgcatcatgctgcctagctggtttgtgctccagagcttgtacctgtggaaaagtaggtaccga

SEQ ID NO: 343590 - DNA, 866 bp, Homo sapiens
ctgaccagcaccatggcggttggcaagaacaagcgccttacgaaaggcggcaaaaagggagccaagaagaaagtggttgatccattttctaagaaagattggtatgatgtgaaagcacctgctatgttcaatataagaaatattggaaagacgctcgtcaccaggacccaaggaaccaaaattgcatctgatggtctcaagggtcgtgtgtttgaagtgagtcttgctgatttgcagaatgatgaagttgcatttagaaaattcaagctgattactgaagatgttcagggtaaaaactgcctgactaacttccatggcatggatcttacccgtgacaaaatgtgttccatggtcaaaaaatggcagacaatgattgaagctcacgttgatgtcaagactaccgatggttacttgcttcgtctgttctgtgttggttttactaaaaaacgcaacaatcagatacggaagacctcttatgctcagcaccaacaggtccgccaaatccggaagaagatgatggaaatcatgacccgagaggtgcagacaaatgacttgaaagaagtggtcaataaattgattccagacagcattggaaaagacatagaaaaggcttgccaatctatttatcctctccatgatgtcttcgttagaaaagtaaaaatgctgaagaagcccaagtttgaattgggaaagctcatggagcttcatggtgaaggcagtagttctggaaaagccactggggacgagacaggtgctaaagttgaacgagctgatggttatgaaccaccagtccaagaatctgtttaaagttcagacttcaatagtgggaataaaagtgctttgtgcaaaaaaaaaaacaaaaaaaa

SEQ ID NO: 343591 - DNA, 1190 bp, Homo sapiens
  misc_feature (183)..(185): n is a, c, g, or t
  misc_feature (512)..(512): n is a, c, g, or t
  misc_feature (557)..(557): n is a, c, g, or t
  misc_feature (692)..(693): n is a, c, g, or t
  misc_feature (744)..(744): n is a, c, g, or t
  misc_feature (759)..(759): n is a, c, g, or t
  misc_feature (765)..(765): n is a, c, g, or t
  misc_feature (768)..(768): n is a, c, g, or t
  misc_feature (838)..(838): n is a, c, g, or t
ctgaccagcaccatggcggttggcaagaacaagcgccttacgaaaggcggcaaaaagggagccaagaagaaagtggttgatccattttctaagaaagattggtatgatgtgaaagcacctgctatgttcaatataaggaagatagtgtggaataggaccgcatcggtcaacctagcgcacccnnnaaggaagaccaaacatgttgccattctagatgagtcatctaaggagctcgtcgtgctattcgataggtggagatcattgccatgactattcgtccaaggacattgggactgggataggattttggccattatcaggaacagatagttactacacgccattgcagtatgacttgggatatggattcgtttcctatggggcttagacacacatcgttggctcctgtaaactaaaatcgtgtgcgcgatcgcgcctatttgcgtagttcatttaactcccggtgggagcaaaacagagtcgatggtatcctcgagtggagcttgctacantaaaaatactcgaggccagggaacgagaattcgccatttgtcganaacacgaccttcgatccggttctcggtaatcggatccaacaaggaacttgtaacaccgtaactggcgatatgaacctttagacctgttccgctacctgatgtcctagatggctgtgggtgggttttagcttaatnnacagagaacgcccaaatcaaatccagtgataaaccgcgataagcaaccctncgtataattgcgctncaggtncanccagaagcaggtggtcacggcgcatacacatgcgcggtacacgtaacgattcgactcggacatacgtcanttggagcccagaggatgcgatgcaagaagccaaatgacttgaaagaagtggtcaataaattgattccagacagcattggaaaagacatagaaaaggcttgccaatctatttatcctctccatgatgtcttcgttagaaaagtaaaaatgctgaagaagcccaagtttgaattgggaaagctcatggagcttcatggtgaaggcagtagttctggaaaagccactggggacgagacaggtgctaaagttgaacgagctgatggttatgaaccaccagtccaagaatctgtttaaagttcagacttcaatagtgggaataaaagtgctttgtgcaaaaaaaaaaacaaaaaaaa

SEQ ID NO: 343592 - DNA, 489 bp, Homo sapiens
tcttgggttttccctgcctctgtttcccatatcttcctcttctgtgcctcatcctaccttccctgttctgtgactagtactgcttccagaaactgcagaagagactgggctggatttcctaatctaagtcaaagatttggaggcgcagagtctaggcccaggacaacaaacagtttccttcttgcatgccagctctcaacagtggtaaaggaggccaggagtgctaagctgaaagggtttctaggctccaccaacaagagtgctgggattgattatcaatgtctgctcttgtctagggactggtgaacaggaacaccaaagttactgcctggccacactccatctcggcaggtgattcccagactggaataagcacaggaatcactggggatcttagtaagatgcagattctggtccagttgggctgagattctgtagttctggtctgataagcccttaggtgacatggatgctgctggtctcaggacc

SEQ ID NO: 343593 - DNA, 554 bp, Homo sapiens
tcatttcaagcagaggattaacaaataattgctatgatgatacgcattgccatcctccaaaaacttccatttaacccttttttctatcataattacctaatattaacaaatcttaagcattgaaggttttcctaagtcatatttttatctactcttgaatttattaattagaaattctattcacggttactttgattaaaaaaagtttttttacttaaaaaaatgctgaaataatgctttctctttatgtcacattattgaaaataaatcttgtttacaatcagaatttaattttagttttggcagatttcttcagtttccaaggtaagactttttttttttttcgggttggggagggggggggggaaatctaagtgggggcccggtccacccgggaaacagactggcgcgggccaagatggtatcaaagaggtctctccgggtggaaatagctataattgtgtccccttatccagactggcgtgtacctagctcttcggtccccagggtggacttgggcctgggatgacatcggttccattggtacactgaaa

SEQ ID NO: 343594 - DNA, 3699 bp, Homo sapiens
tggcaactggagcaatcagagcaccgcagccagggagatgctggcgagacgacagcgagatcctctccaggccctgcggcgccgcaatcaggagctgaagcaacaggttgatagtttgctttctgagagccaactgaaagaagctctagaacccaataaaagacaacatatttatcaaagatgtatccagttaaagcaggcaatagatgaaaataaaaatgctcttcaaaaattaagcaaagctgatgaatctgcacctgttgcaaactataatcagagaaaagaagaggagcatactcttttggacaagcttacccaacaactgcagggccttgctgtgacaataagcagagaaaatataactgaagttggggcacctactgaagaagaggaagaaagtgaaagtgaagatagtgaagacagtggtggggaggaagaagatgcagaggaggaagaggaagagaaagaggaaaatgaatctcacaaatggtcaaccggtgaagaatacatcgctgttggagattttactgctcagcaagttggagatcttacatttaagaaaggggaaattctccttgtaattgaaaaaaaacctgatggttggtggatagctaaggatgccaaaggaaatgaaggtcttgttcccagaacctacctagagccttatagtgaagaagaagaaggccaagagtcaagtgaagagggcagtgaagaagatgtagaggcggtggatgaaacagcagatggagcagaagttaagcaaagaactgatccccactggagtgctgttcagaaagcgatttcagaggcgggcatcttctgtcttgttaatcatgtctcgttttgctacctaatagttctgatgcgaaataggatggagactgtggaagacaccaatggatctgaaacagggttcagggcatggaatgtacagagcagaggacgtatatttctggtttctaagcctgtgctccaaaataaacactgttgatgtgttaactacgatgggagctattcctgcagggttcaggccttccacgctctcacagcttctggaggaagggaatcaatttcgagcaaattacttcttacaaccagagctcatgccttcacaactggccttcagagatctgatgtgggatgctacagaaggcactattaggtcgagaccaagtcgtatttcattgattctgacattatggagctgtaaaatgattcctcttccaggaatgagcatacaggttctcagcagacatgtacgcctctgtctatttgatggtaataaggttctgagcaacattcatacagtcagagccacatggcaacctaaaaagcccaaaacatggaccttttctccccaggttactcgcatcttaccatgtttgcttgatggtgattgctttatcaggtctaattctgcatctccagatcttggaatattatttgaacttggaatttcttatattcgcaattcaactggtgaaagaggagagttaagctgtggctgggtgtttcttaaactttttgatgccagtggagttcctattccagcaaaaacttatgagcttttcttgaatggtggtactccttatgaaaaaggtattgaagtggacccttcaatatccagaagagcacacggcagtgttttctaccagattatgacaatgagaaggcagcctcaacttctagtgaaactgagatccttgaacagaagatcaagaaatgtactaagtctactgccagaaacattaattggaaatatgtgttctattcacttgttgatattttatcgacaaattcttggagatgtgctcctgaaagacaggatgagcttgcaaagtactgatttaattagccatcccatgctggccaccttccccatgctcttggagcagcctgatgtgatggatgctctcaggagttcgtgggctggaaaagaaagcacattaaaaagatcagagaagagagacaaagagttcctgaagtccacgtttctcctggtttaccatgactgcgtgctcccacttctccactccacacgcctacccccattcaggtgggcagaagaagagactgagactgcacggtggaaagttatcactgacttccttaagcaaaaccaagaaaaccagggcgccctccaagctctgctgtcaccagacggagttcatgaaccttttgacctttcagagcagacctatgacttcttgggtgaaatgagaaagaatgcagtgtgacagtggcagcctctagccctcagcttcccacggaatcagatggatcctccacgattacgtgaataaaatgatggaaccaaaaatcactgtcactttacaacttaggttttactcttttctttctacagaccatatttttaaagaaatgtttatacaataatttaaatattttttaaaaccataaaataaatttttataaggaatactgttatatctaaatttaaacagtatttattttttcaaaaacagctacttaagttaatggtatagatttctataaaagcaagattttgtcaaaaactaaatttatgattattcaagaaagtgaaaaaaacaacctacagaatgggaaaacatatttgcaaatcatctaactgataaaggtctagtatccaaaatatttaaatttatgagtgttaataaaatttatcttgttcaatgaagaggaagttaaagtgatccatttgagaaagttgtatcacttaattcagtctgatacttgaatgtgatttacccctaattaagtacaaaaacagagtcgcttttgccttttcaaatcaagaaaataagtgctctgtcaaaagcacaaaaagaaactttcaggcactggagagtggagtcgactcaccctttcaggccttgttgcatctcagataaacctgtgactgctggtaaaataatgtcccaagcctttccttttagtgataaacagtagcagcctgcgttaattgagcacctactgtgtgtctgagcatttctcattagcccagttaatcctcacacctactgtaggagataggtactgttgttttttattaccgccgaagaaacaggccagataagtgaagtaatttgcctaaggtcacagctaataagtggcacagctaatattcccagtaaagataccatgtataattttctacaacctaagatgttctgccttatcggggcgaaccttttaggattccatgtgaaaataaaatatgaggaaaagtttaacctaaataattagaatcccattagaggtacttttttttgatggcatgctgccttaaaagagccatttatttttagagatctgtcatattatgaaagttctgggctatcttagctaacttatcctaaacccttaacctaaatttaacttgagccccagtctcagaaattaacatggtatgaaagtgtttccaggccaggcgcggtggctcacgcctgtaatcccaacactttgggaggccgaggtgggtggatcacctgaggtcaggagtttgagaccagcctggccaacactatctgtactaaaaacacaaaattagctgggtgtggtagtgcgtgcctgtgatcccagctacttgggaggctgaggtagaagaattgtttgaacctgggaggtggaggttgcagtgagccaagatcgtgccattgcactccagcctaggcaacaagagtgaaactccatctc

SEQ ID NO: 343595 - DNA, 3345 bp, Homo sapiens
tggcaactggagcaatcagagcaccgcagccagggagatgctggcgagacgacagcgagatcctctccaggccctgcggcgccgcaatcaggagctgaagcaacaggttgatagtttgctttctgagagccaactgaaagaagctctagaacccaataaaagacaacatatttatcaaagagttggggcacctactgaagaagaggaagaaagtgaaagtgaagatagtgaagacagtggtggggaggaagaagatgcagaggaggaagaggaagagaaagaggaaaatgaatctcacaaatggtcaaccggtgaagaatacatcgctgttggagattttactgctcagcaagttggagatcttacatttaagaaaggggaaattctccttgtaattgaaaaaaaacctgatggttggtggatagctaaggatgccaaaggaaatgaaggtcttgttcccagaacctacctagagccttatagtgaagaagaagaaggccaagagtcaagtgaagagggcagtgaagaagatgtagaggcggtggatgaaacagcagatggagcagaagttaagcaaagaactgatccccactggagtgctgttcagaaagcgatttcagagaataaacactgttgatgtgttaactacgatgggagctattcctgcagggttcaggccttccacgctctcacagcttctggaggaagggaatcaatttcgagcaaattacttcttacaaccagagctcatgccttcacaactggccttcagagatctgatgtgggatgctacagaaggcactattaggtcgagaccaagtcgtatttcattgattctgacattatggagctgtaaaatgattcctcttccaggaatgagcatacaggttctcagcagacatgtacgcctctgtctatttgatggtaataaggttctgagcaacattcatacagtcagagccacatggcaacctaaaaagcccaaaacatggaccttttctccccaggttactcgcatcttaccatgtttgcttgatggtgattgctttatcaggtctaattctgcatctccagatcttggaatattatttgaacttggaatttcttatattcgcaattcaactggtgaaagaggagagttaagctgtggctgggtgtttcttaaactttttgatgccagtggagttcctattccagcaaaaacttatgagcttttcttgaatggtggtactccttatgaaaaaggtattgaagtggacccttcaatatccagaagagcacacggcagtgttttctaccagattatgacaatgagaaggcagcctcaacttctagtgaaactgagatccttgaacagaagatcaagaaatgtactaagtctactgccagaaacattaattggaaatatgtgttctattcacttgttgatattttatcgacaaattcttggagatgtgctcctgaaagacaggatgagcttgcaaagtactgatttaattagccatcccatgctggccaccttccccatgctcttggagcagcctgatgtgatggatgctctcaggagttcgtgggctggaaaagaaagcacattaaaaagatcagagaagagagacaaagagttcctgaagtccacgtttctcctggtttaccatgactgcgtgctcccacttctccactccacacgcctacccccattcaggtgggcagaagaagagactgagactgcacggtggaaagttatcactgacttccttaagcaaaaccaagaaaaccagggcgccctccaagctctgctgtcaccagacggagttcatgaaccttttgacctttcagagcagacctatgacttcttgggtgaaatgagaaagaatgcagtgtgacagtggcagcctctagccctcagcttcccacggaatcagatggatcctccacgattacgtgaataaaatgatggaaccaaaaatcactgtcactttacaacttaggttttactcttttctttctacagaccatatttttaaagaaatgtttatacaataatttaaatattttttaaaaccataaaataaatttttataaggaatactgttatatctaaatttaaacagtatttattttttcaaaaacagctacttaagttaatggtatagatttctataaaagcaagattttgtcaaaaactaaatttatgattattcaagaaagtgaaaaaaacaacctacagaatgggaaaacatatttgcaaatcatctaactgataaaggtctagtatccaaaatatttaaatttatgagtgttaataaaatttatcttgttcaatgaagaggaagttaaagtgatccatttgagaaagttgtatcacttaattcagtctgatacttgaatgtgatttacccctaattaagtacaaaaacagagtcgcttttgccttttcaaatcaagaaaataagtgctctgtcaaaagcacaaaaagaaactttcaggcactggagagtggagtcgactcaccctttcaggccttgttgcatctcagataaacctgtgactgctggtaaaataatgtcccaagcctttccttttagtgataaacagtagcagcctgcgttaattgagcacctactgtgtgtctgagcatttctcattagcccagttaatcctcacacctactgtaggagataggtactgttgttttttattaccgccgaagaaacaggccagataagtgaagtaatttgcctaaggtcacagctaataagtggcacagctaatattcccagtaaagataccatgtataattttctacaacctaagatgttctgccttatcggggcgaaccttttaggattccatgtgaaaataaaatatgaggaaaagtttaacctaaataattagaatcccattagaggtacttttttttgatggcatgctgccttaaaagagccatttatttttagagatctgtcatattatgaaagttctgggctatcttagctaacttatcctaaacccttaacctaaatttaacttgagccccagtctcagaaattaacatggtatgaaagtgtttccaggccaggcgcggtggctcacgcctgtaatcccaacactttgggaggccgaggtgggtggatcacctgaggtcaggagtttgagaccagcctggccaacactatctgtactaaaaacacaaaattagctgggtgtggtagtgcgtgcctgtgatcccagctacttgggaggctgaggtagaagaattgtttgaacctgggaggtggaggttgcagtgagccaagatcgtgccattgcactccagcctaggcaacaagagtgaaactccatctc

SEQ ID NO: 343596 - DNA, 2894 bp, Homo sapiens
gagattttattctctaatagtacccgcttatcatttgagaccaagagaatatctgtcttcattcaaacagacaaggccttatacaagccaaagcaagaagtgaagtttcgcattgttacactcttctcagattttaagccttacaaaacctctttaaacattctcattaagaataaacactgttgatgtgttaactacgatgggagctattcctgcagggttcaggccttccacgctctcacagcttctggaggaagggaatcaatttcgagcaaattacttcttacaaccagagctcatgccttcacaactggccttcagagatctgatgtgggatgctacagaaggcactattaggtcgagaccaagtcgtatttcattgattctgacattatggagctgtaaaatgattcctcttccaggaatgagcatacaggttctcagcagacatgtacgcctctgtctatttgatggtaataaggttctgagcaacattcatacagtcagagccacatggcaacctaaaaagcccaaaacatggaccttttctccccaggttactcgcatcttaccatgtttgcttgatggtgattgctttatcaggtctaattctgcatctccagatcttggaatattatttgaacttggaatttcttatattcgcaattcaactggtgaaagaggagagttaagctgtggctgggtgtttcttaaactttttgatgccagtggagttcctattccagcaaaaacttatgagcttttcttgaatggtggtactccttatgaaaaaggtattgaagtggacccttcaatatccagaagagcacacggcagtgttttctaccagattatgacaatgagaaggcagcctcaacttctagtgaaactgagatccttgaacagaagatcaagaaatgtactaagtctactgccagaaacattaattggaaatatgtgttctattcacttgttgatattttatcgacaaattcttggagatgtgctcctgaaagacaggatgagcttgcaaagtactgatttaattagccatcccatgctggccaccttccccatgctcttggagcagcctgatgtgatggatgctctcaggagttcgtgggctggaaaagaaagcacattaaaaagatcagagaagagagacaaagagttcctgaagtccacgtttctcctggtttaccatgactgcgtgctcccacttctccactccacacgcctacccccattcaggtgggcagaagaagagactgagactgcacggtggaaagttatcactgacttccttaagcaaaaccaagaaaaccagggcgccctccaagctctgctgtcaccagacggagttcatgaaccttttgacctttcagagcagacctatgacttcttgggtgaaatgagaaagaatgcagtgtgacagtggcagcctctagccctcagcttcccacggaatcagatggatcctccacgattacgtgaataaaatgatggaaccaaaaatcactgtcactttacaacttaggttttactcttttctttctacagaccatatttttaaagaaatgtttatacaataatttaaatattttttaaaaccataaaataaatttttataaggaatactgttatatctaaatttaaacagtatttattttttcaaaaacagctacttaagttaatggtatagatttctataaaagcaagattttgtcaaaaactaaatttatgattattcaagaaagtgaaaaaaacaacctacagaatgggaaaacatatttgcaaatcatctaactgataaaggtctagtatccaaaatatttaaatttatgagtgttaataaaatttatcttgttcaatgaagaggaagttaaagtgatccatttgagaaagttgtatcacttaattcagtctgatacttgaatgtgatttacccctaattaagtacaaaaacagagtcgcttttgccttttcaaatcaagaaaataagtgctctgtcaaaagcacaaaaagaaactttcaggcactggagagtggagtcgactcaccctttcaggccttgttgcatctcagataaacctgtgactgctggtaaaataatgtcccaagcctttccttttagtgataaacagtagcagcctgcgttaattgagcacctactgtgtgtctgagcatttctcattagcccagttaatcctcacacctactgtaggagataggtactgttgttttttattaccgccgaagaaacaggccagataagtgaagtaatttgcctaaggtcacagctaataagtggcacagctaatattcccagtaaagataccatgtataattttctacaacctaagatgttctgccttatcggggcgaaccttttaggattccatgtgaaaataaaatatgaggaaaagtttaacctaaataattagaatcccattagaggtacttttttttgatggcatgctgccttaaaagagccatttatttttagagatctgtcatattatgaaagttctgggctatcttagctaacttatcctaaacccttaacctaaatttaacttgagccccagtctcagaaattaacatggtatgaaagtgtttccaggccaggcgcggtggctcacgcctgtaatcccaacactttgggaggccgaggtgggtggatcacctgaggtcaggagtttgagaccagcctggccaacactatctgtactaaaaacacaaaattagctgggtgtggtagtgcgtgcctgtgatcccagctacttgggaggctgaggtagaagaattgtttgaacctgggaggtggaggttgcagtgagccaagatcgtgccattgcactccagcctaggcaacaagagtgaaactccatctc

SEQ ID NO: 343597 - DNA, 2316 bp, Homo sapiens
tggcaactggagcaatcagagcaccgcagccagggagatgctggcgagacgacagcgagatcctctccaggccctgcggcgccgcaatcaggagctgaagcaacaggttgatagtttgctttctgagagccaactgaaagaagctctagaacccaataaaagacaacatatttatcaaagatgtatccagttaaagcaggcaatagatgaaaataaaaatgctcttcaaaaattaagcaaagctgatgaatctgcacctgttgcaaactataatcagagaaaagaagaggagcatactcttttggacaagcttacccaacaactgcagggccttgctgtgacaataagcagagaaaatataactgaagttggggcacctactgaagaagaggaagaaagtgaaagtgaagatagtgaagacagtggtggggaggaagaagatgcagaggaggaagaggaagagaaagaggaaaatgaatctcacaaatggtcaaccggtgaagaatacatcgctgttggagattttactgctcagcaagttggagatcttacatttaagaaaggggaaattctccttgtaattgaaaaaaaacctgatggttggtggatagctaaggatgccaaaggaaatgaaggtcttgttcccagaacctacctagagccttatagtgaagaagaagaaggccaagagtcaagtgaagagggcagtgaagaagatgtagaggcggtggatgaaacagcagatggagcagaagttaagcaaagaactgatccccactggagtgctgttcagaaagcgatttcagaggcgggcatcttctgtcttgttaatcatgtctcgttttgctacctaatagttctgatgcgaaataggatggagactgtggaagacaccaatggatctgaaacagggttcagggcatggaatgtacagagcagaggacgtatatttctggtttctaagcctgtgctccaaaataaacactgttgatgtgttaactacgatgggagctattcctgcagggttcaggccttccacgctctcacagcttctggaggaagggaatcaatttcgagcaaattacttcttacaaccagagctcatgccttcacaactggccttcagagatctgatgtgggatgctacagaaggcactattaggtcgagaccaagtcgtatttcattgattctgacattatggagctgtaaaatgattcctcttccaggaatgagcatacaggttctcagcagacatgtacgcctctgtctatttgatggtaataaggttctgagcaacattcatacagtcagagccacatggcaacctaaaaagcccaaaacatggaccttttctccccaggttactcgcatcttaccatgtttgcttgatggtgattgctttatcaggtctaattctgcatctccagatcttggaatattatttgaacttggaatttcttatattcgcaattcaactggtgaaagaggagagttaagctgtggctgggtgtttcttaaactttttgatgccagtggagttcctattccagcaaaaacttatgagcttttcttgaatggtggtactccttatgaaaaaggtattgaagtggacccttcaatatccagaagagcacacggcagtgttttctaccagattatgacaatgagaaggcagcctcaacttctagtgaaactgagatccttgaacagaagatcaagaaatgtactaagtctactgccagaaacattaattggaaatatgtgttctattcacttgttgatattttatcgacaaattcttggagatgtgctcctgaaagacaggatgagcttgcaaagtactgatttaattagccatcccatgctggccaccttccccatgctcttggagcagcctgatgtgatggatgctctcaggagttcgtgggctggaaaagaaagcacattaaaaagatcagagaagagagacaaagagttcctgaagtccacgtttctcctggtttaccatgactgcgtgctcccacttctccactccacacgcctacccccattcaggtgggcagaagaagagactgagactgcacggtggaaagttatcactgacttccttaagcaaaaccaagaaaaccagggcgccctccaagctctgctgtcaccagacggagttcatgaaccttttgacctttcagagcagacctatgacttcttgggtgaaatgagaaagaatgcagtgtgacagtggcagcctctagccctcagcttcccacggaatcagatggatcctccacgattacgtgaataaaatgatggaacca

SEQ ID NO: 343598 - DNA, 2202 bp, Homo sapiens
tggcaactggagcaatcagagcaccgcagccagggagatgctggcgagacgacagcgagatcctctccaggccctgcggcgccgcaatcaggagctgaagcaacaggttgatagtttgctttctgagagccaactgaaagaagctctagaacccaataaaagacaacatatttatcaaagatgtatccagttaaagcaggcaatagatgaaaataaaaatgctcttcaaaaattaagcaaagctgatgaatctgcacctgttgcaaactataatcagagaaaagaagaggagcatactcttttggacaagcttacccaacaactgcagggccttgctgtgacaataagcagagaaaatataactgaagttggggcacctactgaagaagaggaagaaagtgaaagtgaagatagtgaagacagtggtggggaggaagaagatgcagaggaggaagaggaagagaaagaggaaaatgaatctcacaaatggtcaaccggtgaagaatacatcgctgttggagattttactgctcagcaagttggagatcttacatttaagaaaggggaaattctccttgtaattgaaaaaaaacctgatggttggtggatagctaaggatgccaaaggaaatgaaggtcttgttcccagaacctacctagagccttatagtgaagaagaagaaggccaagagtcaagtgaagagggcagtgaagaagatgtagaggcggtggatgaaacagcagatggagcagaagttaagcaaagaactgatccccactggagtgctgttcagaaagcgatttcagaggcgggcatcttctgtcttgttaatcatgtctcgttttgctacctaatagttctgatgcgaaataggatggagactgtggaagacaccaatggatctgaaacagggttcagggcatggaatgtacagagcagaggacgtatatttctggtttctaagcctgtgctccaaaataaacactgttgatgtgttaactacgatgggagctattcctgcagggttcaggccttccacgctctcacagcttctggaggaagggaatcaatttcgagcaaattacttcttacaaccagagctcatgccttcacaactggccttcagagatctgatgtgggatgctacagaaggcactattaggtcgagaccaagtcgtatttcattgattctgacattatggagctgtaaaatgattcctcttccaggaatgagcatacaggttctcagcagacatgtacgcctctgtctatttgatggtaataaggttctgagcaacattcatacagtcagagccacatggcaacctaaaaagcccaaaacatggaccttttctccccaggttactcgcatcttaccatgtttgcttgatggtgattgctttatcaggtctaattctgcatctccagatcttggaatattatttgaacttggaatttcttatattcgcaattcaactggtgaaagaggagagttaagctgtggctgggtgtttcttaaactttttgatgccagtggagttcctattccagcaaaaacttatgagcttttcttgaatggtggtactccttatgaaaaaggtattgaagtggacccttcaatatccagaagagcacacggcagtgttttctaccagattatgacaatgagaaggcagcctcaacttctagtgaaactgagatccttgaacagaagatcaagaaatgtactaagtctactgccagaaacattaattggaaatatgtgttctattcacttgttgatattttatcgacaaattcttggagatgtgctcctgaaagacaggatgagcttgcaaagtactgatttaattagccatcccatgctggccaccttccccatgctcttggagcagcctgatgtgatggatgctctcaggagttcgtgggctggaaaagaaagcacattaaaaagatcagagaaggtaaaatatgagtctccacactgaactccatatttgcagtacctggtgtttgcttgcctattctaatcatgtctcttttttagcaaaagtagccatagtcataatccctcttaaccagggaaactgtttcattatggctgcaaaaacacattccaagagggttacgcatgatcgttagctaatgtgagaaggaatacttgttcaagacagccatttcagattactgagttttatttaa

SEQ ID NO: 343599 - DNA, 1501 bp, Homo sapiens
tggcaactggagcaatcagagcaccgcagccagggagatgctggcgagacgacagcgagatcctctccaggccctgcggcgccgcaatcaggagctgaagcaacaggttgatagtttgctttctgagagccaactgaaagaagctctagaacccaataaaagacaacatatttatcaaagatgtatccagttaaagcaggcaatagatgaaaataaaaatgctcttcaaaaattaagcaaagctgatgaatctgcacctgttgcaaactataatcagagaaaagaagaggagcatactcttttggacaagcttacccaacaactgcagggccttgctgtgacaataagcagagaaaatataactgaagttggggcacctactgaagaagaggaagaaagtgaaagtgaagatagtgaagacagtggtggggaggaagaagatgcagaggaggaagaggaagagaaagaggaaaatgaatctcacaaatggtcaaccggtgaagaatacatcgctgttggagattttactgctcagcaagttggagatcttacatttaagaaaggggaaattctccttgtaattgaaaaaaaacctgatggttggtggatagctaaggatgccaaaggaaatgaaggtcttgttcccagaacctacctagagccttatagtgaagaagaagaaggccaagagtcaagtgaagagggcagtgaagaagatgtagaggcggtggatgaaacagcagatggagcagaagttaagcaaagaactgatccccactggagtgctgttcagaaagcgatttcagaggcgggcatcttctgtcttgttaatcatgtctcgttttgctacctaatagttctgatgcgaaataggatggagactgtggaagacaccaatggatctgaaacagggttcagggcatggaatgtacagagcagaggacgtatatttctggtttctaagcctgtgctccaaaataaacactgttgatgtgttaactacgatgggagctattcctgcagggttcaggccttccacgctctcacagcttctggaggaagggaatcaatttcgagcaaattacttcttacaaccagagctcatgccttcacaactggccttcagagatctgatgtgggatgctacagaaggcactattaggtcgagaccaagtcgtatttcattgattctgacattatggagctgtaaaatgattcctcttccaggaatgagcatacaggttctcagcagacatgtacgcctctgtctatttgatggtaataaggtaaggttactgagaagtaaatcaattcatactaggattatggagaaacattcccttagattcttttccattcaactcctccccaattcccaagagagtattttttacctagtaccaaagaaaaatttgaatgactctttgaaaaattcattttttaaatgagatacaggttaaacagtacttagatggaaatttatagttttaattgtgtatat

SEQ ID NO: 343600 - DNA, 758 bp, Homo sapiens
agaacacctgctacaattatcttagataacatgacagttacctctgatatgctgtcagtaagtaggttcagctgacttggcattgttttagttatatttacccctaaccacactggtgtcaccaaaattagactgcaataccttgacagaatgtgtgagacaccctccatggagcttaggagacaccctggtctcatggagccacgtagaggctctcagggagaactgctccactgtactctgtgtaactctgctcacttccacttctgaagtgccatgtcctgcctgagcagctggctcagagccgatacctgccaggcactaatggcaccctccatcctacctcttaggtggcttttagttaatagagttcacagaatttaacactttaaaaataacaatgttatttgtgggggtggtgttttcccagagagacaaagagttcctgaagtccacgtttctcctggtttaccatgactgcgtgctcccacttctccactccacacgcctacccccattcaggtgggcagaagaagagactgagactgcacggtggaaagttatcactgacttccttaagcaaaaccaagaaaaccagggcgccctccaagctctgctgtcaccagacggagttcatgaaccttttgacctttcagagcagacctatgacttcttgggtgaaatgagaaagaatgcagtgtgacagtggcagcctctagccctcagcttcccacggaatcagatggatcctccacgat

SEQ ID NO: 343601 - DNA, 526 bp, Homo sapiens
aatttacctaaaatgactgatttaattttcaatgaacagagtattgaaacttttattgtatatgtgtaaattttttcttttttaaaaattctgtatacattttcataagccgaattcacaaaagacagatttgtgttagaaatcataaaaataaacttttttataactaatttttctttcagattaggtcgagaccaagtcgtatttcattgattctgacattatggagctgtaaaatgattcctcttccaggaatgagcatacaggttctcagcagacatgtacgcctctgtctatttgatggtaataaggtaaggttactgagaagtaaatcaattcatactaggattatggagaaacattcccttagattcttttccattcaactcctccccaattcccaagagagtattttttacctagtaccaaagaaaaatttgaatgactctttgaaaaattcattttttaaatgagatacaggttaaacagtacttagatggaaatttatagttttaattgtgtatat

SEQ ID NO: 343602 - DNA, 861 bp, Homo sapiens
  misc_feature (759)..(760): n is a, c, g, or t
  misc_feature (764)..(764): n is a, c, g, or t
  misc_feature (769)..(769): n is a, c, g, or t
  misc_feature (775)..(775): n is a, c, g, or t
  misc_feature (778)..(778): n is a, c, g, or t
  misc_feature (787)..(787): n is a, c, g, or t
  misc_feature (799)..(800): n is a, c, g, or t
  misc_feature (805)..(805): n is a, c, g, or t
  misc_feature (807)..(807): n is a, c, g, or t
  misc_feature (810)..(810): n is a, c, g, or t
  misc_feature (812)..(813): n is a, c, g, or t
tggcaactggagcaatcagagcaccgcagccagggagatgctggcgagacgacagcgagatcctctccaggccctgcggcgccgcaatcaggagctgaagcaacaggttgatagtttgctttctgagagccaactgaaagaagctctagaacccaataaaagacaacatatttatcaaagatgtatccagttaaagcaggcaatagatgaaaataaaaatgctcttcaaaaattaagcaaagctgatgaatctgcacctgttgcaaactataatcagagaaaagaagaggagcatactcttttggacaagcttacccaacaactgcagggccttgctgtgacaataagcagagaaaatataactgagtatgcttcctttctacctttcttttttcttttttaaagatatatcaccaatagctttaatgtttaactcaaagacatatagcagtatagatataaacaaatgacactaacaatagaatcagtcaacatttatttattgtgtataatagaaggtgttagatcccatgagagatggaaagaagtgtaagtcatagtctctgccctcaggcaatttataatttagttgaaacaaaacagagatctgaaaagctaaatgaacaaatgttagaaaataaagatgatatatttaatgtcaatgttgatgtgtaaaagggaaatgatttggaatgtctacttgcattgttctccctttcataaacattcttaaaattcaaaacaaaaaaaaaaaaattnngggngcggncggaanttntaacattgntggggcggcagnnagaangncangnncagaaccggggaagggggtttcaaaaaccggggcgggggaaaaggggg

SEQ ID NO: 343603 - DNA, 3804 bp, Homo sapiens
tggcaactggagcaatcagagcaccgcagccagggagatgctggcgagacgacagcgagatcctctccaggccctgcggcgccgcaatcaggagctgaagcaacaggttgatagtttgctttctgagagccaactgaaagaagctctagaacccaataaaagacaacatatttatcaaagatgtatccagttaaagcaggcaatagatgaaaataaaaatgctcttcaaaaattaagcaaagctgatgaatctgcacctgttgcaaactataatcagagaaaagaagaggagcatactcttttggacaagcttacccaacaactgcagggccttgctgtgacaataagcagagaaaatataactgaagttggggcacctactgaagaagaggaagaaagtgaaagtgaagatagtgaagacagtggtggggaggaagaagatgcagaggaggaagaggaagagaaagaggaaaatgaatctcacaaatggtcaaccggtgaagaatacatcgctgttggagattttactgctcagcaagttggagatcttacatttaagaaaggggaaattctccttgtaattgaaaaaaaacctgatggttggtggatagctaaggatgccaaaggaaatgaaggtcttgttcccagaacctacctagagccttatagtgaagaagaagaaggccaagagtcaagtgaagagggcagtgaagaagatgtagaggcggtggatgaaacagcagatggagcagaagttaagcaaagaactgatccccactggagtgctgttcagaaagcgatttcagaggcgggcatcttctgtcttgttaatcatgtctcgttttgctacctaatagttctgatgcgaaataggatggagactgtggaagacaccaatggatctgaaacagggttcagggcatggaatgtacagagcagaggacgtatatttctggtttctaagcctgtgctccaaaataaacactgttgatgtgttaactacgatgggagctattcctgcagggttcaggccttccacgctctcacagcttctggaggaagggaatcaatttcgagcaaattacttcttacaaccagagctcatgccttcacaactggccttcagagatctgatgtgggatgctacagaaggcactattaggtcgagaccaagtcgtatttcattgattctgacattatggagctgtaaaatgattcctcttccaggaatgagcatacaggttctcagcagacatgtacgcctctgtctatttgatggtaataaggttctgagcaacattcatacagtcagagccacatggcaacctaaaaagcccaaaacatggaccttttctccccaggttactcgcatcttaccatgtttgcttgatggtgattgctttatcaggtctaattctgcatctccagatcttggaatattatttgaacttggaatttcttatattcgcaattcaactggtgaaagaggagagttaagctgtggctgggtgtttcttaaactttttgatgccagtggagttcctattccagcaaaaacttatgagcttttcttgaatggtggtactccttatgaaaaaggtattgaagtggacccttcaatatccagaagagcacacggcagtgttttctaccagattatgacaatgagaaggcagcctcaacttctagtgaaactgagatccttgaacagaagatcaagaaatgtactaagtctactgccagaaacattaattggaaatatgtgttctattcacttgttgatattttatcgacaaattcttggagatgtgctcctgaaagacaggatgagcttgcaaagtactgatttaattagccatcccatgctggccaccttccccatgctcttggagcagcctgatgtgatggatgctctcaggagttcgtgggctggaaaagaaagcacattaaaaagatcagagaagctctcaaagcctgtatcaccaagagaagggaaaaaaaaatggcctgagctgtaccatatattgaaaacaatgcattgctcctgcttaccttgctataaaatcatgagagacaaagagttcctgaagtccacgtttctcctggtttaccatgactgcgtgctcccacttctccactccacacgcctacccccattcaggtgggcagaagaagagactgagactgcacggtggaaagttatcactgacttccttaagcaaaaccaagaaaaccagggcgccctccaagctctgctgtcaccagacggagttcatgaaccttttgacctttcagagcagacctatgacttcttgggtgaaatgagaaagaatgcagtgtgacagtggcagcctctagccctcagcttcccacggaatcagatggatcctccacgattacgtgaataaaatgatggaaccaaaaatcactgtcactttacaacttaggttttactcttttctttctacagaccatatttttaaagaaatgtttatacaataatttaaatattttttaaaaccataaaataaatttttataaggaatactgttatatctaaatttaaacagtatttattttttcaaaaacagctacttaagttaatggtatagatttctataaaagcaagattttgtcaaaaactaaatttatgattattcaagaaagtgaaaaaaacaacctacagaatgggaaaacatatttgcaaatcatctaactgataaaggtctagtatccaaaatatttaaatttatgagtgttaataaaatttatcttgttcaatgaagaggaagttaaagtgatccatttgagaaagttgtatcacttaattcagtctgatacttgaatgtgatttacccctaattaagtacaaaaacagagtcgcttttgccttttcaaatcaagaaaataagtgctctgtcaaaagcacaaaaagaaactttcaggcactggagagtggagtcgactcaccctttcaggccttgttgcatctcagataaacctgtgactgctggtaaaataatgtcccaagcctttccttttagtgataaacagtagcagcctgcgttaattgagcacctactgtgtgtctgagcatttctcattagcccagttaatcctcacacctactgtaggagataggtactgttgttttttattaccgccgaagaaacaggccagataagtgaagtaatttgcctaaggtcacagctaataagtggcacagctaatattcccagtaaagataccatgtataattttctacaacctaagatgttctgccttatcggggcgaaccttttaggattccatgtgaaaataaaatatgaggaaaagtttaacctaaataattagaatcccattagaggtacttttttttgatggcatgctgccttaaaagagccatttatttttagagatctgtcatattatgaaagttctgggctatcttagctaacttatcctaaacccttaacctaaatttaacttgagccccagtctcagaaattaacatggtatgaaagtgtttccaggccaggcgcggtggctcacgcctgtaatcccaacactttgggaggccgaggtgggtggatcacctgaggtcaggagtttgagaccagcctggccaacactatctgtactaaaaacacaaaattagctgggtgtggtagtgcgtgcctgtgatcccagctacttgggaggctgaggtagaagaattgtttgaacctgggaggtggaggttgcagtgagccaagatcgtgccattgcactccagcctaggcaacaagagtgaaactccatctc

SEQ ID NO: 343604 - DNA, 3834 bp, Homo sapiens
tggcaactggagcaatcagagcaccgcagccagggagatgctggcgagacgacagcgagatcctctccaggccctgcggcgccgcaatcaggagctgaagcaacaggttgatagtttgctttctgagagccaactgaaagaagctctagaacccaataaaagacaacatatttatcaaagatgtatccagttaaagcaggcaatagatgaaaataaaaatgctcttcaaaaattaagcaaagctgatgaatctgcacctgttgcaaactataatcagagaaaagaagaggagcatactcttttggacaagcttacccaacaactgcagggccttgctgtgacaataagcagagaaaatataactgaagttggggcacctactgaagaagaggaagaaagtgaaagtgaagatagtgaagacagtggtggggaggaagaagatgcagaggaggaagaggaagagaaagaggaaaatgaatctcacaaatggtcaaccggtgaagaatacatcgctgttggagattttactgctcagcaagttggagatcttacatttaagaaaggggaaattctccttgtaattgaaaaaaaacctgatggttggtggatagctaaggatgccaaaggaaatgaaggtcttgttcccagaacctacctagagccttatagtgaagaagaagaaggccaagagtcaagtgaagagggcagtgaagaagatgtagaggcggtggatgaaacagcagatggagcagaagttaagcaaagaactgatccccactggagtgctgttcagaaagcgatttcagaggcgggcatcttctgtcttgttaatcatgtctcgttttgctacctaatagttctgatgcgaaataggatggagactgtggaagacaccaatggatctgaaacagggttcagggcatggaatgtacagagcagaggacgtatatttctggtttctaagcctgtgctccaaaataaacactgttgatgtgttaactacgatgggagctattcctgcagggttcaggccttccacgctctcacagcttctggaggaagggaatcaatttcgagcaaattacttcttacaaccagagctcatgccttcacaactggccttcagagatctgatgtgggatgctacagaaggcactattaggtcgagaccaagtcgtatttcattgattctgacattatggagctgtaaaatgattcctcttccaggaatgagcatacaggttctcagcagacatgtacgcctctgtctatttgatggtaataaggttctgagcaacattcatacagtcagagccacatggcaacctaaaaagcccaaaacatggaccttttctccccaggttactcgcatcttaccatgtttgcttgatggtgattgctttatcaggtctaattctgcatctccagatcttggaatattatttgaacttggaatttcttatattcgcaattcaactggtgaaagaggagagttaagctgtggctgggtgtttcttaaactttttgatgccagtggagttcctattccagcaaaaacttatgagcttttcttgaatggtggtactccttatgaaaaaggtattgaagtggacccttcaatatccagaagagcacacggcagtgttttctaccagattatgacaatgagaaggcagcctcaacttctagtgaaactgagatccttgaacagaagatcaagaaatgtactaagtctactgccagaaacattaattggaaatatgtgttctattcacttgttgatattttatcgacaaattcttggagatgtgctcctgaaagacaggatgagcttgcaaagtactgatttaattagccatcccatgctggccaccttccccatgctcttggagcagcctgatgtgatggatgctctcaggagttcgtgggctggaaaagaaagcacattaaaaagatcagagaagctctcaaagcctgtatcaccaagagaagggaaaaaaaaatggcctgagctgtaccatatattgaaaacaatgcattgctcctgcttaccttgctataaaatcatggtaattaccaatccgaacttgctttaatcgagagacaaagagttcctgaagtccacgtttctcctggtttaccatgactgcgtgctcccacttctccactccacacgcctacccccattcaggtgggcagaagaagagactgagactgcacggtggaaagttatcactgacttccttaagcaaaaccaagaaaaccagggcgccctccaagctctgctgtcaccagacggagttcatgaaccttttgacctttcagagcagacctatgacttcttgggtgaaatgagaaagaatgcagtgtgacagtggcagcctctagccctcagcttcccacggaatcagatggatcctccacgattacgtgaataaaatgatggaaccaaaaatcactgtcactttacaacttaggttttactcttttctttctacagaccatatttttaaagaaatgtttatacaataatttaaatattttttaaaaccataaaataaatttttataaggaatactgttatatctaaatttaaacagtatttattttttcaaaaacagctacttaagttaatggtatagatttctataaaagcaagattttgtcaaaaactaaatttatgattattcaagaaagtgaaaaaaacaacctacagaatgggaaaacatatttgcaaatcatctaactgataaaggtctagtatccaaaatatttaaatttatgagtgttaataaaatttatcttgttcaatgaagaggaagttaaagtgatccatttgagaaagttgtatcacttaattcagtctgatacttgaatgtgatttacccctaattaagtacaaaaacagagtcgcttttgccttttcaaatcaagaaaataagtgctctgtcaaaagcacaaaaagaaactttcaggcactggagagtggagtcgactcaccctttcaggccttgttgcatctcagataaacctgtgactgctggtaaaataatgtcccaagcctttccttttagtgataaacagtagcagcctgcgttaattgagcacctactgtgtgtctgagcatttctcattagcccagttaatcctcacacctactgtaggagataggtactgttgttttttattaccgccgaagaaacaggccagataagtgaagtaatttgcctaaggtcacagctaataagtggcacagctaatattcccagtaaagataccatgtataattttctacaacctaagatgttctgccttatcggggcgaaccttttaggattccatgtgaaaataaaatatgaggaaaagtttaacctaaataattagaatcccattagaggtacttttttttgatggcatgctgccttaaaagagccatttatttttagagatctgtcatattatgaaagttctgggctatcttagctaacttatcctaaacccttaacctaaatttaacttgagccccagtctcagaaattaacatggtatgaaagtgtttccaggccaggcgcggtggctcacgcctgtaatcccaacactttgggaggccgaggtgggtggatcacctgaggtcaggagtttgagaccagcctggccaacactatctgtactaaaaacacaaaattagctgggtgtggtagtgcgtgcctgtgatcccagctacttgggaggctgaggtagaagaattgtttgaacctgggaggtggaggttgcagtgagccaagatcgtgccattgcactccagcctaggcaacaagagtgaaactccatctc

SEQ ID NO: 343605 - DNA, 1236 bp, Homo sapiens
tggcaactggagcaatcagagcaccgcagccagggagatgctggcgagacgacagcgagatcctctccaggccctgcggcgccgcaatcaggagctgaagcaacaggttgatagtttgctttctgagagccaactgaaagaagctctagaacccaataaaagacaacatatttatcaaagatgtatccagttaaagcaggcaatagatgaaaataaaaatgctcttcaaaaattaagcaaagctgatgaatctgcacctgttgcaaactataatcagagaaaagaagaggagcatactcttttggacaagcttacccaacaactgcagggccttgctgtgacaataagcagagaaaatataactgaagttggggcacctactgaagaagaggaagaaagtgaaagtgaagatagtgaagacagtggtggggaggaagaagatgcagaggaggaagaggaagagaaagaggaaaatgaatctcacaaatggtcaaccggtgaagaatacatcgctgttggagattttactgctcagcaagttggagatcttacatttaagaaaggggaaattctccttgtaattgaaaaaaaacctgatggttggtggatagctaaggatgccaaaggaaatgaaggtcttgttcccagaacctacctagagccttatagtgaagaagaagaaggccaagagtcaagtgaagagggcagtgaagaagatgtagaggcggtggatgaaacagcagatggagcagaagttaagcaaagaactgatccccactggagtgctgttcagaaagcgatttcagaggcgggcatcttctgtcttgttaatcatgtctcgttttgctacctaatagttctgatgcgaaataggatggagactgtggaagacaccaatggatctgaaacagggttcagggcatggaatgtacagagcagaggacgtatatttctggtttctaagcctgtgctccaagtaacatttctcattagtttttttttttttttgtacaaaaagaatagataattcatggtgtcacttgaggacttggaaacattctcattgatcctgctttcctatcatttgagtggaaacagatgttaaattttatttactattcgaaaaatcctgaaagcctttaataaaaagtaagaaattggccaggcatggtgattcacactggtaatcccaacattttgggaagctgaagcaggaggatcacttgaggccaggaa

SEQ ID NO: 343606 - DNA, 469 bp, Homo sapiens
aggggcttcagacaaaggtgagcttgtggttctgaaacttttattctcccctactgcccaagtctgtccactacctccaatggtgagtcacggagatttcgtctgccacccgcggccttgtgagcgctacaaccacggaactgtggtggagttttactgcgatcctggctacagcctcaccagcgactacaagtacatcacctgccagtatggagagtggtttccttcttatcaagtctactgcatcaaatcagagcaaacgtggcccagcacccatgagaccctcctgaccacgtggaagattgtggcgttcacggcaaccagtgtgctgctggtgctgctgctcgtcatcctggccaggatgttccagaccaagttcaaggcccactttccccccagggggcctccccggagttccagcagtgaccctgactttgtggtggtagacggcgtgcccgtcatgctcccg

SEQ ID NO: 343607 - DNA, 578 bp, Homo sapiens
  misc_feature (8)..(8): n is a, c, g, or t
aggaatgnggcttaatttcctccaggtaaaagcttttaatgtaaagaactgtgaaccacctgtaataatagtgtggaactcggtaacaaactatttgacagtgttttcttggaaagtgggttataaatcggtatattggtgtataagctcttctttgtggaaatgcaatttttatactaaaaacattgcttatttgcaatgcaatatgttataaatttgttgtttatattactggtattagtcttagcctaatgaacctaattatttttctttctgtattctttgcttcctcaaatagcatctgcagcaattggaatgagaaatccagatatgtgtttcaagtagtacattgcctgaatcacaaatcacttgatcacagtattgtatataatccctgatcctatttgtttcattttattgtaaattcccatttgcatcaaaacctaatgatagtgattggtaagtaaaaacaaatggtgtattgcttttcatacaagtgttttcacaaaagccatttgcctaggcagcaaaaaatattaatttgttaaaaaaaattttccttcgtgtccatcctcaaa

SEQ ID NO: 343608 - DNA, 6160 bp, Homo sapiens
  misc_feature (4375)..(4375): n is a, c, g, or t
cgtggcctgcgggacgggcaagcggcgataagaggtggcgtcctccgcggcattgcgagcaccgccagtctgcgccgctaggcgtaggcggggtggcccttgcgtctcccgcttccttgaaaaacccggcgggcgagcgaggctgcgggccggccgctgcccttccccacactccccgccgagaagcctcgctcggcgcccaacatggcgggtgggcgctgcggcccgcagctaacggcgctcctggccgcctggatcgcggctgtggcggcgacggcaggccccgaggaggccgcgctgccgccggagcagagccgggtccagcccatgaccgcctccaactggacgctggtgatggagggcgagtggatgctgaaattttacgccccatggtgtccatcctgccagcagactgattcagaatgggaggcttttgcaaagaatggtgaaatacttcagatcagtgtggggaaggtagatgtcattcaagaaccaggtttgagtggccgcttctttgtcaccactctcccagcattttttcatgcaaaggatgggatattccgccgttatcgtggcccaggaatcttcgaagacctgcagaattatatcttagagaagaaatggcaatcagtcgagcctctgactggctggaaatccccggcttctctaacgatgtctggaatggctggtctttttagcatctctggcaagatatggcatcttcacaactatttcacagtgactcttggaattcctgcttggtgttcttatgtctttttcgtcatagccaccttggtttttggcctttttatgggtctggtcttggtggtaatatcagaatgtttctatgtgccacttccaaggcatttatctgagcgttctgagcagaatcggagatcagaggaggctcatagagctgaacagttgcaggatgcggaggaggaaaaagatgattcaaatgaagaagaaaacaaagacagccttgtagatgatgaagaagagaaagaagatcttggcgatgaggatgaagcagaggaagaagaggaggaggacaacttggctgctggtgtggatgaggagagaagtgaggccaatgatcaggggcccccaggagaggacggtgtgacccgggaggaagtagagcctgaggaggctgaagaaggcatctctgagcaaccctgcccagctgacacagaggtggtggaagactccttgaggcagcgtaaaagtcagcatgctgacaagggactgtagatttaatgatgcgttttcaagaatacacaccaaaacaatatgtcagcttccctttggcctgcagtttgtaccaaatccttaatttttcctgaatgagcaagcttctcttaaaagatgctctctagtcatttggtctcatggcagtaagcctcatgtatactaaggagagtcttccaggtgtgacaatcaggatatagaaaaacaaacgtagtgttgggatctgtttggagactgggatgggaacaagttcatttacttaggggtcagagagtctcgaccagaggaggccattcccagtcctaatcagcaccttccagagacaaggctgcaggccctgtgaaatgaaagccaagcaggagccttggctcctgagcatccccaaagtgtaacgtagaagccttgcatccttttcttgtgtaaagtatttatttttgtcaaattgcaggaaacatcaggcaccacagtgcatgaaaaatctttcacagctagaaattgaaagggccttgggtatagagagcagctcagaagtcatcccagccctctgaatctcctgtgctatgttttatttcttacctttaatttttccagcatttccaccatgggcattcaggctctccacactcttcactattatctcttggtcagaggactccaataacagccaggtttacatgaactgtgtttgttcattctgacctaaggggtttagataatcagtaaccataacccctgaagctgtgactgccaaacatctcaaatgaaatgttgtggccatcagagactcaaaaggaagtaaggattttacaagacagattaaaaaaaaattgttttgtccaaaatatagttgttgttgatttttttttaagttttctaagcaatatttttcaagccagaagtcctctaagtcttgccagtacaaggtagtcttgtgaagaaaagttgaatactgttttgttttcatctcaaggggttccctgggtcttgaactactttaataataactaaaaaaccacttctgattttccttcagtgatgtgcttttggtgaaagaattaatgaactccagtacctgaaagtgaaagatttgattttgtttccatcttctgtaatcttccaaagaattatatctttgtaaatctctcaatactcaatctactgtaagtacccagggaggctaatttccttaaaaaaaaaaaatctatccatctacttctctcttacctgatttatgtgttagaataaattcatgaaattcgattccaagcatacgaaagatgcctaaagttgattctatgctccttagatccagacagaataatgagtacaggtttatgaaattctaaaagtttctgtcgtctttaaaaaggaacgtgcagtatatttctatctggctgtttagataaccctttccttgtattaattgtgagcacggagctcactggtgggggaggttctgaaactctctgccctcctgtggttgaatgaagatgttgcaagacttgcacaaaggaggttattcttctgacagcatcaacttttagagatggttctttttcatctttccaattcagttacttgacagtctccttccccagtatgctgaagtttgttaagagtcaccagtaattgtgcttttcagacagtagtgcagcttcaaaatcgaggccatcactgggctgatgggctgggagaaccttgccatgtgcctgcctgtttcctgcccccttagtcactgcccatttcctgcccccttggtcgctgacacaccttcacccaaagtgccatggttctgatggtggcagttccatctccctgacatcaggaagcttttctcgatcagagcagagcggggcctgcctgccctcgtgtcactggatttctttctcttataatcagctgaaacagagttctcaaagaacagtaaactcaggttcagaggtattatggaataagaatggtttcatagtttggcttttctatataattcctccctctcaaactgaaatattcatttttttagtggagtatttgactagagagaaggtaaggcagaaatacagtctacactggcttttaaaaatgtaaagccaatttccaaccggaccccaaatagtacaggttgaacattccgttccaacaatccaaaaccccaaatgctccaaaatcttaaactttgagttccagcattccgtcagaagtggaaaattttacacctgacctcatttgacaggtggcagttacagtgcaatcaaaactttgttccatgcccaagattattaaaaatattggataaaattaccttcaagctatgttgtataaggtgtatataaaacaaatgaattttgtgtttagacttgggtctactcccaagatacctcattatatatatacaaaaatccccaaatccaaaaacatttgaaacacttctggtcccacacattttggataagggatatttgacctatatctaattatataataagaaaaatgtattttcttttttttttttttttgagatggagtttcactcttgttgtcgcccaggctgcaatggcacaatcttggcttactacaacctccgcctccctagttcaagggattctcctgcctcagcctcccaggtagctgggattacaggcatgtgccaccatgcctggctaattttgtatttttagtagagacggggtttcgccatgttggtcagactggtcttgaactcctgacctcaggtgatccgcccgcctcagcctcccaacgtgctgggattacaggtgtgagccaccgtacctggcagaaaatgtactttctttctcagaaatacttttaaaaaaaattgaagggtgaggagaaaaacatcttggagaagaggacccattaaaactttaaatatctgtgggaaccatttttcctgattttcccttttttaacatcatggcaaagatgggtttttttccaacaaaatttaatttaatatctttccacttgaagattttaggtttgttttcaatacttaatgaatataaaactaaaggagaaaagccaacctgaaataatttaaactttatatgaacatttcgataagagtttgtggattttttctgtagataatatatttgatccngaactcaagtgcatggaaacatgattttgatttttaaaatctaaaaaaaaaaaaaattaaaatcatgcttccctctattgcagtatcagttatttagtcacagaatggtattttatgtaaattaaaattaggtgaatgcaatgcaggtaactggttttggaatgggaatgtgcagtgctttatgtttggggagttggagcagggtatcttttcatcaattagaaggaaagtttgaaacttctgattacctttatgttggtttctcttattatttgtctcttgctagatctgctaaaccaacccagcttgctcagagatctcatattgaagcaacatacaggcaatccacatctttctttccctttgaagtatagtcattggatgggatgagggacagggcctgttgggttcacagggccttgcactgcatgggcacatacttaaaagctcttgtgcatggaatccctgtctgttagccacaggcctctttagctctatacattcaaaataactactgtagtagaaaatagataagcttcagctgagttggcttttgatagtggaaaaaaaacaaaatttgactttttatggccaaaattccttgttgacagctgtgatgttctaatatgatttgggaatatgtcagtctacagaacctgcatcctgtaaaaacacctttggggtagacgataaaagtcatttttaaggcaaatacttaccatgtgactttttattaccaaatgcatcagtagtggagctggtatgttgtttcataggatggaaacattagaagtccagagaaaaataaattttaaaaaaaggtggaaaagttacggcaaacctgagatttcagcataaaatctttagtatgaagtgagagaaagaagagggaggctggttctgttgctcgtatcaataggttatctgtgtccctcatcttggtgttacagtgttatttctgtcagtattatgaatatgtggttgacccatcctgtcaaatgtaccaacattttcgaaagaattcattcaaatctcttatgccaacagaaaagttccttcttgtttaatatctctttacctcagtcctacattttgattctctggaggagattttagcttgtcttaaaaagccaaatttggagtcatcaagcctgctgaacctgatggggcagctttttgaacagctttctggaagtaagaacttcagttgaaaagccctttgatcgcttcagcccgggacatgcccttcagatggcttattctcagtaaagctttatgtagactgtgacactgtatatgtgtgactcgtacaactttgacgtgtttctgaagtggtttaatcgtatttgttattagcttctttgtggaaatgcaatttttatactaaaaacattgcttatttgcaatgcaatatgttataaatttgttgtttatattactggtattagtcttagcctaatgaacctaattatttttctttctgtattctttgcttcctcaaatagcatctgcagcaattggaatgagaaatccagatatgtgtttcaagtagtacattgcctgaatcacaaatcacttgatcacagtattgtatataatccctgatcctatttgtttcattttattgtaaattcccatttgcatcaaaacctaatgatagtgattggtaagtaaaaacaaatggtgtattgcttttcatacaagtgttttcacaaaagccatttgcctaggcagcaaaaaatattaatttgttaaaaaaaattttccttcgtgtccatcctcaaa

SEQ ID NO: 343609 - DNA, 6100 bp, Homo sapiens
  misc_feature (4375)..(4375): n is a, c, g, or t
cgtggcctgcgggacgggcaagcggcgataagaggtggcgtcctccgcggcattgcgagcaccgccagtctgcgccgctaggcgtaggcggggtggcccttgcgtctcccgcttccttgaaaaacccggcgggcgagcgaggctgcgggccggccgctgcccttccccacactccccgccgagaagcctcgctcggcgcccaacatggcgggtgggcgctgcggcccgcagctaacggcgctcctggccgcctggatcgcggctgtggcggcgacggcaggccccgaggaggccgcgctgccgccggagcagagccgggtccagcccatgaccgcctccaactggacgctggtgatggagggcgagtggatgctgaaattttacgccccatggtgtccatcctgccagcagactgattcagaatgggaggcttttgcaaagaatggtgaaatacttcagatcagtgtggggaaggtagatgtcattcaagaaccaggtttgagtggccgcttctttgtcaccactctcccagcattttttcatgcaaaggatgggatattccgccgttatcgtggcccaggaatcttcgaagacctgcagaattatatcttagagaagaaatggcaatcagtcgagcctctgactggctggaaatccccggcttctctaacgatgtctggaatggctggtctttttagcatctctggcaagatatggcatcttcacaactatttcacagtgactcttggaattcctgcttggtgttcttatgtctttttcgtcatagccaccttggtttttggcctttttatgggtctggtcttggtggtaatatcagaatgtttctatgtgccacttccaaggcatttatctgagcgttctgagcagaatcggagatcagaggaggctcatagagctgaacagttgcaggatgcggaggaggaaaaagatgattcaaatgaagaagaaaacaaagacagccttgtagatgatgaagaagagaaagaagatcttggcgatgaggatgaagcagaggaagaagaggaggaggacaacttggctgctggtgtggatgaggagagaagtgaggccaatgatcaggggcccccaggagaggacggtgtgacccgggaggaagtagagcctgaggaggctgaagaaggcatctctgagcaaccctgcccagctgacacagaggtggtggaagactccttgaggcagcgtaaaagtcagcatgctgacaagggactgtagatttaatgatgcgttttcaagaatacacaccaaaacaatatgtcagcttccctttggcctgcagtttgtaccaaatccttaatttttcctgaatgagcaagcttctcttaaaagatgctctctagtcatttggtctcatggcagtaagcctcatgtatactaaggagagtcttccaggtgtgacaatcaggatatagaaaaacaaacgtagtgttgggatctgtttggagactgggatgggaacaagttcatttacttaggggtcagagagtctcgaccagaggaggccattcccagtcctaatcagcaccttccagagacaaggctgcaggccctgtgaaatgaaagccaagcaggagccttggctcctgagcatccccaaagtgtaacgtagaagccttgcatccttttcttgtgtaaagtatttatttttgtcaaattgcaggaaacatcaggcaccacagtgcatgaaaaatctttcacagctagaaattgaaagggccttgggtatagagagcagctcagaagtcatcccagccctctgaatctcctgtgctatgttttatttcttacctttaatttttccagcatttccaccatgggcattcaggctctccacactcttcactattatctcttggtcagaggactccaataacagccaggtttacatgaactgtgtttgttcattctgacctaaggggtttagataatcagtaaccataacccctgaagctgtgactgccaaacatctcaaatgaaatgttgtggccatcagagactcaaaaggaagtaaggattttacaagacagattaaaaaaaaattgttttgtccaaaatatagttgttgttgatttttttttaagttttctaagcaatatttttcaagccagaagtcctctaagtcttgccagtacaaggtagtcttgtgaagaaaagttgaatactgttttgttttcatctcaaggggttccctgggtcttgaactactttaataataactaaaaaaccacttctgattttccttcagtgatgtgcttttggtgaaagaattaatgaactccagtacctgaaagtgaaagatttgattttgtttccatcttctgtaatcttccaaagaattatatctttgtaaatctctcaatactcaatctactgtaagtacccagggaggctaatttccttaaaaaaaaaaaatctatccatctacttctctcttacctgatttatgtgttagaataaattcatgaaattcgattccaagcatacgaaagatgcctaaagttgattctatgctccttagatccagacagaataatgagtacaggtttatgaaattctaaaagtttctgtcgtctttaaaaaggaacgtgcagtatatttctatctggctgtttagataaccctttccttgtattaattgtgagcacggagctcactggtgggggaggttctgaaactctctgccctcctgtggttgaatgaagatgttgcaagacttgcacaaaggaggttattcttctgacagcatcaacttttagagatggttctttttcatctttccaattcagttacttgacagtctccttccccagtatgctgaagtttgttaagagtcaccagtaattgtgcttttcagacagtagtgcagcttcaaaatcgaggccatcactgggctgatgggctgggagaaccttgccatgtgcctgcctgtttcctgcccccttagtcactgcccatttcctgcccccttggtcgctgacacaccttcacccaaagtgccatggttctgatggtggcagttccatctccctgacatcaggaagcttttctcgatcagagcagagcggggcctgcctgccctcgtgtcactggatttctttctcttataatcagctgaaacagagttctcaaagaacagtaaactcaggttcagaggtattatggaataagaatggtttcatagtttggcttttctatataattcctccctctcaaactgaaatattcatttttttagtggagtatttgactagagagaaggtaaggcagaaatacagtctacactggcttttaaaaatgtaaagccaatttccaaccggaccccaaatagtacaggttgaacattccgttccaacaatccaaaaccccaaatgctccaaaatcttaaactttgagttccagcattccgtcagaagtggaaaattttacacctgacctcatttgacaggtggcagttacagtgcaatcaaaactttgttccatgcccaagattattaaaaatattggataaaattaccttcaagctatgttgtataaggtgtatataaaacaaatgaattttgtgtttagacttgggtctactcccaagatacctcattatatatatacaaaaatccccaaatccaaaaacatttgaaacacttctggtcccacacattttggataagggatatttgacctatatctaattatataataagaaaaatgtattttcttttttttttttttttgagatggagtttcactcttgttgtcgcccaggctgcaatggcacaatcttggcttactacaacctccgcctccctagttcaagggattctcctgcctcagcctcccaggtagctgggattacaggcatgtgccaccatgcctggctaattttgtatttttagtagagacggggtttcgccatgttggtcagactggtcttgaactcctgacctcaggtgatccgcccgcctcagcctcccaacgtgctgggattacaggtgtgagccaccgtacctggcagaaaatgtactttctttctcagaaatacttttaaaaaaaattgaagggtgaggagaaaaacatcttggagaagaggacccattaaaactttaaatatctgtgggaaccatttttcctgattttcccttttttaacatcatggcaaagatgggtttttttccaacaaaatttaatttaatatctttccacttgaagattttaggtttgttttcaatacttaatgaatataaaactaaaggagaaaagccaacctgaaataatttaaactttatatgaacatttcgataagagtttgtggattttttctgtagataatatatttgatccngaactcaagtgcatggaaacatgattttgatttttaaaatctaaaaaaaaaaaaaattaaaatcatgcttccctctattgcagtatcagttatttagtcacagaatggtattttatgtaaattaaaattaggtgaatgcaatgcaggtaactggttttggaatgggaatgtgcagtgctttatgtttggggagttggagcagggtatcttttcatcaattagaaggaaagtttgaaacttctgattacctttatgttggtttctcttattatttgtctcttgctagatctgctaaaccaacccagcttgctcagagatctcatattgaagcaacatacaggcaatccacatctttctttccctttgaagtatagtcattggatgggatgagggacagggcctgttgggttcacagggccttgcactgcatgggcacatacttaaaagctcttgtgcatggaatccctgtctgttagccacaggcctctttagctctatacattcaaaataactactgtagtagaaaatagataagcttcagctgagttggcttttgatagtctaatatgatttgggaatatgtcagtctacagaacctgcatcctgtaaaaacacctttggggtagacgataaaagtcatttttaaggcaaatacttaccatgtgactttttattaccaaatgcatcagtagtggagctggtatgttgtttcataggatggaaacattagaagtccagagaaaaataaattttaaaaaaaggtggaaaagttacggcaaacctgagatttcagcataaaatctttagtatgaagtgagagaaagaagagggaggctggttctgttgctcgtatcaataggttatctgtgtccctcatcttggtgttacagtgttatttctgtcagtattatgaatatgtggttgacccatcctgtcaaatgtaccaacattttcgaaagaattcattcaaatctcttatgccaacagaaaagttccttcttgtttaatatctctttacctcagtcctacattttgattctctggaggagattttagcttgtcttaaaaagccaaatttggagtcatcaagcctgctgaacctgatggggcagctttttgaacagctttctggaagtaagaacttcagttgaaaagccctttgatcgcttcagcccgggacatgcccttcagatggcttattctcagtaaagctttatgtagactgtgacactgtatatgtgtgactcgtacaactttgacgtgtttctgaagtggtttaatcgtatttgttattagcttctttgtggaaatgcaatttttatactaaaaacattgcttatttgcaatgcaatatgttataaatttgttgtttatattactggtattagtcttagcctaatgaacctaattatttttctttctgtattctttgcttcctcaaatagcatctgcagcaattggaatgagaaatccagatatgtgtttcaagtagtacattgcctgaatcacaaatcacttgatcacagtattgtatataatccctgatcctatttgtttcattttattgtaaattcccatttgcatcaaaacctaatgatagtgattggtaagtaaaaacaaatggtgtattgcttttcatacaagtgttttcacaaaagccatttgcctaggcagcaaaaaatattaatttgttaaaaaaaattttccttcgtgtccatcctcaaa

SEQ ID NO: 343610 - DNA, 5061 bp, Homo sapiens
  misc_feature (4375)..(4375): n is a, c, g, or t
cgtggcctgcgggacgggcaagcggcgataagaggtggcgtcctccgcggcattgcgagcaccgccagtctgcgccgctaggcgtaggcggggtggcccttgcgtctcccgcttccttgaaaaacccggcgggcgagcgaggctgcgggccggccgctgcccttccccacactccccgccgagaagcctcgctcggcgcccaacatggcgggtgggcgctgcggcccgcagctaacggcgctcctggccgcctggatcgcggctgtggcggcgacggcaggccccgaggaggccgcgctgccgccggagcagagccgggtccagcccatgaccgcctccaactggacgctggtgatggagggcgagtggatgctgaaattttacgccccatggtgtccatcctgccagcagactgattcagaatgggaggcttttgcaaagaatggtgaaatacttcagatcagtgtggggaaggtagatgtcattcaagaaccaggtttgagtggccgcttctttgtcaccactctcccagcattttttcatgcaaaggatgggatattccgccgttatcgtggcccaggaatcttcgaagacctgcagaattatatcttagagaagaaatggcaatcagtcgagcctctgactggctggaaatccccggcttctctaacgatgtctggaatggctggtctttttagcatctctggcaagatatggcatcttcacaactatttcacagtgactcttggaattcctgcttggtgttcttatgtctttttcgtcatagccaccttggtttttggcctttttatgggtctggtcttggtggtaatatcagaatgtttctatgtgccacttccaaggcatttatctgagcgttctgagcagaatcggagatcagaggaggctcatagagctgaacagttgcaggatgcggaggaggaaaaagatgattcaaatgaagaagaaaacaaagacagccttgtagatgatgaagaagagaaagaagatcttggcgatgaggatgaagcagaggaagaagaggaggaggacaacttggctgctggtgtggatgaggagagaagtgaggccaatgatcaggggcccccaggagaggacggtgtgacccgggaggaagtagagcctgaggaggctgaagaaggcatctctgagcaaccctgcccagctgacacagaggtggtggaagactccttgaggcagcgtaaaagtcagcatgctgacaagggactgtagatttaatgatgcgttttcaagaatacacaccaaaacaatatgtcagcttccctttggcctgcagtttgtaccaaatccttaatttttcctgaatgagcaagcttctcttaaaagatgctctctagtcatttggtctcatggcagtaagcctcatgtatactaaggagagtcttccaggtgtgacaatcaggatatagaaaaacaaacgtagtgttgggatctgtttggagactgggatgggaacaagttcatttacttaggggtcagagagtctcgaccagaggaggccattcccagtcctaatcagcaccttccagagacaaggctgcaggccctgtgaaatgaaagccaagcaggagccttggctcctgagcatccccaaagtgtaacgtagaagccttgcatccttttcttgtgtaaagtatttatttttgtcaaattgcaggaaacatcaggcaccacagtgcatgaaaaatctttcacagctagaaattgaaagggccttgggtatagagagcagctcagaagtcatcccagccctctgaatctcctgtgctatgttttatttcttacctttaatttttccagcatttccaccatgggcattcaggctctccacactcttcactattatctcttggtcagaggactccaataacagccaggtttacatgaactgtgtttgttcattctgacctaaggggtttagataatcagtaaccataacccctgaagctgtgactgccaaacatctcaaatgaaatgttgtggccatcagagactcaaaaggaagtaaggattttacaagacagattaaaaaaaaattgttttgtccaaaatatagttgttgttgatttttttttaagttttctaagcaatatttttcaagccagaagtcctctaagtcttgccagtacaaggtagtcttgtgaagaaaagttgaatactgttttgttttcatctcaaggggttccctgggtcttgaactactttaataataactaaaaaaccacttctgattttccttcagtgatgtgcttttggtgaaagaattaatgaactccagtacctgaaagtgaaagatttgattttgtttccatcttctgtaatcttccaaagaattatatctttgtaaatctctcaatactcaatctactgtaagtacccagggaggctaatttccttaaaaaaaaaaaatctatccatctacttctctcttacctgatttatgtgttagaataaattcatgaaattcgattccaagcatacgaaagatgcctaaagttgattctatgctccttagatccagacagaataatgagtacaggtttatgaaattctaaaagtttctgtcgtctttaaaaaggaacgtgcagtatatttctatctggctgtttagataaccctttccttgtattaattgtgagcacggagctcactggtgggggaggttctgaaactctctgccctcctgtggttgaatgaagatgttgcaagacttgcacaaaggaggttattcttctgacagcatcaacttttagagatggttctttttcatctttccaattcagttacttgacagtctccttccccagtatgctgaagtttgttaagagtcaccagtaattgtgcttttcagacagtagtgcagcttcaaaatcgaggccatcactgggctgatgggctgggagaaccttgccatgtgcctgcctgtttcctgcccccttagtcactgcccatttcctgcccccttggtcgctgacacaccttcacccaaagtgccatggttctgatggtggcagttccatctccctgacatcaggaagcttttctcgatcagagcagagcggggcctgcctgccctcgtgtcactggatttctttctcttataatcagctgaaacagagttctcaaagaacagtaaactcaggttcagaggtattatggaataagaatggtttcatagtttggcttttctatataattcctccctctcaaactgaaatattcatttttttagtggagtatttgactagagagaaggtaaggcagaaatacagtctacactggcttttaaaaatgtaaagccaatttccaaccggaccccaaatagtacaggttgaacattccgttccaacaatccaaaaccccaaatgctccaaaatcttaaactttgagttccagcattccgtcagaagtggaaaattttacacctgacctcatttgacaggtggcagttacagtgcaatcaaaactttgttccatgcccaagattattaaaaatattggataaaattaccttcaagctatgttgtataaggtgtatataaaacaaatgaattttgtgtttagacttgggtctactcccaagatacctcattatatatatacaaaaatccccaaatccaaaaacatttgaaacacttctggtcccacacattttggataagggatatttgacctatatctaattatataataagaaaaatgtattttcttttttttttttttttgagatggagtttcactcttgttgtcgcccaggctgcaatggcacaatcttggcttactacaacctccgcctccctagttcaagggattctcctgcctcagcctcccaggtagctgggattacaggcatgtgccaccatgcctggctaattttgtatttttagtagagacggggtttcgccatgttggtcagactggtcttgaactcctgacctcaggtgatccgcccgcctcagcctcccaacgtgctgggattacaggtgtgagccaccgtacctggcagaaaatgtactttctttctcagaaatacttttaaaaaaaattgaagggtgaggagaaaaacatcttggagaagaggacccattaaaactttaaatatctgtgggaaccatttttcctgattttcccttttttaacatcatggcaaagatgggtttttttccaacaaaatttaatttaatatctttccacttgaagattttaggtttgttttcaatacttaatgaatataaaactaaaggagaaaagccaacctgaaataatttaaactttatatgaacatttcgataagagtttgtggattttttctgtagataatatatttgatccngaactcaagtgcatggaaacatgattttgatttttaaaatctaaaaaaaaaaaaaattaaaatcatgcttccctctattgcagtatcagttatttagtcacagaatggtattttatgtaaattaaaattaggtgaatgcaatgcaggtaactggttttggaatgggaatgtgcagtgctttatgtttggggagttggagcagggtatcttttcatcaattagaaggaaagtttgaaacttctgattacctttatgttggtttctcttattatttgtctcttgctagatctgctaaaccaacccagcttgctcagagatctcatattgaagcaacatacaggcaatccacatctttctttccctttgaagtatagtcattggatgggatgagggacagggcctgttgggttcacagggccttgcactgcatgggcacatacttaaaagctcttgtgcatggaatccctgtctgttagccacaggcctctttagctctatacattcaaaataactactgtagtagaaaatagataagcttcagctgagttggcttttgatagttgattggtaagtaaaaacaaatggtgtattgcttttcatacaagtgttttcacaaaagccatttgcctaggcagcaaaaaatattaatttgttaaaaaaaattttccttcgtgtccatcctcaaa

SEQ ID NO: 343611 - DNA, 2369 bp, Homo sapiens
  misc_feature (2369)..(2369): n is a, c, g, or t
cgtggcctgcgggacgggcaagcggcgataagaggtggcgtcctccgcggcattgcgagcaccgccagtctgcgccgctaggcgtaggcggggtggcccttgcgtctcccgcttccttgaaaaacccggcgggcgagcgaggctgcgggccggccgctgcccttccccacactccccgccgagaagcctcgctcggcgcccaacatggcgggtgggcgctgcggcccgcagctaacggcgctcctggccgcctggatcgcggctgtggcggcgacggcaggccccgaggaggccgcgctgccgccggagcagagccgggtccagcccatgaccgcctccaactggacgctggtgatggagggcgagtggatgctgaaattttacgccccatggtgtccatcctgccagcagactgattcagaatgggaggcttttgcaaagaatggtgaaatacttcagatcagtgtggggaaggtagatgtcattcaagaaccaggtttgagtggccgcttctttgtcaccactctcccagcattttttcatgcaaaggatgggatattccgccgttatcgtggcccaggaatcttcgaagacctgcagaattatatcttagagaagaaatggcaatcagtcgagcctctgactggctggaaatccccggcttctctaacgatgtctggaatggctggtctttttagcatctctggcaagatatggcatcttcacaactatttcacagtgactcttggaattcctgcttggtgttcttatgtctttttcgtcatagccaccttggtttttggcctttttatgggtctggtcttggtggtaatatcagaatgtttctatgtgccacttccaaggcatttatctgagcgttctgagcagaatcggagatcagaggaggctcatagagctgaacagttgcaggatgcggaggaggaaaaagatgattcaaatgaagaagaaaacaaagacagccttgtagatgatgaagaagagaaagaagatcttggcgatgaggatgaagcagaggaagaagaggaggaggacaacttggctgctggtgtggatgaggagagaagtgaggccaatgatcaggggcccccaggagaggacggtgtgacccgggaggaagtagagcctgaggaggctgaagaaggcatctctgagcaaccctgcccagctgacacagaggtggtggaagactccttgaggcagcgtaaaagtcagcatgctgacaagggactgtagatttaatgatgcgttttcaagaatacacaccaaaacaatatgtcagcttccctttggcctgcagtttgtaccaaatccttaatttttcctgaatgagcaagcttctcttaaaagatgctctctagtcatttggtctcatggcagtaagcctcatgtatactaaggagagtcttccaggtgtgacaatcaggatatagaaaaacaaacgtagtgttgggatctgtttggagactgggatgggaacaagttcatttacttaggggtcagagagtctcgaccagaggaggccattcccagtcctaatcagcaccttccagagacaaggctgcaggccctgtgaaatgaaagccaagcaggagccttggctcctgagcatccccaaagtgtaacgtagaagccttgcatccttttcttgtgtaaagtatttatttttgtcaaattgcaggaaacatcaggcaccacagtgcatgaaaaatctttcacagctagaaattgaaagggccttgggtatagagagcagctcagaagtcatcccagccctctgaatctcctgtgctatgttttatttcttacctttaatttttccagcatttccaccatgggcattcaggctctccacactcttcactattatctcttggtcagaggactccaataacagccaggtttacatgaactgtgtttgttcattctgacctaaggggtttagataatcagtaaccataacccctgaagctgtgactgccaaacatctcaaatgaaatgttgtggccatcagagactcaaaaggaagtaaggattttacaagacagattaaaaaaaaattgttttgtccaaaatatagttgttgttgatttttttttaagttttctaagcaatatttttcaagccagaagtcctctaagtcttgccagtacaaggtagtcttgtgaagaaaagttgaatactgttttgttttcatctcaaggggttccctgggtcttgaactactttaataataactaaaaaaccacttctgattttccttcagtgatgtgcttttggtgaaagaattaaaggaaacctcccattccccttgaaggtggaaaggatttttaaaaaataaacattattcn

SEQ ID NO: 343612 - DNA, 1683 bp, Homo sapiens
cgtggcctgcgggacgggcaagcggcgataagaggtggcgtcctccgcggcattgcgagcaccgccagtctgcgccgctaggcgtaggcggggtggcccttgcgtctcccgcttccttgaaaaacccggcgggcgagcgaggctgcgggccggccgctgcccttccccacactccccgccgagaagcctcgctcggcgcccaacatggcgggtgggcgctgcggcccgcagctaacggcgctcctggccgcctggatcgcggctgtggcggcgacggcaggccccgaggaggccgcgctgccgccggagcagagccgggtccagcccatgaccgcctccaactggacgctggtgatggagggcgagtggatgctgaaattttacgccccatggtgtccatcctgccagcagactgattcagaatgggaggcttttgcaaagaatggtgaaatacttcagatcagtgtggggaaggtagatgtcattcaagaaccaggtttgagtggccgcttctttgtcaccactctcccagcattttttcatgcaaaggatgggatattccgccgttatcgtggcccaggaatcttcgaagacctgcagaattatatcttagagaagaaatggcaatcagtcgagcctctgactggctggaaatccccggcttctctaacgatgtctggaatggctggtctttttagcatctctggcaagatatggcatcttcacaactatttcacagtgactcttggaattcctgcttggtgttcttatgtctttttcgtcatagccaccttggtttttggcctttttatgggtctggtcttggtggtaatatcagaatgtttctatgtgccacttccaaggcatttatctgagcgttctgagcagaatcggagatcagaggaggctcatagagctgaacagttgcaggatgcggaggaggaaaaagatgattcaaatgaagaagaaaacaaagacagccttgtagatgatgaagaagagaaagaagatcttggcgatgaggatgaagcagaggaagaagaggaggaggacaacttggctgctggtgtggatgaggagagaagtgaggccaatgatcaggggcccccaggagaggacggtgtgacccgggaggaagtagagcctgaggaggctgaagaaggcatctctgagcaaccctgcccagctgacacagaggtggtggaagactccttgaggcagcgtaaaagtcagcatgctgacaagggactgtagatttaatgatgcgttttcaagaatacacaccaaaacaatatgtcagcttccctttggcctgcagtttgtaccaaatccttaatttttcctgaatgagcaagcttctcttaaaagatgctctctagtcatttggtctcatggcagtaagcctcatgtatactaaggagagtcttccaggtgtgacaatcaggatatagaaaaacaaacgtagtgttgggatctgtttggagactgggatgggaacaagttcatttacttaggggtcagagagtctcgaccagaggaggccattcccagtcctaatcagcaccttccagagacaaggctgcaggccctgtgaaatgaaagccaagcaggagccttggctcctgagcatccacccaacgacgacgtagacgacggccgcctcctagctgtgctaaacatagc

SEQ ID NO: 343613 - DNA, 524 bp, Homo sapiens
ctactctcagtttcccaatattataaaattgacttgttctttaagaatcatttagatacataaagctttgtgggaacctatgtatgtagaaacaacagctagagagagagattgaaatatttttggttctcttaaaaattaatgttttattttttttcttctgattccagcatcttcacaactatttcacagtgactcttggaattcctgcttggtgttcttatgtctttttcgtcatagccaccttggtttttggcctttttatgggtctggtaagagataataccaaactttttctatctttaaggcaaaatgaatttcatgtacaaataaaaggcagccaagaaagaaaaagcacataaaaaatagtattttgtgcaatctaagtagttaaatagcatttgcttgtttgagactgctttcaatggtaatgtgagatataacagaaaatttattaaattcttatcccctaatcctatcccttaagtattttgaagatgtgtactgcctatagacagtaatta

SEQ ID NO: 343614 - DNA, 6082 bp, Homo sapiens
  misc_feature (4297)..(4297): n is a, c, g, or t
cgtggcctgcgggacgggcaagcggcgataagaggtggcgtcctccgcggcattgcgagcaccgccagtctgcgccgctaggcgtaggcggggtggcccttgcgtctcccgcttccttgaaaaacccggcgggcgagcgaggctgcgggccggccgctgcccttccccacactccccgccgagaagcctcgctcggcgcccaacatggcgggtgggcgctgcggcccgcagctaacggcgctcctggccgcctggatcgcggctgtggcggcgacggcaggccccgaggaggccgcgctgccgccggagcagagccgggtccagcccatgaccgcctccaactggacgctggtgatggagggcgagtggatgctgaaattttacgccccatggtgtccatcctgccagcagactgattcagaatgggaggcttttgcaaagaatggtgaaatacttcagatcagtgtggggaaggtagatgtcattcaagaaccaggtttgagtggccgcttctttgtcaccactctcccagcattttttcatgcaaaggatgggatattccgccgttatcgtggcccaggaatcttcgaagacctgcagaattatatcttagagaagaaatggcaatcagtcgagcctctgactggctggaaatccccggcttctctaacgatgtctggaatggctggtctttttagcatctctggcaagatatggcatcttcacaactatttcacagtgactcttggaattcctgcttggtgttcttatgtctttttcgtcatagccaccttggtttttggcctttttatgggtctggtcttggtggtaatatcagaatgtttctatgtgccacttccaaggcatttatctgagcgttctgagcagaatcggagatcagaggaggctcatagagctgaacagttgcaggatgcggaggaggaaaaagatgattcaaatgaagaagaaaacaaagacagccttgtagatgatgaagaagagaaagaagatcttggcgatgaggatgaagcagaggaagaagaggaggaggacaacttggctgctggtgtggatgaggagagaagtgaggccaatgatcaggggcccccaggagaggacggtgtgacccgggaggaagtagagcctgaggaggctgaagaaggcatctctgagcaaccctgcccagctgacacagaggtggtggaagactccttgaggcagcgtaaaagtcagcatgctgacaagggactgtagatttaatgatgcgttttcaagaatacacaccaaaacaatatgtcagcttccctttggcctgcagtttgtaccaaatccttaatttttcctgaatgagcaagcttctcttaaaagatgctctctagtcatttggtctcatggcagtaagcctcatgtatactaaggagagtcttccaggtgtgacaatcaggatatagaaaaacaaacgtagtgttgggatctgtttggagactgggatgggaacaagttcatttacttaggggtcagagagtctcgaccagaggaggccattcccagtcctaatcagcaccttccagagacaaggctgcaggccctgtgaaatgaaagccaagcaggagccttggctcctgagcatccccaaagtgtaacgtagaagccttgcatccttttcttgtgtaaagtatttatttttgtcaaattgcaggaaacatcaggcaccacagtgcatgaaaaatctttcacagctagaaattgaaagggccttgggtatagagagcagctcagaagtcatcccagccctctgaatctcctgtgctatgttttatttcttacctttaatttttccagcatttccaccatgggcattcaggctctccacactcttcactattatctcttggtcagaggactccaataacagccaggtttacatgaactgtgtttgttcattctgacctaaggggtttagataatcagtaaccataacccctgaagctgtgactgccaaacatctcaaatgaaatgttgtggccatcagagactcaaaaggaagtaaggattttacaagacagattaaaaaaaaattgttttgtccaaaatatagttgttgttgatttttttttaagttttctaagcaatatttttcaagccagaagtcctctaagtcttgccagtacaaggtagtcttgtgaagaaaagttgaatactgttttgttttcatctcaaggggttccctgggtcttgaactactttaataataactaaaaaaccacttctgattttccttcagtgatgtgcttttggtgaaagaattaatgaactccagtacctgaaagtgaaagatttgattttgtttccatcttctgtaatcttccaaagaattatatctttgtaaatctctcaatactcaatctactgtaagtacccagggaggctaatttccttaaaaaaaaaaaatctatccatctacttctctcttacctgatttatgtgttagaataaattcatgaaattcgattccaagcatacgaaagatgcctaaagttgattctatgctccttagatccagacagaataatgagtacaggtttatgaaattctaaaagtttctgtcgtctttaaaaaggaacgtgcagtatatttctatctggctgtttagataaccctttccttgtattaattgtgagcacggagctcactggtgggggaggttctgaaactctctgccctcctgtggttgaatgaagatgttgcaagacttgcacaaaggaggttattcttctgacagcatcaacttttagagatggttctttttcatctttccaattcagttacttgacagtctccttccccagtatgctgaagtttgttaagagtcaccagtaattgtgcttttcagacagtagtgcagcttcaaaatcgaggccatcactgggctgatgggctgggagaaccttgccatgtgcctgcctgtttcctgcccccttagtcactgcccatttcctgcccccttggtcgctgacacaccttcacccaaagtgccatggttctgatggtggcagttccatctccctgacatcaggaagcttttctcgatcagagcagagcggggcctgcctgccctcgtgtcactggatttctttctcttataatcagctgaaacagagttctcaaagaacagtaaactcaggttcagaggtattatggaataagaatggtttcatagtttggcttttctatataattcctccctctcaaactgaaatattcatttttttagtggagtatttgactagagagaaggtaaggcagaaatacagtctacactggcttttaaaaatgtaaagccaatttccaaccggaccccaaatagtacaggttgaacattccgttccaacaatccaaaaccccaaatgctccaaaatcttaaactttgagttccagcattccgtcagaagtggaaaatattggataaaattaccttcaagctatgttgtataaggtgtatataaaacaaatgaattttgtgtttagacttgggtctactcccaagatacctcattatatatatacaaaaatccccaaatccaaaaacatttgaaacacttctggtcccacacattttggataagggatatttgacctatatctaattatataataagaaaaatgtattttcttttttttttttttttgagatggagtttcactcttgttgtcgcccaggctgcaatggcacaatcttggcttactacaacctccgcctccctagttcaagggattctcctgcctcagcctcccaggtagctgggattacaggcatgtgccaccatgcctggctaattttgtatttttagtagagacggggtttcgccatgttggtcagactggtcttgaactcctgacctcaggtgatccgcccgcctcagcctcccaacgtgctgggattacaggtgtgagccaccgtacctggcagaaaatgtactttctttctcagaaatacttttaaaaaaaattgaagggtgaggagaaaaacatcttggagaagaggacccattaaaactttaaatatctgtgggaaccatttttcctgattttcccttttttaacatcatggcaaagatgggtttttttccaacaaaatttaatttaatatctttccacttgaagattttaggtttgttttcaatacttaatgaatataaaactaaaggagaaaagccaacctgaaataatttaaactttatatgaacatttcgataagagtttgtggattttttctgtagataatatatttgatccngaactcaagtgcatggaaacatgattttgatttttaaaatctaaaaaaaaaaaaaattaaaatcatgcttccctctattgcagtatcagttatttagtcacagaatggtattttatgtaaattaaaattaggtgaatgcaatgcaggtaactggttttggaatgggaatgtgcagtgctttatgtttggggagttggagcagggtatcttttcatcaattagaaggaaagtttgaaacttctgattacctttatgttggtttctcttattatttgtctcttgctagatctgctaaaccaacccagcttgctcagagatctcatattgaagcaacatacaggcaatccacatctttctttccctttgaagtatagtcattggatgggatgagggacagggcctgttgggttcacagggccttgcactgcatgggcacatacttaaaagctcttgtgcatggaatccctgtctgttagccacaggcctctttagctctatacattcaaaataactactgtagtagaaaatagataagcttcagctgagttggcttttgatagtggaaaaaaaacaaaatttgactttttatggccaaaattccttgttgacagctgtgatgttctaatatgatttgggaatatgtcagtctacagaacctgcatcctgtaaaaacacctttggggtagacgataaaagtcatttttaaggcaaatacttaccatgtgactttttattaccaaatgcatcagtagtggagctggtatgttgtttcataggatggaaacattagaagtccagagaaaaataaattttaaaaaaaggtggaaaagttacggcaaacctgagatttcagcataaaatctttagtatgaagtgagagaaagaagagggaggctggttctgttgctcgtatcaataggttatctgtgtccctcatcttggtgttacagtgttatttctgtcagtattatgaatatgtggttgacccatcctgtcaaatgtaccaacattttcgaaagaattcattcaaatctcttatgccaacagaaaagttccttcttgtttaatatctctttacctcagtcctacattttgattctctggaggagattttagcttgtcttaaaaagccaaatttggagtcatcaagcctgctgaacctgatggggcagctttttgaacagctttctggaagtaagaacttcagttgaaaagccctttgatcgcttcagcccgggacatgcccttcagatggcttattctcagtaaagctttatgtagactgtgacactgtatatgtgtgactcgtacaactttgacgtgtttctgaagtggtttaatcgtatttgttattagcttctttgtggaaatgcaatttttatactaaaaacattgcttatttgcaatgcaatatgttataaatttgttgtttatattactggtattagtcttagcctaatgaacctaattatttttctttctgtattctttgcttcctcaaatagcatctgcagcaattggaatgagaaatccagatatgtgtttcaagtagtacattgcctgaatcacaaatcacttgatcacagtattgtatataatccctgatcctatttgtttcattttattgtaaattcccatttgcatcaaaacctaatgatagtgattggtaagtaaaaacaaatggtgtattgcttttcatacaagtgttttcacaaaagccatttgcctaggcagcaaaaaatattaatttgttaaaaaaaattttccttcgtgtccatcctcaaa

SEQ ID NO: 343615 - DNA, 6103 bp, Homo sapiens
  misc_feature (4375)..(4375): n is a, c, g, or t
cgtggcctgcgggacgggcaagcggcgataagaggtggcgtcctccgcggcattgcgagcaccgccagtctgcgccgctaggcgtaggcggggtggcccttgcgtctcccgcttccttgaaaaacccggcgggcgagcgaggctgcgggccggccgctgcccttccccacactccccgccgagaagcctcgctcggcgcccaacatggcgggtgggcgctgcggcccgcagctaacggcgctcctggccgcctggatcgcggctgtggcggcgacggcaggccccgaggaggccgcgctgccgccggagcagagccgggtccagcccatgaccgcctccaactggacgctggtgatggagggcgagtggatgctgaaattttacgccccatggtgtccatcctgccagcagactgattcagaatgggaggcttttgcaaagaatggtgaaatacttcagatcagtgtggggaaggtagatgtcattcaagaaccaggtttgagtggccgcttctttgtcaccactctcccagcattttttcatgcaaaggatgggatattccgccgttatcgtggcccaggaatcttcgaagacctgcagaattatatcttagagaagaaatggcaatcagtcgagcctctgactggctggaaatccccggcttctctaacgatgtctggaatggctggtctttttagcatctctggcaagatatggcatcttcacaactatttcacagtgactcttggaattcctgcttggtgttcttatgtctttttcgtcatagccaccttggtttttggcctttttatgggtctggtcttggtggtaatatcagaatgtttctatgtgccacttccaaggcatttatctgagcgttctgagcagaatcggagatcagaggaggctcatagagctgaacagttgcaggatgcggaggaggaaaaagatgattcaaatgaagaagaaaacaaagacagccttgtagatgatgaagaagagaaagaagatcttggcgatgaggatgaagcagaggaagaagaggaggaggacaacttggctgctggtgtggatgaggagagaagtgaggccaatgatcaggggcccccaggagaggacggtgtgacccgggaggaagtagagcctgaggaggctgaagaaggcatctctgagcaaccctgcccagctgacacagaggtggtggaagactccttgaggcagcgtaaaagtcagcatgctgacaagggactgtagatttaatgatgcgttttcaagaatacacaccaaaacaatatgtcagcttccctttggcctgcagtttgtaccaaatccttaatttttcctgaatgagcaagcttctcttaaaagatgctctctagtcatttggtctcatggcagtaagcctcatgtatactaaggagagtcttccaggtgtgacaatcaggatatagaaaaacaaacgtagtgttgggatctgtttggagactgggatgggaacaagttcatttacttaggggtcagagagtctcgaccagaggaggccattcccagtcctaatcagcaccttccagagacaaggctgcaggccctgtgaaatgaaagccaagcaggagccttggctcctgagcatccccaaagtgtaacgtagaagccttgcatccttttcttgtgtaaagtatttatttttgtcaaattgcaggaaacatcaggcaccacagtgcatgaaaaatctttcacagctagaaattgaaagggccttgggtatagagagcagctcagaagtcatcccagccctctgaatctcctgtgctatgttttatttcttacctttaatttttccagcatttccaccatgggcattcaggctctccacactcttcactattatctcttggtcagaggactccaataacagccaggtttacatgaactgtgtttgttcattctgacctaaggggtttagataatcagtaaccataacccctgaagctgtgactgccaaacatctcaaatgaaatgttgtggccatcagagactcaaaaggaagtaaggattttacaagacagattaaaaaaaaattgttttgtccaaaatatagttgttgttgatttttttttaagttttctaagcaatatttttcaagccagaagtcctctaagtcttgccagtacaaggtagtcttgtgaagaaaagttgaatactgttttgttttcatctcaaggggttccctgggtcttgaactactttaataataactaaaaaaccacttctgattttccttcagtgatgtgcttttggtgaaagaattaatgaactccagtacctgaaagtgaaagatttgattttgtttccatcttctgtaatcttccaaagaattatatctttgtaaatctctcaatactcaatctactgtaagtacccagggaggctaatttccttaaaaaaaaaaaatctatccatctacttctctcttacctgatttatgtgttagaataaattcatgaaattcgattccaagcatacgaaagatgcctaaagttgattctatgctccttagatccagacagaataatgagtacaggtttatgaaattctaaaagtttctgtcgtctttaaaaaggaacgtgcagtatatttctatctggctgtttagataaccctttccttgtattaattgtgagcacggagctcactggtgggggaggttctgaaactctctgccctcctgtggttgaatgaagatgttgcaagacttgcacaaaggaggttattcttctgacagcatcaacttttagagatggttctttttcatctttccaattcagttacttgacagtctccttccccagtatgctgaagtttgttaagagtcaccagtaattgtgcttttcagacagtagtgcagcttcaaaatcgaggccatcactgggctgatgggctgggagaaccttgccatgtgcctgcctgtttcctgcccccttagtcactgcccatttcctgcccccttggtcgctgacacaccttcacccaaagtgccatggttctgatggtggcagttccatctccctgacatcaggaagcttttctcgatcagagcagagcggggcctgcctgccctcgtgtcactggatttctttctcttataatcagctgaaacagagttctcaaagaacagtaaactcaggttcagaggtattatggaataagaatggtttcatagtttggcttttctatataattcctccctctcaaactgaaatattcatttttttagtggagtatttgactagagagaaggtaaggcagaaatacagtctacactggcttttaaaaatgtaaagccaatttccaaccggaccccaaatagtacaggttgaacattccgttccaacaatccaaaaccccaaatgctccaaaatcttaaactttgagttccagcattccgtcagaagtggaaaattttacacctgacctcatttgacaggtggcagttacagtgcaatcaaaactttgttccatgcccaagattattaaaaatattggataaaattaccttcaagctatgttgtataaggtgtatataaaacaaatgaattttgtgtttagacttgggtctactcccaagatacctcattatatatatacaaaaatccccaaatccaaaaacatttgaaacacttctggtcccacacattttggataagggatatttgacctatatctaattatataataagaaaaatgtattttcttttttttttttttttgagatggagtttcactcttgttgtcgcccaggctgcaatggcacaatcttggcttactacaacctccgcctccctagttcaagggattctcctgcctcagcctcccaggtagctgggattacaggcatgtgccaccatgcctggctaattttgtatttttagtagagacggggtttcgccatgttggtcagactggtcttgaactcctgacctcaggtgatccgcccgcctcagcctcccaacgtgctgggattacaggtgtgagccaccgtacctggcagaaaatgtactttctttctcagaaatacttttaaaaaaaattgaagggtgaggagaaaaacatcttggagaagaggacccattaaaactttaaatatctgtgggaaccatttttcctgattttcccttttttaacatcatggcaaagatgggtttttttccaacaaaatttaatttaatatctttccacttgaagattttaggtttgttttcaatacttaatgaatataaaactaaaggagaaaagccaacctgaaataatttaaactttatatgaacatttcgataagagtttgtggattttttctgtagataatatatttgatccngaactcaagtgcatggaaacatgattttgatttttaaaatctaaaaaaaaaaaaaattaaaatcatgcttccctctattgcagtatcagttatttagtcacagaatggtattttatgtaaattaaaattaggtgaatgcaatgcaggtaactggttttggaatgggaatgtgcagtgctttatgtttggggagttggagcagggtatcttttcatcaattagaaggaaagtttgaaacttctgattacctttatgttggtttctcttattatttgtctcttgctagatctgctaaaccaacccagcttgctcagagatctcatattgaagcaacatacaggcaatccacatctttctttccctttgaagtatagtcattggatgggatgagggacagggcctgttgggttcacagggccttgcactgcatgggcacatacttaaaagctcttgtgcatggaatccctgtctgttagccacaggcctctttagctctatacattcaaaataactactgtagtagaaaatagataagcttcagctgagttggcttttgatagtggaaaaaaaacaaaatttgactttttatggccaaaattccttgttgacagctgtgatgttctaatatgatttgggaatatgtcagtctacagaacctgcatcctgtaaaaacacctttggggtagacgataaaagtcatttttaaggcaaatacttaccatgtgactttttattaccaaatgcatcagtagtggagctggtatgttgtttcataggatggaaacattagaagtccagagaaaaataaattttaaaaaaaggtggaaaagttacggcaaacctgagatttcagcataaaatctttagtatgaagtgagagaaagaagagggaggctggttctgttgctcgtatcaataggttatctgtgtccctcatcttggtgttacagtgttatttctgtcagtattatgaatatgtggttgacccatcctgtcaaatgtaccaacattttcgaaagaattcattcaaatctcttatgccaacagaaaagttccttcttgtttaatatctctttacctcagtcctacattttgattctctggaggagattttagcttgtcttaaaaagccaaatttggagtcatcaagcctgctgaacctgatggggcagctttttgaacagctttctggaagtaagaacttcagttgaaaactttatgtagactgtgacactgtatatgtgtgactcgtacaactttgacgtgtttctgaagtggtttaatcgtatttgttattagcttctttgtggaaatgcaatttttatactaaaaacattgcttatttgcaatgcaatatgttataaatttgttgtttatattactggtattagtcttagcctaatgaacctaattatttttctttctgtattctttgcttcctcaaatagcatctgcagcaattggaatgagaaatccagatatgtgtttcaagtagtacattgcctgaatcacaaatcacttgatcacagtattgtatataatccctgatcctatttgtttcattttattgtaaattcccatttgcatcaaaacctaatgatagtgattggtaagtaaaaacaaatggtgtattgcttttcatacaagtgttttcacaaaagccatttgcctaggcagcaaaaaatattaatttgttaaaaaaaattttccttcgtgtccatcctcaaa

SEQ ID NO: 343616 - DNA, 6076 bp, Homo sapiens
  misc_feature (4291)..(4291): n is a, c, g, or t
cgtggcctgcgggacgggcaagcggcgataagaggtggcgtcctccgcggcattgcgagcaccgccagtctgcgccgctaggcgtaggcggggtggcccttgcgtctcccgcttccttgaaaaacccggcgggcgagcgaggctgcgggccggccgctgcccttccccacactccccgccgagaagcctcgctcggcgcccaacatggcgggtgggcgctgcggcccgcagctaacggcgctcctggccgcctggatcgcggctgtggcggcgacggcaggccccgaggaggccgcgctgccgccggagcagagccgggtccagcccatgaccgcctccaactggacgctggtgatggagggcgagtggatgctgaaattttacgccccatggtgtccatcctgccagcagactgattcagaatgggaggcttttgcaaagaatggtgaaatacttcagatcagtgtggggaaggtagatgtcattcaagaaccaggaatcttcgaagacctgcagaattatatcttagagaagaaatggcaatcagtcgagcctctgactggctggaaatccccggcttctctaacgatgtctggaatggctggtctttttagcatctctggcaagatatggcatcttcacaactatttcacagtgactcttggaattcctgcttggtgttcttatgtctttttcgtcatagccaccttggtttttggcctttttatgggtctggtcttggtggtaatatcagaatgtttctatgtgccacttccaaggcatttatctgagcgttctgagcagaatcggagatcagaggaggctcatagagctgaacagttgcaggatgcggaggaggaaaaagatgattcaaatgaagaagaaaacaaagacagccttgtagatgatgaagaagagaaagaagatcttggcgatgaggatgaagcagaggaagaagaggaggaggacaacttggctgctggtgtggatgaggagagaagtgaggccaatgatcaggggcccccaggagaggacggtgtgacccgggaggaagtagagcctgaggaggctgaagaaggcatctctgagcaaccctgcccagctgacacagaggtggtggaagactccttgaggcagcgtaaaagtcagcatgctgacaagggactgtagatttaatgatgcgttttcaagaatacacaccaaaacaatatgtcagcttccctttggcctgcagtttgtaccaaatccttaatttttcctgaatgagcaagcttctcttaaaagatgctctctagtcatttggtctcatggcagtaagcctcatgtatactaaggagagtcttccaggtgtgacaatcaggatatagaaaaacaaacgtagtgttgggatctgtttggagactgggatgggaacaagttcatttacttaggggtcagagagtctcgaccagaggaggccattcccagtcctaatcagcaccttccagagacaaggctgcaggccctgtgaaatgaaagccaagcaggagccttggctcctgagcatccccaaagtgtaacgtagaagccttgcatccttttcttgtgtaaagtatttatttttgtcaaattgcaggaaacatcaggcaccacagtgcatgaaaaatctttcacagctagaaattgaaagggccttgggtatagagagcagctcagaagtcatcccagccctctgaatctcctgtgctatgttttatttcttacctttaatttttccagcatttccaccatgggcattcaggctctccacactcttcactattatctcttggtcagaggactccaataacagccaggtttacatgaactgtgtttgttcattctgacctaaggggtttagataatcagtaaccataacccctgaagctgtgactgccaaacatctcaaatgaaatgttgtggccatcagagactcaaaaggaagtaaggattttacaagacagattaaaaaaaaattgttttgtccaaaatatagttgttgttgatttttttttaagttttctaagcaatatttttcaagccagaagtcctctaagtcttgccagtacaaggtagtcttgtgaagaaaagttgaatactgttttgttttcatctcaaggggttccctgggtcttgaactactttaataataactaaaaaaccacttctgattttccttcagtgatgtgcttttggtgaaagaattaatgaactccagtacctgaaagtgaaagatttgattttgtttccatcttctgtaatcttccaaagaattatatctttgtaaatctctcaatactcaatctactgtaagtacccagggaggctaatttccttaaaaaaaaaaaatctatccatctacttctctcttacctgatttatgtgttagaataaattcatgaaattcgattccaagcatacgaaagatgcctaaagttgattctatgctccttagatccagacagaataatgagtacaggtttatgaaattctaaaagtttctgtcgtctttaaaaaggaacgtgcagtatatttctatctggctgtttagataaccctttccttgtattaattgtgagcacggagctcactggtgggggaggttctgaaactctctgccctcctgtggttgaatgaagatgttgcaagacttgcacaaaggaggttattcttctgacagcatcaacttttagagatggttctttttcatctttccaattcagttacttgacagtctccttccccagtatgctgaagtttgttaagagtcaccagtaattgtgcttttcagacagtagtgcagcttcaaaatcgaggccatcactgggctgatgggctgggagaaccttgccatgtgcctgcctgtttcctgcccccttagtcactgcccatttcctgcccccttggtcgctgacacaccttcacccaaagtgccatggttctgatggtggcagttccatctccctgacatcaggaagcttttctcgatcagagcagagcggggcctgcctgccctcgtgtcactggatttctttctcttataatcagctgaaacagagttctcaaagaacagtaaactcaggttcagaggtattatggaataagaatggtttcatagtttggcttttctatataattcctccctctcaaactgaaatattcatttttttagtggagtatttgactagagagaaggtaaggcagaaatacagtctacactggcttttaaaaatgtaaagccaatttccaaccggaccccaaatagtacaggttgaacattccgttccaacaatccaaaaccccaaatgctccaaaatcttaaactttgagttccagcattccgtcagaagtggaaaattttacacctgacctcatttgacaggtggcagttacagtgcaatcaaaactttgttccatgcccaagattattaaaaatattggataaaattaccttcaagctatgttgtataaggtgtatataaaacaaatgaattttgtgtttagacttgggtctactcccaagatacctcattatatatatacaaaaatccccaaatccaaaaacatttgaaacacttctggtcccacacattttggataagggatatttgacctatatctaattatataataagaaaaatgtattttcttttttttttttttttgagatggagtttcactcttgttgtcgcccaggctgcaatggcacaatcttggcttactacaacctccgcctccctagttcaagggattctcctgcctcagcctcccaggtagctgggattacaggcatgtgccaccatgcctggctaattttgtatttttagtagagacggggtttcgccatgttggtcagactggtcttgaactcctgacctcaggtgatccgcccgcctcagcctcccaacgtgctgggattacaggtgtgagccaccgtacctggcagaaaatgtactttctttctcagaaatacttttaaaaaaaattgaagggtgaggagaaaaacatcttggagaagaggacccattaaaactttaaatatctgtgggaaccatttttcctgattttcccttttttaacatcatggcaaagatgggtttttttccaacaaaatttaatttaatatctttccacttgaagattttaggtttgttttcaatacttaatgaatataaaactaaaggagaaaagccaacctgaaataatttaaactttatatgaacatttcgataagagtttgtggattttttctgtagataatatatttgatccngaactcaagtgcatggaaacatgattttgatttttaaaatctaaaaaaaaaaaaaattaaaatcatgcttccctctattgcagtatcagttatttagtcacagaatggtattttatgtaaattaaaattaggtgaatgcaatgcaggtaactggttttggaatgggaatgtgcagtgctttatgtttggggagttggagcagggtatcttttcatcaattagaaggaaagtttgaaacttctgattacctttatgttggtttctcttattatttgtctcttgctagatctgctaaaccaacccagcttgctcagagatctcatattgaagcaacatacaggcaatccacatctttctttccctttgaagtatagtcattggatgggatgagggacagggcctgttgggttcacagggccttgcactgcatgggcacatacttaaaagctcttgtgcatggaatccctgtctgttagccacaggcctctttagctctatacattcaaaataactactgtagtagaaaatagataagcttcagctgagttggcttttgatagtggaaaaaaaacaaaatttgactttttatggccaaaattccttgttgacagctgtgatgttctaatatgatttgggaatatgtcagtctacagaacctgcatcctgtaaaaacacctttggggtagacgataaaagtcatttttaaggcaaatacttaccatgtgactttttattaccaaatgcatcagtagtggagctggtatgttgtttcataggatggaaacattagaagtccagagaaaaataaattttaaaaaaaggtggaaaagttacggcaaacctgagatttcagcataaaatctttagtatgaagtgagagaaagaagagggaggctggttctgttgctcgtatcaataggttatctgtgtccctcatcttggtgttacagtgttatttctgtcagtattatgaatatgtggttgacccatcctgtcaaatgtaccaacattttcgaaagaattcattcaaatctcttatgccaacagaaaagttccttcttgtttaatatctctttacctcagtcctacattttgattctctggaggagattttagcttgtcttaaaaagccaaatttggagtcatcaagcctgctgaacctgatggggcagctttttgaacagctttctggaagtaagaacttcagttgaaaagccctttgatcgcttcagcccgggacatgcccttcagatggcttattctcagtaaagctttatgtagactgtgacactgtatatgtgtgactcgtacaactttgacgtgtttctgaagtggtttaatcgtatttgttattagcttctttgtggaaatgcaatttttatactaaaaacattgcttatttgcaatgcaatatgttataaatttgttgtttatattactggtattagtcttagcctaatgaacctaattatttttctttctgtattctttgcttcctcaaatagcatctgcagcaattggaatgagaaatccagatatgtgtttcaagtagtacattgcctgaatcacaaatcacttgatcacagtattgtatataatccctgatcctatttgtttcattttattgtaaattcccatttgcatcaaaacctaatgatagtgattggtaagtaaaaacaaatggtgtattgcttttcatacaagtgttttcacaaaagccatttgcctaggcagcaaaaaatattaatttgttaaaaaaaattttccttcgtgtccatcctcaaa

SEQ ID NO: 343617 - DNA, 2090 bp, Homo sapiens
cgtggcctgcgggacgggcaagcggcgataagaggtggcgtcctccgcggcattgcgagcaccgccagtctgcgccgctaggcgtaggcggggtggcccttgcgtctcccgcttccttgaaaaacccggcgggcgagcgaggctgcgggccggccgctgcccttccccacactccccgccgagaagcctcgctcggcgcccaacatggcgggtgggcgctgcggcccgcagctaacggcgctcctggccgcctggatcgcggctgtggcggcgacggcaggccccgaggaggccgcgctgccgccggagcagagccgggtccagcccatgaccgcctccaactggacgctggtgatggagggcgagtggatgctgaaattttacgccccatggtgtccatcctgccagcagactgattcagaatgggaggcttttgcaaagaatggtgaaatacttcagatcagtgtggggaaggtagatgtcattcaagaaccaggtttgagtggccgcttctttgtcaccactctcccagcattttttcatgcaaaggatgggatattccgccgttatcgtggcccaggaatcttcgaagacctgcagaattatatcttagagaagaaatggcaatcagtcgagcctctgactggctggaaatccccggcttctctaacgatgtctggaatggctggtctttttagcatctctggcaagatatggcatcttcacaactatttcacagtgactcttggaattcctgcttggtgttcttatgtctttttcgtcatagccaccttggtttttggcctttttatgggtctggtcttggtggtaatatcagaatgtttctatgtgccacttccaaggcatttatctgagcgttctgagcagaatcggagatcagaggaggctcatagagctgaacagttgcaggatgcggaggaggaaaaagatgattcaaatgaagaagaaaacaaagacagccttgtagatgatgaagaagagaaagaagatcttggcgatgaggatgaagcagaggaagaagaggaggaggacaacttggctgctggtgtggatgaggagagaagtgaggccaatgatcaggggcccccaggagaggacggtgtgacccgggaggaagtagagcctgaggaggctgaagaaggcatctctgagcaaccctgcccagctgacacagaggtggtggaagactccttgaggcagcgtaaaagtcagcatgctgacaagggactgtagatttaatgatgcgttttcaagaatacacaccaaaacaatatgtcagcttccctttggcctgcagtttgtaccaaatccttaatttttcctgaatgagcaagcttctcttaaaagatgctctctagtcatttggtctcatggcagtaagcctcatgtatactaaggagagtcttccaggtgtgacaatcaggatatagaaaaacaaacgtagtgttgggatctgtttggagactgggatgggaacaagttcatttacttaggggtcagagagtctcgaccagaggaggccattcccagtcctaatcagcaccttccagagacaaggctgcaggccctgtgaaatgaaagccaagcaggagccttggctcctgagcatccccaaagtgtaacgtagaagccttgcatccttttcttgtgtaaagtatttatttttgtcaaattgcaggaaacatcaggcaccacagtgcatgaaaaatctttcacagctagaaattgaaagggccttgggtatagagagcagctcagaagtcatcccagccctctgaatctcctgtgctatgttttatttcttacctttaatttttccagcatttccaccatgggcattcaggctctccacactcttcactattatctcttggtcagaggactccaataacagccaggtttacatgaactgtgtttgttcattctgacctaaggggtttagataatcagtaaccataacccctgaagctgtgactgccaaacatctcaaatgaaatgttgtggccatcagagactcaaaaggaagtaaggattttacaagacagattaaaaaaaaattgttttgtcca

SEQ ID NO: 343618 - DNA, 574 bp, Homo sapiens
cgtggcctgcgggacgggcaagcggcgataagaggtggcgtcctccgcggcattgcgagcaccgccagtctgcgccgctaggcgtaggcggggtggcccttgcgtctcccgcttccttgaaaaacccggcgggcgagcgaggctgcgggccggccgctgcccttccccacactccccgccgagaagcctcgctcggcgcccaacatggcgggtgggcgctgcggcccgcagctaacggcgctcctggccgcctggatcgcggctgtggcggcgacggcaggccccgaggaggccgcgctgccgccggagcagagccgggtccagcccatgaccgcctccaactggacgctggtgatggagggcgagtggatgctgaaattatacagatatgtattggaagagaaaggacattcagtgacatccacgtgcagtatgaatacgtagcacaggctaagcaagttacctgttgaagaaattgcagcacggtgaaggcaggccatttgtgtcgtagtcttccgtttgaagacctggagatgtcattgtgagaataaaacataaatatggatgcctttta

SEQ ID NO: 343619 - DNA, 793 bp, Homo sapiens
actcatagtgcaatgaaaaattattgaagggattttaaaagggaaatgatgtaatacaatctacttctttttttgagacagggtcttgctctgttgcccaggctagggtgtagtggtacaatcaaatcatagctcactgcaacctcaaattcctgggctcaagcaatcctcccacctcggcctctcaagtagctgggactacagttgcaagccaccttctaattttttctagagatgggtctcactatgttgtgcaggttagtctcaaacttctgggcttaagtgatcctcccaccttagcctttcaaagtgctgggttttcaggtgtgagccactgcatctggccacagtctacatttttaaaatgtcactttatcttctgtgtatagaatgttgggggagatgtaggaagggaaacaaggggtacaatttagatagttaatgaagaagtccagtgaaaaagaatagtagcttggactaggatggtagccatgaacacaagggaaataggcagagatgtgagatatatttcagggttctataaaattcagaggattaataatattgattccatgttgttgttaagaataaatgacccataataagtgatgaataaacattagctattattacaatcattaatgggcttttcaaaaggaagggatcagaaaaagtttttaacatcatgaaaaatcctaaatattaaaaacacctaatggaagcctatgagagttcttctggcaatgcaaatgaattagaaaagagtagtttaactggaaattaggaatctgat

SEQ ID NO: 343620 - DNA, 453 bp, Homo sapiens
cgatctagaggatccggtgtttatcgatgcatttatcttctgtgtatagaatgttgggggagatgtaggaagggaaacaaggggtacaatttagatagttaatgaagaagtccagtgaaaaagaatagtagcttggactaggatggtagccatgaacacaagggaaataggcagagatgtgagatatatttcagggttctataaaattcagaggattaataatattgattccatgttgttgttaagaataaatgacccataataagtgatgaataaacattagctattattacaatcattaatgggcttttcaaaaggaagggatcagaaaaagtttttaacatcatgaaaaatcctaaatattaaaaacacctaatggaagcctatgagagttcttctggcaatgcaaatgaattagaaaagagtagtttaactggaaattaggaatctgat

SEQ ID NO: 343621 - DNA, 311 bp, Homo sapiens
caggacaaggaacctcctccagaataggcaagaaacatgcaggctggagagctggatacggcttcctcctggaacagccatatcctcacaactgtatttcctcaggacggtgggggcagccccaaatctttacacaaaagaatacggactttggaatgagtccaactgggtcaaatctcagctgtgtagcttagtgtgatgttggacgagccatcggtctctctgagctgtagtgtcttcacctgtaaagtgcacagttaactgatagcgtttgattcttggtaatccaccagcatacctgttagttttca

SEQ ID NO: 343622 - DNA, 614 bp, Homo sapiens
cactcggctccaggtatcctggaggaaagaacgaacttctcctgggcccagaagtttaggtccgctgtcgtcccccgcctgcctctaaggccctctcctcgcgacagcctctgaaaccatcggctccttcctcatttctgtcacggcctggcttgcattccaagccaggcactcatttcatgtttattgttccagctggactaggggtacttaaaccgtggtccatggctgggcttccggggccgtgacccccttaaattatatgcagtatgtagcttgttgtgggtggcttctgtcacacttaaatgctgggtgccatcacaggactggcagggccctactgtggtcgtcagtgcgctctttgtcagcacagagcctgacgcaaatgtccaaaggtgctaattagacagaggcaaatatcccaactgttgccctctgcacacacctcggtctactcttttaagactacttgctgttacctgcacacacctttatttatttatttatttatttatttaatttttgagacagggtctcgctctgtcgcccaggctggagtgcagtggcgcgatctcggctcacgggctcaagcgaccctcctgcctcagcctccc

SEQ ID NO: 343623 - DNA, 491 bp, Homo sapiens
taaaaagatgtcgccttcgataggaagatttggggccagacatcagaaatccacgtgggagagactggccgtacacttccagatggaacaagtctgcccagtgatgtgagttccatctctttttgattctggaactccactttcatcttatttatgcacatggagatattgataaaggggaaatgtatccaaactgaaaataattggatccctacagctaactctgagatattaaaagcagtaccacttggctgtgtctttgtcttgttaggtttgatcataagatcacaatgtagtaatctcgggctcaaatttctggcataaagatgcactgttccaaatgtggcctcagggaacacgactgcccacacagccccaggattgtctcatcttattatttttcaacagttcttggcctgctgaggtcaatgttttgtctcttttgagtgttcctctatgcttgacaccttttcctattttctttcttaaaa

SEQ ID NO: 343624 - DNA, 303 bp, Homo sapiens
acgagacacacagcacacgcacacatcattgcactacacagcagactagcacacgagcacacacacaaagacacagcacacacatgcacacacagcggcacacacgcgcacacatacacacacacacacatccacacgtgctcatgtgtgtacacatgcccatacactccacataggtgcacatatacacatgtattcatgcatatacgagcctgtccacgtgcacacccatacaggtatatacatacactcatacatgtgcacgtatccacatgtgtatccacatacatgactatgagccct

SEQ ID NO: 343625 - DNA, 402 bp, Homo sapiens
gtcctgcagctcctcccagaggccacttataagcagccctgccatgtggccacacagcactggtcatgccatacccatgcacagtcatacatgtccacacacacatgcacacgtgtgcccaaacatgcatgcacatatatggccgtacttatacatgtgtgcacacatacacatgcatctatgcacatacatgcccatacacacgcgcacacatacacacacacacacatccacacgtgctcatgtgtgtacacatgcccatacactccacataggtgcacatatacacatgtattcatgcatatacgagcctgtccacgtgcacacccatacaggtatatacatacactcatacatgtgcacgtatccacatgtgtatccacatacatgactatgagccct

SEQ ID NO: 343626 - DNA, 380 bp, Homo sapiens
tcatttattggtagtttacatcagttgagtggttcagaaaaaatacagtaagttgcttataaaattctgaacactttggccaggcacaatggctcaagcctgtaatttgagccctttgtgaggctgaggcaggagaattgcttgagcttaggcgttcaagaccagcctaggtaacaaagaacgcctggaatgattgtggcatttgaactaatattcaggtttaacaagagataattgaccatcactctattttagaggctttatttgaaccagatagaaatctatttcccacagctatcactgcctgtcacctacaacttaagggggttggggaggaagtgagagattttctgttagggccaatagggacctgctagata

SEQ ID NO: 343627 - DNA, 1078 bp, Homo sapiens
cgtttggccctctgaacaaggtgcacgcgagctgggggatgaagacggctcccacttccttttccttaataagaaccatatggtgggtgtatgtgtgtacaagaggggttcatctgtgggggcttcctctccttccaccctctggttccaatttcctgttctaagcaggactagggcccaggaggctaaggctgggagagaaagggtgccaacaggtcccttgggaatgagttggctctggacgtttctgccctgttccccgatcagagctcctctgcaggaaacaggcaggatgcccctcccaacccctcagtccctacgtcaagcggagtggataaggctgagatgagtgctgggagtggtggacattcctgctcgtgcaaagatggccactttccccgcagctgcagggcctcgcgctcggccctcgccaggccagccccactccttgtaccaagtgtgaactggggtcattcggtctgtgatctcgttgcactgctccaagtctggctgtgtccaggcggtccatgttgaaaatggaggatggctgctgacttctgactggctgagcagtgggttccttcaggttccttgccaaccctcctcccctgcccacaacttctccaaacaaagcaggctgtttgctcacttcttcaaaaggaggaatgataacccaaatctgcccaagtgacacttgagaaggttttggctggggttcctggtggatttcttactacctaacgcccaagaaaaccaactaaggactctcaaaccatacctggtgggggttcttcgctcaacctcttcttccctaggtcaaagccactatcatctgatgtgttagggatgggttctgattggcagaaattaatcagctcccaatgggagcccacggaactaagtagggtcccaagaaaaaaaacgggagctatttcacagagctgagcttctgccaaatttcattcctcaaacctttcaggaggggtggttggcgtttctaaaatgtttatgggatttgagttgcaggtgtccacttaactgactagctttgataaacaatgtcagattttaactatga

SEQ ID NO: 343628 - DNA, 286 bp, Homo sapiens
ggtgctccgaggatcccccaattacctcactaaataaggactctcaaaccatacctggtgggggttcttcgctcaacctcttcttccctaggtcaaagccactatcatctgatgtgttagggatgggttctgattggcagaaattaatcagctcccaatgggagcccacggaactaagtagggtcccaagaaaaaaaacgggagctatttcacagagctgagcttctgccaaatttcattcctcaaacctttcaggagggttaattccgcgtaagatccctgagtc

SEQ ID NO: 343629 - DNA, 625 bp, Homo sapiens
ggtgctccgaggatcccccaattacctcactaaataaggactctcaaaccatacctggtgggggttcttcgctcaacctcttcttccctaggtcaaagccactatcatctgatgtgttagggatgggttctgattggcagaaattaatcagctcccaatgggagcccacggaactaagtagggtcccaagaaaaaaaacgggagctatttcacagagctgagcttctgccaaatttcattcctcaaacctttcaggaggggtggttggcgtttctaaaatgtttatgggatttgagttgcaggtgtccacttaactgactagctttgataaacaatgtcagattttaactatgaaaacgacattaccttgtgcatttttatattgattcctattttttttttaagattaaagtttaaatgttttccactagtcatttcacttctaacttggtataggaagcttagctctctacatacctatcatgtgccctgtatcacagaagattcaggaaaaatgcacttgggaatcaaagaaaatggaacttctttttgaaaagacaagcaaccatgttaactgtattgacacatcctcaataaaacctgttgtataaaacaaaaactgtgc

SEQ ID NO: 343630 - DNA, 621 bp, Homo sapiens
cggctccgaggattacgcagaaataacccttaaggactctcaaaccatacctggtgggggttcttcgctcaacctcttcttccctaggtcaaagccactatcatctgatgtgttagggatgggttctgattggcagaaattaatcagctcccaatgggagcccacggaactaagtagggtcccaagaaaaaaaacgggagctatttcacagagctgagcttctgccaaatttcattcctcaaacctttcaggaggggtggttggcgtttctaaaatgtttatgggatttgagttgcaggtgtccacttaactgactagctttgataaacaatgtcagattttaactatgaaaacgacattaccttgtgcatttttatattgattcctattttttttttaagattaaagtttaaatgttttccactagtcatttcacttctaacttggtataggaagcttagctctctacatacctatcatgtgccctgtatcacagaagattcaggaaaaatgcacttgggaatcaaagaaaatggaacttctttttgaaaagacaagcaaccatgttaactgtattgacacatcctcaataaaacctgttgtataaaacaaaaactgtgc

SEQ ID NO: 343631 - DNA, 1349 bp, Homo sapiens
cgtttggccctctgaacaaggtgcacgcgagctgggggatgaagacggctcccacttccttttccttaataagaaccatatggtgggtgtatgtgtgtacaagaggggttcatctgtgggggcttcctctccttccaccctctggttccaatttcctgttctaagcaggactagggcccaggaggctaaggctgggagagaaagggtgccaacaggtcccttgggaatgagttggctctggacgtttctgccctgttccccgatcagagctcctctgcaggaaacaggcaggatgcccctcccaacccctcagtccctacgtcaagcggagtggataaggctgagatgagtgctgggagtggtggacattcctgctcgtgcaaagatggccactttccccgcagctgcagggcctcgcgctcggccctcgccaggccagccccactccttgtaccaagtgtgaactggggtcattcggtctgtgatctcgttgcactgctccaagtctggctgtgtccaggcggtccatgttgaaaatggaggatggctgctgacttctgactggctgagcagtgggttccttcaggttccttgccaaccctcctcccctgcccacaacttctccaaacaaagcaggctgtttgctcacttcttcaaaaggaggaatgataacccaaatctgcccaagtgacacttgagaaggttttggctggggttcctggtggatttcttactacctaacgcccaagaaaaccaactaaggactctcaaaccatacctggtgggggttcttcgctcaacctcttcttccctaggtcaaagccactatcatctgatgtgttagggatgggttctgattggcagaaattaatcagctcccaatgggagcccacggaactaagtagggtcccaagaaaaaaaacgggagctatttcacagagctgagcttctgccaaatttcattcctcaaacctttcaggaggggtggttggcgtttctaaaatgtttatgggatttgagttgcaggtgtccacttaactgactagctttgataaacaatgtcagattttaactatgaaaacgacattaccttgtgcatttttatattgattcctattttttttttaagattaaagtttaaatgttttccactagtcatttcacttctaacttggtataggaagcttagctctctacatacctatcatgtgccctgtatcacagaagattcaggaaaaatgcacttgggaatcaaagaaaatggaacttctttttgaaaagacaagcaaccatgttaactgtattgacacatcctcaataaaacctgttgtataaaacaaaaactgtgc

SEQ ID NO: 343632 - DNA, 729 bp, Homo sapiens
gagaaagggctaatgtctgagcagtcgggtggcttcctagatgaggggactgtcctcccaggagctgctactcagagtagtttcttgtcctcctaaagtttagagtggaaatactttgcaaaagaggtccccaaccctaagtgtgagggctaagctcctgggcttagtaggcatatacaaatgcccccaggtgggtgacatcaagatgttctggtcctaggtctgctgagagcctctcctgggaatgttgtaggtactgcctttcccttttaggaaacaccatatcctcctaccactaacccccatccttgccctaaccagcaatctgtaacatcctgggcctcagggacgtgggtggagggtgactctgagctccagatagtgtctaggaggctcaaataagcctgctttttggtcctcaccctagccgtgggccaccctactactccagcctgggcgacagagcaagactccgtctcaaaaaaaaaaaaaaaaaaaaaaaaaaaaaaagatacttctccaaagtgttctcatgtggcctcacccaggtcttgtgtattatttggtaattaatttatggatcttaaaaactgcagtattcccccattttgtgatgagagtgtggggctggcaggggttggttggagggaggagagaagacagaggagcacttaaggtgcaaagcagcctattttttcttcaataaaaattgttaagagaaaaaaaaat

SEQ ID NO: 343633 - DNA, 1196 bp, Homo sapiens
catggaggccctgggacctgggggcgaccgcgcctccccggcctcgtccactagcagcctggacctgtggcatctgtccatgcgcgcggactcggcctacagctctttctccgcagcctccggcggccccgagccgcgcacgcagtcgccggggacagacctccttccttacctagactgggactacgtgcgtgtggtttggggcggcccgggccccgccccgcccgacgctgccctttgcacatccccgcggccccggcccgcggttgcagcccgcagtgggccgcagccaacagaggtcccggggaccccgggaccactgaacaggcaggccaccccgctgctgtacgcgctggcggccgaggcggaggccgcggcgcaggctgccgagccgcccagcccgccggcctcgagggccgcctaccgccagcggcttcagggcgcgcagcggcgagtgctccgggagacgtcgttccagcgcaaggagctccgcatgagcctgcccgcccgtctgcggcccactgtcccagcgcggcccccggcgactcacccgcgctccgcctcgctcagccacccgggcggggagggggagccggcgcgctcccgggctcccgcgccaggaactgccggccggggtcccctcgccaaccagcagcggaagtggtgcttctcagagccaggaaagctggatcgtgtgggtcggggcggtgggccggcgcgggaatgcctgggtgaggcctgctccagctctggcctccctgggcccgagcccttggagttccagcatccggcgctggctaagtttgaagatcacgaggtcggatggctgcccgagacgcaaccccaaggctccatgaacctggactccgggtccttgaagctcggtgatgccttcaggcccgccagtcggagtcggagcgcttcaggcgaagtcttgggttcctggggaggatcaggagggaccatacccattgtccaggctgttccccaaggagcagaaacccccagaccattgtttcagaccaaactttccaggttcttgcctcagaaagaggctgcggtgatgtatcctgcagagttaccccagagcagccctgctgacagtgaacagagggtctcagagaagacagaggagcacttaaggtgcaaagcagcctattttttcttcaataaaaattgttaagagaaaaaaaaat

SEQ ID NO: 343634 - DNA, 1848 bp, Homo sapiens
gagaaagggctaatgtctgagcagtcgggtggcttcctagatgaggggactgtcctcccaggagctgctactcagagtagtttcttgtcctcctaaagtttagagtggaaatactttgcaaaagaggtccccaaccctaagtgtgagggctaagctcctgggcttagtaggcatatacaaatgcccccaggtgggtgacatcaagatgttctggtcctaggtctgctgagagcctctcctgggaatgttgtaggtactgcctttcccttttaggaaacaccatatcctcctaccactaacccccatccttgccctaaccagcaatctgtaacatcctgggcctcagggacgtgggtggagggtgactctgagctccagatagtgtctaggaggctcaaataagcctgctttttggtcctcaccctagccgtgggccaccctactctgcactccctaccaagcagctcagagaatggaggccagcgcccaaaagtctccatagttcatagggagccccaaacctcaacactgccctttcccaagcctcaaaatttctcttaccctgacccaggcacacccactcaactcttacccttgatccccctcccaggaccagaagggattgatttctggtgagtcctgccccaagctgtgcttgcctgctctgttcgtacctaatattgcatgaggaacctggccagtgtctatggtggcaagtgcttcacccattctgtcctcttccccagaaaagactaatagggagggaagaagcgtgcgcagaagctaaggaactctcttccttctctaccaaggccacccctacatctactccctgcaaatctgttatttcccttgacattcagcaaatatttggggttttgttttgttttgttttgttttgttttgttttgagacagagcctcactttgtcgccaggctggagtgcagtggcgcgatctcggctcactacaacttccgcctcccgggttcaagcgattcttctgcctcagcctcccgagtagctgggactacaggcgtgtgccaccacgcccagctaatttttggtatttttagtagagatggggtttcacgatcttggccatcatgccccgtctcccagcccggcgcggcccccagggacctgtcctccagttcagccgcccttccctcttctccttacatagttataggtggagagggtggggtgcaccgcccctatctctcacccacgtaagtggggtgatgctgatttagtctctgcttttcccttgagggattggggaggacccagtccaggcctttctaagatactcctccagccgggcgcggtggctcacgcctgtaatcccagcactttgggaggccgaggcgggcggatcacaaggtcaggagatcgagaccatcctggctaacacggtgaaaccccgtctctactaaaaatataaaaaattagccgggcgtggtggcgggtgcctgtattgccagctactcggaaggctgaggcaggagaatggcgtgaacctgggaggtggagcttgcagtgagcggacatcgcgccactgcactccagcctgggcgacagagcaagactccgtctcaaaaaaaaaaaaaaaaaaaaaaaaaaaaaaagatacttctccaaagtgttctcatgtggcctcacccaggtcttgtgtattatttggtaattaatttatggatcttaaaaactgcagtattcccccattttgtgatgagagtgtggggctggcaggggttggttggagggaggagagaagacagaggagcacttaaggtgcaaagcagcctattttttcttcaataaaaattgttaagagaaaaaaaaat

SEQ ID NO: 343635 - DNA, 1117 bp, Homo sapiens
gagaaagggctaatgtctgagcagtcgggtggcttcctagatgaggggactgtcctcccaggagctgctactcagagtagtttcttgtcctcctaaagtttagagtggaaatactttgcaaaagaggtccccaaccctaagtgtgagggctaagctcctgggcttagtaggcatatacaaatgcccccaggtgggtgacatcaagatgttctggtcctaggtctgctgagagcctctcctgggaatgttgtaggtactgcctttcccttttaggaaacaccatatcctcctaccactaacccccatccttgccctaaccagcaatctgtaacatcctgggcctcagggacgtgggtggagggtgactctgagctccagatagtgtctaggaggctcaaataagcctgctttttggtcctcaccctagccgtgggccaccctactctgcactccctaccaagcagctcagagaatggaggccagcgcccaaaagtctccatagttcatagggagccccaaacctcaacactgccctttcccaagcctcaaaatttctcttaccctgacccaggcacacccactcaactcttacccttgatccccctcccaggaccagaagggattgatttctggtgagtcctgccccaagctgtgcttgcctgctctgttcgtacctaatattgcatgaggaacctggccagtgtctatggtggcaagtgcttcacccattctgtcctcttccccagaaaagactaatagggagggaagaagcgtgcgcagaagctaaggaactctcttccttctctaccaaggccacccctacatctactccactccagcctgggcgacagagcaagactccgtctcaaaaaaaaaaaaaaaaaaaaaaaaaaaaaaagatacttctccaaagtgttctcatgtggcctcacccaggtcttgtgtattatttggtaattaatttatggatcttaaaaactgcagtattcccccattttgtgatgagagtgtggggctggcaggggttggttggagggaggagagaagacagaggagcacttaaggtgcaaagcagcctattttttcttcaataaaaattgttaagagaaaaaaaaat

SEQ ID NO: 343636 - DNA, 1205 bp, Homo sapiens
gagaaagggctaatgtctgagcagtcgggtggcttcctagatgaggggactgtcctcccaggagctgctactcagagtagtttcttgtcctcctaaagtttagagtggaaatactttgcaaaagaggtccccaaccctaagtgtgagggctaagctcctgggcttagtaggcatatacaaatgcccccaggtgggtgacatcaagatgttctggtcctaggtctgctgagagcctctcctgggaatgttgtaggtactgcctttcccttttaggaaacaccatatcctcctaccactaacccccatccttgccctaaccagcaatctgtaacatcctgggcctcagggacgtgggtggagggtgactctgagctccagatagtgtctaggaggctcaaataagcctgctttttggtcctcaccctagccgtgggccaccctactctgcactccctaccaagcagctcagagaatggaggccagcgcccaaaagtctccatagttcatagggagccccaaacctcaacactgccctttcccaagcctcaaaatttctcttaccctgacccaggcacacccactcaactcttacccttgatccccctcccaggaccagaagggattgatttctggtgagtcctgccccaagctgtgcttgcctgctctgttcgtacctaatattgcatgaggaacctggccagtgtctatggtggcaagtgcttcacccattctgtcctcttccccagaaaagactaatagggagggaagaagcgtgcgcagaagctaaggaactctcttccttctctaccaaggccacccctacatctactccctgcaaatctgttatttcccttgacattcagcaaatatttggggttttgttttgttttgttttgttttgttttgttttgagacagagcactccagcctgggcgacagagcaagactccgtctcaaaaaaaaaaaaaaaaaaaaaaaaaaaaaaagatacttctccaaagtgttctcatgtggcctcacccaggtcttgtgtattatttggtaattaatttatggatcttaaaaactgcagtattcccccattttgtgatgagagtgtggggctggcaggggttggttggagggaggagagaagacagaggagcacttaaggtgcaaagcagcctattttttcttcaataaaaattgttaagagaaaaaaaaat

SEQ ID NO: 343637 - DNA, 1940 bp, Homo sapiens
catggaggccctgggacctgggggcgaccgcgcctccccggcctcgtccactagcagcctggacctgtggcatctgtccatgcgcgcggactcggcctacagctctttctccgcagcctccggcggccccgagccgcgcacgcagtcgccggggacagacctccttccttacctagactgggactacgtgcgtgtggtttggggcggcccgggccccgccccgcccgacgctgccctttgcacatccccgcggccccggcccgcggttgcagcccgcagtgggccgcagccaacagaggtcccggggaccccgggaccactgaacaggcaggccaccccgctgctgtacgcgctggcggccgaggcggaggccgcggcgcaggctgccgagccgcccagcccgccggcctcgagggccgcctaccgccagcggcttcagggcgcgcagcggcgagtgctccgggagacgtcgttccagcgcaaggagctccgcatgagcctgcccgcccgtctgcggcccactgtcccagcgcggcccccggcgactcacccgcgctccgcctcgctcagccacccgggcggggagggggagccggcgcgctcccgggctcccgcgccaggaactgccggccggggtcccctcgccaaccagcagcggaagtggtgcttctcagagccaggaaagctggatcgtgtgggtcggggcggtgggccggcgcgggaatgcctgggtgaggcctgctccagctctggcctccctgggcccgagcccttggagttccagcatccggcgctggctaagtttgaagatcacgaggtcggatggctgcccgagacgcaaccccaaggctccatgaacctggactccgggtccttgaagctcggtgatgccttcaggcccgccagtcggagtcggagcgcttcaggcgaagtcttgggttcctggggaggatcaggagggaccatacccattgtccaggctgttccccaaggagcagaaacccccagaccattgtttcagaccaaactttccaggttcttgcctcagaaagaggctgcggtgatgtatcctgcagagttaccccagagcagccctgctgacagtgaacagagggtctcagagacctgcattgtgcctgcctggctcccctcccttcctgatgaagtgttcctagaagaggccccactggtcagaatgagatcaccaccagacccccatgcctcccaggggcccccagccagtgtccatgcctctgaccagccgtatggaactggcttaggccaaagaactggccaggttacagtccccacagagtacccgctccatgagtgtccaggaactgcaggggcagatgactgctggcagggggtgaatggttctgtaggtatttccaggcccacaagccacacccccactgggactgcaaatgataacatcccaactattgaccccactggactgaccaccaatccccccacagctgcagagagtgacctcctcaaacctgtcccagctgatgccttgggactttcaggcaatgatactccaggtccctctcacaatactgccctagccaggggcactggccagcctggttccaggcccacatggcctagtcagtgcctcgaggagctggttcaggagctggccagattagatccctctctatgtgaccctcttgcttcccagcccagcccagagccacccctgggcctgctggatggactgattcctttagcagaggtccgggctgcaatgcggcctgcctgtggggaggctggagaggaggctgccagtacttttgagccagggtcctatcagttcacttcaccagtctggcggtcctcggagagacaaggtgaaacctgtccccccccttgttgacacctgggacgggccctccaaaacgtcccgcaaatgaggcccctcaaatgtgccc

SEQ ID NO: 343638 - DNA, 444 bp, Homo sapiens
cgagcccttggagttccagcatccggcgctggctaagtttgaagatcacgaggtcggatggctgcccgagacgcaaccccaaggctccatgaacctggactccgggtccttgaagctcggtgatgccttcaggcccgccagtcggagtcggagcgcttcaggcgaagtcttgggttcctggggaggatcaggagggaccatacccattgtccaggtatggaagtcaggagatgcaggctggtgaggggagcatctgggaaacaaaacttgagccacatttcagtcgactgttcacccttccaggctgttccccaaggagcagaaacccccagaccattgtttcagaccaaactttccaggtgagagacacggaccactctggaccaagttggggggaagcagcttgcatagcttttgcccaaaaaatgaaagggcttcctacct

SEQ ID NO: 343639 - DNA, 1840 bp, Homo sapiens
catggaggccctgggacctgggggcgaccgcgcctccccggcctcgtccactagcagcctggacctgtggcatctgtccatgcgcgcggactcggcctacagctctttctccgcagcctccggcggccccgagccgcgcacgcagtcgccggggacagacctccttccttacctagactgggactacgtgcgtgtggtttggggcggcccgggccccgccccgcccgacgctgccctttgcacatccccgcggccccggcccgcggttgcagcccgcagtgggccgcagccaacagaggtcccggggaccccgggaccactgaacaggcaggccaccccgctgctgtacgcgctggcggccgaggcggaggccgcggcgcaggctgccgagccgcccagcccgccggcctcgagggccgcctaccgccagcggcttcagggcgcgcagcggcgagtgctccgggagacgtcgttccagcgcaaggagctccgcatgagcctgcccgcccgtctgcggcccactgtcccagcgcggcccccggcgactcacccgcgctccgcctcgctcagccacccgggcggggagggggagccggcgcgctcccgggctcccgcgccaggaactgccggccggggtcccctcgccaaccagcagcggaagtggtgcttctcagagccaggaaagctggatcgtgtgggtcggggcggtgggccggcgcgggaatgcctgggtgaggcctgctccagctctggcctccctgggcccgagcccttggagttccagcatccggcgctggctaagtttgaagatcacgaggtcggatggctgcccgagacgcaaccccaaggctccatgaacctggactccgggtccttgaagctcggtgatgccttcaggcccgccagtcggagtcggagcgcttcaggcgaagtcttgggttcctggggaggatcaggagggaccatacccattgtccaggctgttccccaaggagcagaaacccccagaccattgtttcagaccaaactttccaggttcttgcctcagaaagaggctgcggtgatgtatcctgcagagttaccccagagcagccctgctgacagtgaacagagggtctcagagacctgcattgtgcctgcctggctcccctcccttcctgatgaagtgttcctagaagaggccccactggtcagaatgagatcaccaccagacccccatgcctcccaggggcccccagccagtgtccatgcctctgaccagccgtatggaactggcttaggccaaagaactggccaggttacagtccccacagagtacccgctccatgagtgtccaggaactgcaggggcagatgactgctggcagggggtgaatggttctctgcagagagtgacctcctcaaacctgtcccagctgatgccttgggactttcaggcaatgatactccaggtccctctcacaatactgccctagccaggggcactggccagcctggttccaggcccacatggcctagtcagtgcctcgaggagctggttcaggagctggccagattagatccctctctatgtgaccctcttgcttcccagcccagcccagagccacccctgggcctgctggatggactgattcctttagcagaggtccgggctgcaatgcggcctgcctgtggggaggctggagaggaggctgccagtacttttgagccagggtcctatcagttcacttcaccagtctggcggtcctcggagagacaaggtgaaacctgtccccccccttgttgacacctgggacgggccctccaaaacgtcccgcaaatgaggcccctcaaatgtgccc

SEQ ID NO: 343640 - DNA, 252 bp, Homo sapiens
acatgtcttggcttagttgttttgcttgattttctaaaagaagaaggttctctagataaggtagagtttagaactcttctaacaatataggtttgtcttttaatcttcctgctaaagatatgagcggttagagtattctgtatttatctgtgcacttactttcaccagtgagttttataccttcagatgatttcttgttgcttgttaatgtccttttctttcagattgaagaacttccctttagcattttct

SEQ ID NO: 343641 - DNA, 468 bp, Homo sapiens
tctgtgccaagagaagtttaaacaaaggggcacaaaggttttccgctttttatttattttttttacagtggggtgtcaggggattattctctgctttcatctcctgtaaaatgtttacaaatgagaaaaaatttttttaaatgacatccactgctttttgacaaaaagaagaattgaaatactgtgtctgaaatgtacaataaagaacagttgataatgttgtgaattatggaaggttagttagtgttggtgagtgtcaggaaagaactggaaatttaaaatctgattgcaagccagagttaggctggggcaacagggagttagatttgagtctctgcctgccacacatttggaaaatgcatgagaaaactagttcccttttggagtgttaaaataactaaaaaacaggtgattatgttgaggtggctctagtgtcctgagctctgagtggagagacaggccaaggcc

SEQ ID NO: 343642 - DNA, 3110 bp, Homo sapiens
ccttttgtgggagtccggtctgtccacttgccggtccctcagaccgtcggcggtctctgtccgcttcgggacctgtccgctggtcgctccgcgtccgatggctcctggccgcggaaccttaggcctggccctggtctccgagcgcgggttcgccgggaggagcgtgtggcgggggtgtgccggggcgtgagtgcgccgagcatggggctgagcctggtgtggggagtgggtatctgcggagccggcctgaaccccacctcagccgggcgcggggagggggctccgtgcgtgtgatcgtgcagctgtgagcgcgtggccgccccgcggggctccgctgcaggcccctcagccccaggagcagtactcgctcttcagggcctgccctggatcctggaggctacacagctgcccactcctcctggggaggctgccgtggaggccatggagatccctgccccggagcccgagaagacagctctttcctctcaggatcctgctctttccctgaaagagaatctcgaggatatatcgggttggggtcttcccgaagccaggtccaaggaatcggtgagtttcaaggatgtggctgtggacttcacccaggaggagtggggtcaactagactcccctcagagggccttgtaccgggatgtgatgttggagaactaccagaaccttcttgccctaggacctccactgcacaagccagatgtgatctctcatctggaacgaggcgaggagccatggagcatgcagagggaagtccccagagggccctgtccagaatgggagctgaaggcggtgccctctcaacagcagggcatttgcaaagaagaaccggcccaggagcccatcatggagcggcccctcggcggggcgcaggcgtgggggcgccaggcaggtgctctgcagaggagtcaggctgcgccctgggcgcccgcacctgccatggtctgggacgtccctgtagaggaattccccctcaggtgtcccctcttcgcccagcaacgcgttcccgaggggggacccttgctggacacacgcaagaacgtccaggccactgagggcagaaccaaggcccccgcgagactgtgtgcaggggaaaacgcctccacgccaagtgagccagaaaagttcccccaggtgcgccggcagcgcggggcgggcgccggggagggcgagttcgtgtgcggcgagtgcgggaaggcgttccgccagagctcctccctcacgctgcaccggcgctggcacagccgggagaaggcttacaagtgcgatgaatgcggcaaggccttcacctggagcaccaaccttctggagcaccggcgcatccacaccggcgagaagcccttcttctgcggcgagtgcgggaaggccttcagctgccactcgtccctcaacgtgcaccagcgcatccacacgggcgagcggccctacaagtgcagcgcctgcgagaaggccttcagctgcagctcgctgctcagcatgcacctgcgggtgcacaccggcgagaagccctaccggtgcggcgagtgcggcaaggccttcaaccagcgtacacacctcacacgccaccaccgcatccacacgggcgagaagccctaccagtgcggctcctgcggcaaggccttcacctgccactcatccctcaccgtgcatgagaagatccacagcggggacaagccgttcaagtgcagcgactgcgagaaggccttcaacagccgctcgcgcctcaccctccaccagaggacgcacacgggcgagaagcccttcaagtgcgccgactgcgggaagggcttcagctgccacgcgtacctgctcgtgcaccggcgcatccacagcggcgagaagcccttcaagtgcaacgagtgcggcaaagccttcagctcccacgcctacctcatcgtgcaccggcgcatccacacaggcgagaagcccttcgactgcagccagtgttggaaggccttcagctgccactcgtccctcatcgtgcaccagcgcatccacaccggtgagaagccctacaagtgcagcgagtgcggcagagccttcagccagaaccactgtctcattaaacatcagaaaatccactccggggagaagtcgtttaagtgtgagaaatgtggggagatgttcaactggagctcgcacctcactgagcaccagaggctgcacagcgaggggaagcccttggccatccagttcaacaaacacctgctcagcacatactacgtgcctggcagcctgctgggtgcaggggatgctggactgagggacgtggatcccatcgacgcgctggatgtggcaaagctcttgtgcgtggttccccccagagctggcaggaatttctccctggggagcaaacctcgaaactaacatgatgtgctttggtgtcagtagctgctttctgagctactcaacaaggaaagcaccctggtcctccctggctcctagatccagaccaccttcctccaggtgtgggagccttgccttatcacccccatcaggtctgcatgccagggtgcctcctctagttaaagtcagtcacctccccagaagggccacactccaggaggagtgttgagagtcatttgaggtagtcttgccacctgttttccttgatgggcctggaagttgttgacaaggggaaagatctttcttgccaataaaaagaagggatatcgttgggtgccatggctcacacctgtaatcttaacactgtgggaggccaaggcaaggggatcacttgagcccaggagtctaggaccagcctggacaacatggtgagacctcgtctctacaaaaaatgcaaaaattagccagatgtggcggcatgtccctgtggtcccagctactcaggaggctgaggtgggaggatcatttgagcctaggaggtcaaggctgcagtgagccatgattcacagcactgcactgcagcctgggtgacaaagcaagaccctgtgtgaaattaaaaggaggtatatcaactgttgtatcctcggacgggctcctgacatggctttaatcaggagtttcctccataaactattattttcagaataataataaaacaagaattatgactagcaaaaactttccagtgaacatta

SEQ ID NO: 343643 - DNA, 1040 bp, Homo sapiens
ccttttgtgggagtccggtctgtccacttgccggtccctcagaccgtcggcggtctctgtccgcttcgggacctgtccgctggtcgctccgcgtccgatggctcctggccgcggaaccttaggcctggccctggtctccgagcgcgggttcgccgggaggagcgtgtggcgggggtgtgccggggcgtgagtgcgccgagcatggggctgagcctggtgtggggagtgggtatctgcggagccggcctgaaccccacctcagccgggcgcggggagggggctccgtgcgtgtgatcgtgcagctgtgagcgcgtggccgccccgcggggctccgctgcaggcccctcagccccaggagcagtactcgctcttcagggcctgccctggatcctggaggctacacagctgcccactcctcctggggaggctgccgtggaggccatggagatccctgccccggagcccgagaagacaggaatcggtgagtttcaaggatgtggctgtggacttcacccaggaggagtggggtcaactagactcccctcagagggccttgtaccgggatgtgatgttggagaactaccagaaccttcttgccctaggacctccactgcacaagccagatgtgatctctcatctggaacgaggcgaggagccatggagcatgcagagggaagtccccagagggccctgtccagagacaggatctccctctgtcacccaggctggagtgtggtgccgcagtcacagctcactgcagcctcgaacttgtgggctcaagtgatcctgcctcagcctcctgagtagctgggactacagacacactccaccatgcctggggtctcactctgtcacccaggctggagtacagtggtgccattgcagatcactgcagcctcaacctcctgggttcaagtgatcctcccacctcagcctcctgagtaattaggattacaggcttaagccaccatgcccagcctactttaatcattttttaattttaattttatttatttttttaaattttactttaagttctg

SEQ ID NO: 343644 - DNA, 3784 bp, Homo sapiens
ccttttgtgggagtccggtctgtccacttgccggtccctcagaccgtcggcggtctctgtccgcttcgggacctgtccgctggtcgctccgcgtccgatggctcctggccgcggaaccttaggcctggccctggtctccgagcgcgggttcgccgggaggagcgtgtggcgggggtgtgccggggcgtgagtgcgccgagcatggggctgagcctggtgtggggagtgggtatctgcggagccggcctgaaccccacctcagccgggcgcggggagggggctccgtgcgtgtgatcgtgcagctgtgagcgcgtggccgccccgcggggctccgctgcaggcccctcagccccaggagcagtactcgctcttcagggcctgccctggatcctggaggctacacagctgcccactcctcctggggaggctgccgtggaggccatggagatccctgccccggagcccgagaagacaggtacagcttcactcttgtagtcagtatgtctgtggatttgcacttgaggatattgacactcagagagatcaggccagtttcccagaagcatccagcatcttttttttttttttttaaatggaatctcactctgtcacccaggcgggagtggtgcaatggcttgatcttccgctcactgcaacctctgcttcccgggttcaaactattctcccgcctcaacctcccaagtagttgggattgcaggcacgcgccaccacgcccggctaatgtttgtatttttagtagagacggggttttgccatgtttcccaggctggtcttaagctcaagcgatccgcccgcctcggcctcccaaagtgctgggattacaggcgtgagccgatcggctcctggcctcctgcttctttcttccccgcgcccaatcatttgttcccactcagacgtgcttgattggcggtagcagctcttttcgtcatgaattggagtgtctgagacacaggcagattattcctcgatgctgtttctgttggtgctagctactggggctcgttccccacctggccttgctggcaggttctgcctcctctctgattctcacttgtgccacgacaggtgggctttaagctcagccgtgagcctggtagccgtgaccttgactcatttctccttcgccagctctttcctctcaggatcctgctctttccctgaaagagaatctcgaggatatatcgggttggggtcttcccgaagccaggtccaaggaatcggtgagtttcaaggatgtggctgtggacttcacccaggaggagtggggtcaactagactcccctcagagggccttgtaccgggatgtgatgttggagaactaccagaaccttcttgccctaggacctccactgcacaagccagatgtgatctctcatctggaacgaggcgaggagccatggagcatgcagagggaagtccccagagggccctgtccagaatgggagctgaaggcggtgccctctcaacagcagggcatttgcaaagaagaaccggcccaggagcccatcatggagcggcccctcggcggggcgcaggcgtgggggcgccaggcaggtgctctgcagaggagtcaggctgcgccctgggcgcccgcacctgccatggtctgggacgtccctgtagaggaattccccctcaggtgtcccctcttcgcccagcaacgcgttcccgaggggggacccttgctggacacacgcaagaacgtccaggccactgagggcagaaccaaggcccccgcgagactgtgtgcaggggaaaacgcctccacgccaagtgagccagaaaagttcccccaggtgcgccggcagcgcggggcgggcgccggggagggcgagttcgtgtgcggcgagtgcgggaaggcgttccgccagagctcctccctcacgctgcaccggcgctggcacagccgggagaaggcttacaagtgcgatgaatgcggcaaggccttcacctggagcaccaaccttctggagcaccggcgcatccacaccggcgagaagcccttcttctgcggcgagtgcgggaaggccttcagctgccactcgtccctcaacgtgcaccagcgcatccacacgggcgagcggccctacaagtgcagcgcctgcgagaaggccttcagctgcagctcgctgctcagcatgcacctgcgggtgcacaccggcgagaagccctaccggtgcggcgagtgcggcaaggccttcaaccagcgtacacacctcacacgccaccaccgcatccacacgggcgagaagccctaccagtgcggctcctgcggcaaggccttcacctgccactcatccctcaccgtgcatgagaagatccacagcggggacaagccgttcaagtgcagcgactgcgagaaggccttcaacagccgctcgcgcctcaccctccaccagaggacgcacacgggcgagaagcccttcaagtgcgccgactgcgggaagggcttcagctgccacgcgtacctgctcgtgcaccggcgcatccacagcggcgagaagcccttcaagtgcaacgagtgcggcaaagccttcagctcccacgcctacctcatcgtgcaccggcgcatccacacaggcgagaagcccttcgactgcagccagtgttggaaggccttcagctgccactcgtccctcatcgtgcaccagcgcatccacaccggtgagaagccctacaagtgcagcgagtgcggcagagccttcagccagaaccactgtctcattaaacatcagaaaatccactccggggagaagtcgtttaagtgtgagaaatgtggggagatgttcaactggagctcgcacctcactgagcaccagaggctgcacagcgaggggaagcccttggccatccagttcaacaaacacctgctcagcacatactacgtgcctggcagcctgctgggtgcaggggatgctggactgagggacgtggatcccatcgacgcgctggatgtggcaaagctcttgtgcgtggttccccccagagctggcaggaatttctccctggggagcaaacctcgaaactaacatgatgtgctttggtgtcagtagctgctttctgagctactcaacaaggaaagcaccctggtcctccctggctcctagatccagaccaccttcctccaggtgtgggagccttgccttatcacccccatcaggtctgcatgccagggtgcctcctctagttaaagtcagtcacctccccagaagggccacactccaggaggagtgttgagagtcatttgaggtagtcttgccacctgttttccttgatgggcctggaagttgttgacaaggggaaagatctttcttgccaataaaaagaagggatatcgttgggtgccatggctcacacctgtaatcttaacactgtgggaggccaaggcaaggggatcacttgagcccaggagtctaggaccagcctggacaacatggtgagacctcgtctctacaaaaaatgcaaaaattagccagatgtggcggcatgtccctgtggtcccagctactcaggaggctgaggtgggaggatcatttgagcctaggaggtcaaggctgcagtgagccatgattcacagcactgcactgcagcctgggtgacaaagcaagaccctgtgtgaaattaaaaggaggtatatcaactgttgtatcctcggacgggctcctgacatggctttaatcaggagtttcctccataaactattattttcagaataataataaaacaagaattatgactagcaaaaactttccagtgaacatta

SEQ ID NO: 343645 - DNA, 2782 bp, Homo sapiens
ccttttgtgggagtccggtctgtccacttgccggtccctcagaccgtcggcggtctctgtccgcttcgggacctgtccgctggtcgctccgcgtccgatggctcctggccgcggaaccttaggcctggccctggtctccgagcgcggctctttcctctcaggatcctgctctttccctgaaagagaatctcgaggatatatcgggttggggtcttcccgaagccaggtccaaggaatcggtgagtttcaaggatgtggctgtggacttcacccaggaggagtggggtcaactagactcccctcagagggccttgtaccgggatgtgatgttggagaactaccagaaccttcttgccctaggacctccactgcacaagccagatgtgatctctcatctggaacgaggcgaggagccatggagcatgcagagggaagtccccagagggccctgtccagaatgggagctgaaggcggtgccctctcaacagcagggcatttgcaaagaagaaccggcccaggagcccatcatggagcggcccctcggcggggcgcaggcgtgggggcgccaggcaggtgctctgcagaggagtcaggctgcgccctgggcgcccgcacctgccatggtctgggacgtccctgtagaggaattccccctcaggtgtcccctcttcgcccagcaacgcgttcccgaggggggacccttgctggacacacgcaagaacgtccaggccactgagggcagaaccaaggcccccgcgagactgtgtgcaggggaaaacgcctccacgccaagtgagccagaaaagttcccccaggtgcgccggcagcgcggggcgggcgccggggagggcgagttcgtgtgcggcgagtgcgggaaggcgttccgccagagctcctccctcacgctgcaccggcgctggcacagccgggagaaggcttacaagtgcgatgaatgcggcaaggccttcacctggagcaccaaccttctggagcaccggcgcatccacaccggcgagaagcccttcttctgcggcgagtgcgggaaggccttcagctgccactcgtccctcaacgtgcaccagcgcatccacacgggcgagcggccctacaagtgcagcgcctgcgagaaggccttcagctgcagctcgctgctcagcatgcacctgcgggtgcacaccggcgagaagccctaccggtgcggcgagtgcggcaaggccttcaaccagcgtacacacctcacacgccaccaccgcatccacacgggcgagaagccctaccagtgcggctcctgcggcaaggccttcacctgccactcatccctcaccgtgcatgagaagatccacagcggggacaagccgttcaagtgcagcgactgcgagaaggccttcaacagccgctcgcgcctcaccctccaccagaggacgcacacgggcgagaagcccttcaagtgcgccgactgcgggaagggcttcagctgccacgcgtacctgctcgtgcaccggcgcatccacagcggcgagaagcccttcaagtgcaacgagtgcggcaaagccttcagctcccacgcctacctcatcgtgcaccggcgcatccacacaggcgagaagcccttcgactgcagccagtgttggaaggccttcagctgccactcgtccctcatcgtgcaccagcgcatccacaccggtgagaagccctacaagtgcagcgagtgcggcagagccttcagccagaaccactgtctcattaaacatcagaaaatccactccggggagaagtcgtttaagtgtgagaaatgtggggagatgttcaactggagctcgcacctcactgagcaccagaggctgcacagcgaggggaagcccttggccatccagttcaacaaacacctgctcagcacatactacgtgcctggcagcctgctgggtgcaggggatgctggactgagggacgtggatcccatcgacgcgctggatgtggcaaagctcttgtgcgtggttccccccagagctggcaggaatttctccctggggagcaaacctcgaaactaacatgatgtgctttggtgtcagtagctgctttctgagctactcaacaaggaaagcaccctggtcctccctggctcctagatccagaccaccttcctccaggtgtgggagccttgccttatcacccccatcaggtctgcatgccagggtgcctcctctagttaaagtcagtcacctccccagaagggccacactccaggaggagtgttgagagtcatttgaggtagtcttgccacctgttttccttgatgggcctggaagttgttgacaaggggaaagatctttcttgccaataaaaagaagggatatcgttgggtgccatggctcacacctgtaatcttaacactgtgggaggccaaggcaaggggatcacttgagcccaggagtctaggaccagcctggacaacatggtgagacctcgtctctacaaaaaatgcaaaaattagccagatgtggcggcatgtccctgtggtcccagctactcaggaggctgaggtgggaggatcatttgagcctaggaggtcaaggctgcagtgagccatgattcacagcactgcactgcagcctgggtgacaaagcaagaccctgtgtgaaattaaaaggaggtatatcaactgttgtatcctcggacgggctcctgacatggctttaatcaggagtttcctccataaactattattttcagaataataataaaacaagaattatgactagcaaaaactttccagtgaacatta

SEQ ID NO: 343646 - DNA, 689 bp, Homo sapiens
agttttctggctaggtgctgtgactgatgcttacaatcccagcactttgggaggctgaggcaggaggattgtttgagcccaggaagctgaggctgcctgcttttgcaccactccactccagcatgggtgacagagtgagaccttgtctcagcgacaataacaacaacaaaaagataagaaacaaagataaaagagttttctagtttaagctcttaactttgagtctttcggccgttatgagttaacttttatgtgtgatatgaagtagaagaatccaacgtcatttgttttgcagttggatatccagttgtcctagcaccatttgtttaaaagactgtttttttcttattgagttgccttggcacccttgtgaaagtcagttgaccataaatgtaatggtttatttctgggttatcagttgtattccactaatctacctgtttgtccttgtgtaactactctactgtcttgattactatatctttttaggaagttttgatatagggaggttcgagtcctccaacctttgttgtactttttcaagtttttcttgattttttggatcccttatatttccatatgaattttgcaattggcatgtcaattttcgctaaaagacagctgggattttgatagtgtttgtattttagatcaatttgaggagtgttactgtcttaatgtctttcaat

SEQ ID NO: 343647 - DNA, 497 bp, Homo sapiens
ctgtgcacagtgatgcctccagcagccactagtgaagccaaggagcagaacataggaaaaaaactcagctcctccatctggcagcatatggctagccagacctagtgctctaccttgcaaaactagctataaagctgaggtgagagtctttaatgaataaatgcaacaaataaactctgcaaagcagagtaataatggctatacgaagacaggtgacacgggttagagtagcagcaggaggccataaagtgcccaggacagattccagaaattttctggagtcagaatgtatagaacttgctgatagattgcacacacagagcatgaaaaagaagcaaagatgactccggggtttttggcttgagcaacagggtggaaggcagcaccatttacagtcggccctctgtacccacaggttccatatccatggatcaaaaatatttaggaaaaaagccaggtgccatggctcacttctgtaatcccagcactttgggagg

SEQ ID NO: 343648 - DNA, 128 bp, Homo sapiens
aagggtctcaggatcatggagtgcctgtctgcagcatgcactgacactccaagccgagtcccttataccaccctccccctacaagtgcccttcccacacctccccgcaatctggcccaccccactatg

SEQ ID NO: 343649 - DNA, 296 bp, Homo sapiens
tgatgttatccccaacacttatttaactggcctaatacgaaatttgtacctgtttactgacatttccccattttgccacctccccagtctctggcaactatcattctattttctgtttctatgagtttgacttttaaaattttcacaagtaagtgagattatgcagtatttgtctttctatgccctgcccagccactccagctccagctgtgacaaaaaggggccaatggacagctaaggctgttgcttcagaagatgcaggtcccaagccttggcacgcttccacatggtgttgg

SEQ ID NO: 343650 - DNA, 588 bp, Homo sapiens
gataatatacttgtaccttggttgtattttagttgcaattgttagttgcacaatttgggggaatgtttgaggtctctatagtagttactgtatttaccaggaagccctgcatgattagaattcttgagacagtgtataaagttaaattgggtgtgttgcctggatgtgaacagtaaaaaaggagaagcttctcaccatacaattatagcttaaaaggaaccaggtacaattctgtttccaaaaatagaaagtaagtcaaatattatatggatatgtaatagtaattatattaattttgactccctggccgactttttttttgaagctatcattttttgtcagagataaaaagtagcttttaaaggaaaagatatctcagcccttaattatgtgtgtgtgtatgtgtgtgtatgtatttatttatatattttagcccttgtaagagaggagcagtggaagggaactgaaggagcatgatatagagaaaagagcctgggttttggtgtgttgcatttgttctgttactagctgggagaccttgggcaaatttacctctctgatcagcagtttaattttttcatctgtaaa

SEQ ID NO: 343651 - DNA, 497 bp, Homo sapiens
ttcttgatggtcgctgtctctttggagctgttgggtacacctgcagaaagcctgtcacttcactgcccatccacgagggctggttgcatacactgcagaacatctgtgcaaaggaactggacagcctacaaagaacaatgatgcctgggaaccatcgccaggctacactgttgactaacaaagccacgggccccgcaagaaacaattcagtaatttccacagggttggagatgactcagcagttccactcctgcacgagcacccgagagttgccctgatagccgtgcacttgggcgttcatcacagcatttgcttcttacatgaatttttaattttggaataatttcagatttacagagaagttacaaatccaatacagagaattcttgtatactaccctgctcagttttctcctacaattaacatcttaatcatgatacatttatgaaaaccaagaaattaacattggtagaatgttattaattaaatgacagatt

SEQ ID NO: 343652 - DNA, 175 bp, Homo sapiens
gaagctgcttgttggttatttctttagttgaaagcacatcaattaagagaagaaaagtagcactgtactattttatatggtcttaccaaagtctaaagatgtttattttttaagaatgtgatagaatttgttttgctaaattcagtctcatttgtaattttttactggtggtttg

SEQ ID NO: 343653 - DNA, 590 bp, Homo sapiens
gctagatatattttaccataatttaaaaaaaggtatgcaaaagattaagaacttctctccatgcaaaaacaaaaagctaaagatagaaaaatataaactggaaagccagtaaccaaagaaagctggtatactattaataccagagaaaaacagacttctagagaaaaagctttattagaaagaaagaatgtcacttcataataatgtttcattgactctggaatttctaaacctgcatggtccatcatagtagccattagccacatgtaactatttaaatttaaactgattacagccgagcacagtggctcacgcctataatcccagcaatttgagaggccaaggcagctggaccacctgaggccaggagtttgagactagcctggccaacatggtgaaacctcgtctttactaaaaatacaaaaattagccaggcatagtggtgcacacctgtaatcccagctaatcgggaggctgagtgaggcaggagaattgcttgaacccaggaggcggaggttgcagtgagccaagatcaagccactgtactccagcctgggtgacagagtgagactctgtctcaaaaaaattaa

SEQ ID NO: 343654 - DNA, 245 bp, Homo sapiens
tgatcggcctgccttggcctcccaaagtgctaggattataggagtgacccactgcgctgagctactatagtgaattctctatcactggaaatactcaggctgagatcagacaatcacttgggatgctgcagaagcggttggttggttggacaagacaattatgaacaacctttcctaatctgagcttctgtgattctgcggcagcagaagtcacctttatgcctatggacacatgaagtgtgaca

SEQ ID NO: 343655 - DNA, 3768 bp, Homo sapiens
agaagtcagatgaaaaaattgtgattcaccataagccattgagatccacatggagccaactctctgcggtgaaaagaaagggattatctcagacagtaagccaggaggaaagaaagagacaagaggctatctttgaagtcatatcctctgaacattcatatttactcagcttggagatcttgatacgaatgtttaaaaattctaaagaactgagtgatacaatgactaaaaccgagaggcaccatcttttctccaatattacagatgtctgtgaggcaagcaaaaagttctttatagagttggaagcaagacatcagaataatatcttcatagatgacataagtgacattgtggaaaaacacacagcatccacatttgacccatatgtgaaatactgcacaaatgaagtctaccaacaacgaacactacaaaaattgttagctaccaatccatcctttaaggaagtattgtcaaggattgagtcccatgaagactgtaggaacttacccatgatctcttttctcattctccccatgcagagggtgacccgccttcccctgctgatggatactatctgtcaaaaaacacctaaggactctccgaagtatgaagtctgcaaaagagccttgaaggaagttagcaagttggttcgactatgcaatgagggcgcccggaagatggaaaggactgagatgatgtacacaattaactcccagctggaatttaaaattaagccttttcctttagtctcctcttcccggtggttggtaaaaagaggtgaattgacagcctatgttgaagacactgtgcttttctcaagaaggacatccaaacagcaagtctacttctttctctttaacgatgtgctcattatcaccaagaagaagagtgaagaaagttacaacgtcaatgattattccttaagagatcagctattggtggaatcttgtgacaatgaagagcttaattcttctccagggaagaacagctccacaatgctctattcaagacagagctctgccagtcacctctttactctgacagtccttagtaaccacgcgaatgagaaagtggagatgctactaggagctgagacgcagagcgagcgagcccgctggataactgccctgggacacagcagcgggaagccgcctgcagaccgaacctcactgacccaggtggaaatcgttaggtcatttactgctaagcagccagatgaactctccctgcaggtggctgacgtcgtcctcatctatcaacgtgtcagcgatggctggtatgagggggaacgactacgagatggagaaagaggctggtttcctatggaatgtgccaaggagataacatgtcaagctacaattgataagaatgtggagagaatgggacgcttgctaggactggagaccaacgtgtagtctctcagatggtcttttgttactgcaagatttgcacgacacttaccgggctggttggttctgggctagttttattgttaattttgtcacagcctatttaattaaaagaacgaaaacacttgcctttaagcttgccaggttgttctgctctctcatgagaagagcttggatacagtgagtttgcacagctcagtttttacctaaccacacacttgcagacctcctgaggtacacagaatagctgagcagttcacttcagggatcaggtcatctctgctcctcctagtttcaccatgttctggcaataaaaaacacatattatatcctggttttctctatccttgcattactaaggtgactgtctctctttatacatccttgtatggttctcccagtattagcaagattgtatatctgtaaagaatgtccagttttgtaaatatttccctgcctttttttttctttttttacatctgattttaatgcttcgttaacttcaaaaggaactggtagagttcagaaggtgagctgttgtttttctaaacctcttcccaggaaggggacattgacacttgaatttttgtcacctttttcctcattagaaggaaagtagaaagccttactgtaggatttttaaaaaaaaatccatctcaccccatattggtcttaaataagtatagactaattaacctaagctacctttaacaacgtagaatttagatgggttcatatatgtgagaaaaacctgaatataggacaggggtcctacttttttccccacctctgtcgcccaggctagagtatagtggtgtgatcttggcccactgcaacctctgcttcctaggttcaagtgattctcctgcctcagcctcccaagtagctgggattgtaagagtatgccaccacgcccagctactttttgtatttttagtagagacagggtttcatcatgttggccaggatggtctcttaactcctgccctcaagtgatccaccagagaggagatcctcggcctccccaagtgctgggattataggcatgagccaccgtgcccagcctactttctaattaattaaaaaaaaaaaaaaaaaaaaaaaaaaaccttcccaaatgagctgataaaaaactgacgtgaggctgctttgccttcaataatacctagttttcagctgttccaactcgtttccaaatagaaattagctggaacacactacagtaatctcaaggaagggaaaattaggccttaaaagataccaagaagtcagcatggtacccaattgaaaccttttgaccttagtgggaattcattctatttgcactaaaagccttaacttgctgtattcagagtccctcttaactgtgagtttctatagaactttactttttccactagtgcacagagagagaaaggttatcttaatagtcggtttcatggagatgaaggatgggagattaagaggggggaaatgatttttactggcagctatattccctctctgttctatttgctttaacaaagggataaaacctggcaaagtgtacattattggaggactcaaatctgtatgtgacatgtcccaactactgtccgctaactagttatccaaattgtaaagctacagaagcccagttgaggggtaagtgtgcctggctcacacagcctgcaccctgtcacctcggcaatgagccagtgtggggcactggggacttctaacccttggattgctctttttgacctgtgcataccttctaattgtaaaatatatttcagaccgtgagtaccttgagatctgagcaactgtgttaatgaagtaatagcaatggtccacagtgaaagatgtgttggggtttgcaaaacaagcattccgtcacctctttaataatgtcacagactttttaaaagagaggctatcaagttgtaatataatctgtcatgttttatttaggaaggaaggtaaatttgtgcttgcacggggatcattttgtattatttttgctaatacccagttgaagctaaaaagcaactatttgaatcctgtgaattaatttataagaatgttaaacagctttggaaatacatgcatcttatgaatcatagccttatttagcaagatcaatgttaaagtgttgttatatggcaagtatttaacacattcacagtgtttgtttgatttcaactgtgaattgtcttacagttttttcaaacctagttgtttctatggacacctgctctgaattgtacattgacttcattactaaagaacaaaaatgttcatttttgtcccagtaaattgagactgcttgtacactttcagaaaaatatgtgaatttataaagattttgtagatactt

SEQ ID NO: 343656 - DNA, 3921 bp, Homo sapiens
agaagtcagatgaaaaaattgtgattcaccataagccattgagatccacatggagccaactctctgcggtgaaaagaaagggattatctcagacagtaagccaggaggaaagaaagagacaagaggctatctttgaagtcatatcctctgaacattcatatttactcagcttggagatcttgatacgaatgtttaaaaattctaaagaactgagtgatacaatgactaaaaccgagaggcaccatcttttctccaatattacagatgtctgtgaggcaagcaaaaagttctttatagagttggaagcaagacatcagaataatatcttcatagatgacataagtgacattgtggaaaaacacacagcatccacatttgacccatatgtgaaatactgcacaaatgaagtctaccaacaacgaacactacaaaaattgttagctaccaatccatcctttaaggaagtattgtcaaggattgagtcccatgaagactgtaggaacttacccatgatctcttttctcattctccccatgcagagggtgacccgccttcccctgctgatggatactatctgtcaaaaaacacctaaggactctccgaagtatgaagtctgcaaaagagccttgaaggaagttagcaagttggttcgactatgcaatgagggcgcccggaagatggaaaggactgagatgatgtacacaattaactcccagctggaatttaaaattaagccttttcctttagtctcctcttcccggtggttggtaaaaagaggtgaattgacagcctatgttgaagacactgtgcttttctcaagaaggacatccaaacagcaagtctacttctttctctttaacgatgtgctcattatcaccaagaagaagagtgaagaaagttacaacgtcaatgattattccttaagagatcagctattggtggaatcttgtgacaatgaagagcttaattcttctccagggaagaacagctccacaatgctctattcaagacagagctctgccagtcacctctttactctgacagtccttagtaaccacgcgaatgagaaagtggagatgctactaggagctgagacgcagagcgagcgagcccgctggataactgccctgggacacagcagcgggaagccgcctgcagaccgaacctcactgacccaggtggaaatcgttaggtcatttactgctaagcagccagatgaactctccctgcaggtggctgacgtcgtcctcatctatcaacgtgtcagcgatggctggtatgagggggaacgactacgagatggagaaagaggctggtttcctatggaatgtgccaaggagataacatgtcaagctacaattgataagaatgtggagagaatgggacgcttgctaggactggagaccaacgtgtagtctctcagatggtcttttgttactgcaagatttgcacgacacttaccgggctggttggttctgggctagttttattgttaattttgtcacagcctatttaattaaaagaacgaaaacacttgcctttaagcttgccaggttgttctgctctctcatgagaagagcttggatacagtgagtttgcacagctcagtttttacctaaccacacacttgcagacctcctgaggtacacagaatagctgagcagttcacttcagggatcaggtcatctctgctcctcctagtttcaccatgttctggcaataaaaaacacatattatatcctggttttctctatccttgcattactaaggtgactgtctctctttatacatccttgtatggttctcccagtattagcaagattgtatatctgtaaagaatgtccagttttgtaaatatttccctgcctttttttttctttttttacatctgattttaatgcttcgttaacttcaaaaggaactggtagagttcagaaggtgagctgttgtttttctaaacctcttcccaggaaggggacattgacacttgaatttttgtcacctttttcctcattagaaggaaagtagaaagccttactgtaggatttttaaaaaaaaatccatctcaccccatattggtcttaaataagtatagactaattaacctaagctacctttaacaacgtagaatttagatgggttcatatatgtgagaaaaacctgaatataggacaggggtcctacttttttccccacctctgtcgcccaggctagagtatagtggtgtgatcttggcccactgcaacctctgcttcctaggttcaagtgattctcctgcctcagcctcccaagtagctgggattgtaagagtatgccaccacgcccagctactttttgtatttttagtagagacagggtttcatcatgttggccaggatggtctcttaactcctgccctcaagtgatccaccagagaggagatcctcggcctccccaagtgctgggattataggcatgagccaccgtgcccagcctactttctaattaattaaaaaaaaaaaaaaaaaaaaaaaaaaaccttcccaaatgagctgataaaaaactgacgtgaggctgctttgccttcaataatacctagttttcagctgttccaactcgtttccaaatagaaattagctggaacacactacagtaatctcaaggaagggaaaattaggccttaaaagataccaagaagtcagcatggtacccaattgaaaccttttgaccttagtgggaattcattctatttgcactaaaagccttaacttgctgtattcagagtccctcttaactgtgagtttctatagaactttactttttccactagtgcacagagagagaaaggttatcttaatagtcggtttcatggagatgaaggatgggagattaagaggggggaaatgatttttactggcagctatattccctctctgttctatttgctttaacaaagggataaaacctggcaaagtgtacattattggaggactcaaatctgtatgtgacatgtcccaactactgtccgctaactagttatccaaattgtaaagctacagaagcccagttgaggggtaagtgtgcctggctcacacagcctgcaccctgtcacctcggcaatgagccagtgtggggcactggggacttctaacccttggattgctctttttgacctgtgcataccttctaattgtaaaatatatttcagaccgtgagtaccttgagatctgagcaactgtgttaatgaagtaatagcaatggtccacagtgaaagatgtgttggggtttgcaaaacaagcattccgtcacctctttaataatgtcacagactttttaaaagagaggctatcaagttgtaatataatctgtcatgttttatttaggaaggaaggtaaatttgtgcttgcacggggatcattttgtattatttttgctaatacccagttgaagctaaaaagcaactatttgaatcctgtgaattaatttataagaatgttaaacagctttggaaatacatgcatcttatgaatcatagccttatttagcaagatcaatgttaaagtgttgttatatggcaagtatttaacacattcacagtgtttgtttgatttcaactgtgaattgtcttacagttttttcaaacctagttgtttctatggacacctgctctgaattgtacattgacttcattactaaagaacaaaaatgttcatttttgtcccagtaaattgagactgcttgtacactttcagaaaaatatgtgaatttataaagattttgtagatacttaaaaaaaaaaatacatattttactagattatttattgattaataaaaaacctctagggggggccccggtccccaattgcccttataggagtcgtttccaattcattggccgtgtttaacaagttgtactgggaaaaccctggtgtacccaatt

SEQ ID NO: 343657 - DNA, 3703 bp, Homo sapiens
agaagtcagatgaaaaaattgtgattcaccataagccattgagatccacatggagccaactctctgcggtgaaaagaaagggattatctcagacagtaagccaggaggaaagaaagagacaagaggctatctttgaagtcatatcctctgaacattcatatttactcagcttggagatcttgatacgaatgtttaaaaattctaaagaactgagtgatacaatgactaaaaccgagaggcaccatcttttctccaatattacagatgtctgtgaggcaagcaaaaagttctttatagagttggaagcaagacatcagaataatatcttcatagatgacataagtgacattgtggaaaaacacacagcatccacatttgacccatatgtgaaatactgcacaaatgaagtctaccaacaacgaacactacaaaaattgttagctaccaatccatcctttaaggaagtattgtcaaggattgagtcccatgaagactgtaggaacttacccatgatctcttttctcattctccccatgcagagggtgacccgccttcccctgctgatggatactatctgtcaaaaaacacctaaggactctccgaagtatgaagtctgcaaaagagccttgaaggaagttagcaagttggttcgactatgcaatgagggcgcccggaagatggaaaggactgagatgatgtacacaattaactcccagctggaatttaaaattaagccttttcctttagtctcctcttcccggtggttggtaaaaagaggtgaattgacagcctatgttgaagacactgtgcttttctcaagaaggacatccaaacagcaagtctacttctttctctttaacgatgtgctcattatcaccaagaagaagagtgaagaaagttacaacgtcaatgattattccttaagagatcagctattggtggaatcttgtgacaatgaagagcttaattcttctccagggaagaacagctccacaatgctctattcaagacagagctctgccagtcacctctttactctgacagtccttagtaaccacgcgaatgagaaagtggagatgctactaggagctgagacgcagagcgagcgagcccgctggataactgccctgggacacagcagcgggaagccgcctgcagaccgaacctgtggctgacgtcgtcctcatctatcaacgtgtcagcgatggctggtatgagggggaacgactacgagatggagaaagaggctggtttcctatggaatgtgccaaggagataacatgtcaagctacaattgataagaatgtggagagaatgggacgcttgctaggactggagaccaacgtgtagtctctcagatggtcttttgttactgcaagatttgcacgacacttaccgggctggttggttctgggctagttttattgttaattttgtcacagcctatttaattaaaagaacgaaaacacttgcctttaagcttgccaggttgttctgctctctcatgagaagagcttggatacagtgagtttgcacagctcagtttttacctaaccacacacttgcagacctcctgaggtacacagaatagctgagcagttcacttcagggatcaggtcatctctgctcctcctagtttcaccatgttctggcaataaaaaacacatattatatcctggttttctctatccttgcattactaaggtgactgtctctctttatacatccttgtatggttctcccagtattagcaagattgtatatctgtaaagaatgtccagttttgtaaatatttccctgcctttttttttctttttttacatctgattttaatgcttcgttaacttcaaaaggaactggtagagttcagaaggtgagctgttgtttttctaaacctcttcccaggaaggggacattgacacttgaatttttgtcacctttttcctcattagaaggaaagtagaaagccttactgtaggatttttaaaaaaaaatccatctcaccccatattggtcttaaataagtatagactaattaacctaagctacctttaacaacgtagaatttagatgggttcatatatgtgagaaaaacctgaatataggacaggggtcctacttttttccccacctctgtcgcccaggctagagtatagtggtgtgatcttggcccactgcaacctctgcttcctaggttcaagtgattctcctgcctcagcctcccaagtagctgggattgtaagagtatgccaccacgcccagctactttttgtatttttagtagagacagggtttcatcatgttggccaggatggtctcttaactcctgccctcaagtgatccaccagagaggagatcctcggcctccccaagtgctgggattataggcatgagccaccgtgcccagcctactttctaattaattaaaaaaaaaaaaaaaaaaaaaaaaaaaccttcccaaatgagctgataaaaaactgacgtgaggctgctttgccttcaataatacctagttttcagctgttccaactcgtttccaaatagaaattagctggaacacactacagtaatctcaaggaagggaaaattaggccttaaaagataccaagaagtcagcatggtacccaattgaaaccttttgaccttagtgggaattcattctatttgcactaaaagccttaacttgctgtattcagagtccctcttaactgtgagtttctatagaactttactttttccactagtgcacagagagagaaaggttatcttaatagtcggtttcatggagatgaaggatgggagattaagaggggggaaatgatttttactggcagctatattccctctctgttctatttgctttaacaaagggataaaacctggcaaagtgtacattattggaggactcaaatctgtatgtgacatgtcccaactactgtccgctaactagttatccaaattgtaaagctacagaagcccagttgaggggtaagtgtgcctggctcacacagcctgcaccctgtcacctcggcaatgagccagtgtggggcactggggacttctaacccttggattgctctttttgacctgtgcataccttctaattgtaaaatatatttcagaccgtgagtaccttgagatctgagcaactgtgttaatgaagtaatagcaatggtccacagtgaaagatgtgttggggtttgcaaaacaagcattccgtcacctctttaataatgtcacagactttttaaaagagaggctatcaagttgtaatataatctgtcatgttttatttaggaaggaaggtaaatttgtgcttgcacggggatcattttgtattatttttgctaatacccagttgaagctaaaaagcaactatttgaatcctgtgaattaatttataagaatgttaaacagctttggaaatacatgcatcttatgaatcatagccttatttagcaagatcaatgttaaagtgttgttatatggcaagtatttaacacattcacagtgtttgtttgatttcaactgtgaattgtcttacagttttttcaaacctagttgtttctatggacacctgctctgaattgtacattgacttcattactaaagaacaaaaatgttcatttttgtcccagtaaattgagactgcttgtacactttcagaaaaatatgtgaatttataaagattttgtagatactt

SEQ ID NO: 343658 - DNA, 1871 bp, Homo sapiens
agaagtcagatgaaaaaattgtgattcaccataagccattgagatccacatggagccaactctctgcggtgaaaagaaagggattatctcagacagtaagccaggaggaaagaaagagacaagaggctatctttgaagtcatatcctctgaacattcatatttactcagcttggagatcttgatacgaatgtttaaaaattctaaagaactgagtgatacaatgactaaaaccgagaggcaccatcttttctccaatattacagatgtctgtgaggcaagcaaaaagttctttatagagttggaagcaagacatcagaataatatcttcatagatgacataagtgacattgtggaaaaacacacagcatccacatttgacccatatgtgaaatactgcacaaatgaagtctaccaacaacgaacactacaaaaattgttagctaccaatccatcctttaaggaagtattgtcaaggattgagtcccatgaagactgtaggaacttacccatgatctcttttctcattctccccatgcagagggtgacccgccttcccctgctgatggatactatctgtcaaaaaacacctaaggactctccgaagtatgaagtctgcaaaagagccttgaaggaagttagcaagttggttcgactatgcaatgagggcgcccggaagatggaaaggactgagatgatgtacacaattaactcccagctggaatttaaaattaagccttttcctttagtctcctcttcccggtggttggtaaaaagaggtgaattgacagcctatgttgaagacactgtgcttttctcaagaaggacatccaaacagcaagtctacttctttctctttaacgatgtgctcattatcaccaagaagaagagtgaagaaagttacaacgtcaatgattattccttaagagatcagctattggtggaatcttgtgacaatgaagagcttaattcttctccagggaagaacagctccacaatgctctattcaagacagagctctgccagtcacctctttactctgacagtccttagtaaccacgcgaatgagaaagtggagatgctactaggagctgagacgcagagcgagcgagcccgctggataactgccctgggacacagcagcgggaagccgcctgcagaccgaacctgtggctgacgtcgtcctcatctatcaacgtgtcagcgatggctggtatgagggggaacgactacgagatggagaaagaggctggtttcctatggaatgtgccaaggagataacatgtcaagctacaattgataagaatgtggagagaatgggacgcttgctaggactggagaccaacgtgtagtctctcagatggtcttttgttactgcaagatttgcacgacacttaccgggctggttggttctgggctagttttattgttaattttgtcacagcctatttaattaaaagaacgaaaacacttgcctttaagcttgccaggttgttctgctctctcatgagaagagcttggatacagtgagtttgcacagctcagtttttacctaaccacacacttgcagacctcctgaggtacacagaatagctgagcagttcacttcagggatcaggtcatctctgctcctcctagtttcaccatgttctggagcttggtgtcttctttcaagctcatttctgttattggcaggattcacgtccttgctgttgctgagctgaggtccttgtttgcttgctggctgtgagctgggggctgctcacagcttctagaggcccttcatatcctcgccacaggctccttccatcttcaaagcagcaatggcatgttaactccttttctcacttggaatctgtttgactccctccta

SEQ ID NO: 343659 - DNA, 3713 bp, Homo sapiens
agaagtcagatgaaaaaattgtgattcaccataagccattgagatccacatggagccaactctctgcggtgaaaagaaagggattatctcagacagtaagccaggaggaaagaaagagacaagaggctatctttgaagtcatatcctctgaacattcatatttactcagcttggagatcttgatacgaatgtttaaaaattctaaagaactgagtgatacaatgactaaaaccgagaggcaccatcttttctccaatattacagatgtctgtgaggcaagcaaaaagttctttatagagttggaagcaagacatcagaataatatcttcatagatgacataagtgacattgtggaaaaacacacagcatccacatttgacccatatgtgaaatactgcacaaatgaagtctaccaacaacgaacactacaaaaattgttagctaccaatccatcctttaaggaagtattgtcaaggattgagtcccatgaagactgtaggaacttacccatgatctcttttctcattctccccatgcagagggtgacccgccttcccctgctgatggatactatctgtcaaaaaacacctaaggactctccgaagtatgaagtctgcaaaagagccttgaaggaagttagcaagttggttcgactatgcaatgagggcgcccggaagatggaaaggactgagatgatgtacacaattaactcccagctggaatttaaaattaagccttttcctttagtctcctcttcccggtggttggtaaaaagaggtgaattgacagcctatgttgaagacactgtgcttttctcaagaaggacatccaaacagcaagtctacttctttctctttaacgatgtgctcattatcaccaagaagaagagtgaagaaagttacaacgtcaatgattattccttaagagatcagctattggtggaatcttgtgacaatgaagagcttaattcttctccagggaagaacagctccacaatgctctattcaagacagagctctgccagtcacctctttactctgacagtccttagtaaccacgcgaatgagaaagtggagatgctactaggagctgagacgcagagcgagcgagcccgctggataactgccctgggacacagcagcgggaagccgcctgcagaccgaacctcactgacccaggtggaaatcgttaggtcatttactgctaagcagccagatgaactctccctgcaggtggctgacgtcgtcctcatctatcaacgtgtcagcgatggctggtatgagggggaacgactacgagatggagaaagaggctggtttcctatggaatgtgccaaggagataacatgtcaagctacaattgataagaatgtggagagaatgggacgcttgctaggactggagaccaacgtgtagtctctcagatggtcttttgttactgcaagatttgcacgacacttaccgggctggttggttctgggctagttttattgttaattttgtcacagcctatttaattaaaagaacgaaaacacttgcctttaagcttgccaggttgttctgctctctcatgagaagagcttggatacagtgagtttgcacagctcagtttttacctaaccacacacttgcagacctcctgaggtacacagaatagctgagcagttcacttcagggatcaggtcatctctgctcctcctagtttcaccatgttctggcaataaaaaacacatattatatcctggttttctctatccttgcattactaaggtgactgtctctctttatacatccttgtatggttctcccagtattagcaagattgtatatctgtaaagaatgtccagttttgtaaatatttccctgcctttttttttctttttttacatctgattttaatgcttcgttaacttcaaaaggaactggtagagttcagaaggtgagctgttgtttttctaaacctcttcccaggaaggggacattgacacttgaatttttgtcacctttttcctcattagaaggaaagtagaaagccttactgtaggatttttaaaaaaaaatccatctcaccccatattggtcttaaataagtatagactaattaacctaagctacctttaacaacgtagaatttagatgggttcatatatgtgagaaaaacctgaatataggacaggggtcctacttttttccccacctctgtcgcccaggctagagtatagtggtgtgatcttggcccactgcaacctctgcttcctaggttcaagtgattctcctgcctcagcctcccaagtagctgggattgtaagagtatgccaccacgcccagctactttttgtatttttagtagagacagggtttcatcatgttggccaggatggtctcttaactcctgccctcaagtgatccaccagagaggagatcctcggcctccccaagtgctgggattataggcatgagccaccgtgcccagcctactttctaattaattaaaaaaaaaaaaaaaaaaaaaaaaaaaccttcccaaatgagctgataaaaaactgacgtgaggctgctttgccttcaataatacctagttttcagctgttccaactcgtttccaaatagaaattagctggaacacactacagtaatctcaaggaagggaaaattaggccttaaaagataccaagaagtcagcatggtacccaattgaaaccttttgaccttagtgggaattcattctatttgcaaactttactttttccactagtgcacagagagagaaaggttatcttaatagtcggtttcatggagatgaaggatgggagattaagaggggggaaatgatttttactggcagctatattccctctctgttctatttgctttaacaaagggataaaacctggcaaagtgtacattattggaggactcaaatctgtatgtgacatgtcccaactactgtccgctaactagttatccaaattgtaaagctacagaagcccagttgaggggtaagtgtgcctggctcacacagcctgcaccctgtcacctcggcaatgagccagtgtggggcactggggacttctaacccttggattgctctttttgacctgtgcataccttctaattgtaaaatatatttcagaccgtgagtaccttgagatctgagcaactgtgttaatgaagtaatagcaatggtccacagtgaaagatgtgttggggtttgcaaaacaagcattccgtcacctctttaataatgtcacagactttttaaaagagaggctatcaagttgtaatataatctgtcatgttttatttaggaaggaaggtaaatttgtgcttgcacggggatcattttgtattatttttgctaatacccagttgaagctaaaaagcaactatttgaatcctgtgaattaatttataagaatgttaaacagctttggaaatacatgcatcttatgaatcatagccttatttagcaagatcaatgttaaagtgttgttatatggcaagtatttaacacattcacagtgtttgtttgatttcaactgtgaattgtcttacagttttttcaaacctagttgtttctatggacacctgctctgaattgtacattgacttcattactaaagaacaaaaatgttcatttttgtcccagtaaattgagactgcttgtacactttcagaaaaatatgtgaatttataaagattttgtagatactt

SEQ ID NO: 343660 - DNA, 3714 bp, Homo sapiens
agaagtcagatgaaaaaattgtgattcaccataagccattgagatccacatggagccaactctctgcggtgaaaagaaagggattatctcagacagtaagccaggaggaaagaaagagacaagaggctatctttgaagtcatatcctctgaacattcatatttactcagcttggagatcttgatacgaatgtttaaaaattctaaagaactgagtgatacaatgactaaaaccgagaggcaccatcttttctccaatattacagatgtctgtgaggcaagcaaaaagttctttatagagttggaagcaagacatcagaataatatcttcatagatgacataagtgacattgtggaaaaacacacagcatccacatttgacccatatgtgaaatactgcacaaatgaagtctaccaacaacgaacactacaaaaattgttagctaccaatccatcctttaaggaagtattgtcaaggattgagtcccatgaagactgtaggaacttacccatgatctcttttctcattctccccatgcagagggtgacccgccttcccctgctgatggatactatctgtcaaaaaacacctaaggactctccgaagtatgaagtctgcaaaagagccttgaaggaagttagcaagttggttcgactatgcaatgagggcgcccggaagatggaaaggactgagatgatgtacacaattaactcccagctggaatttaaaattaagccttttcctttagtctcctcttcccggtggttggtaaaaagaggtgaattgacagcctatgttgaagacactgtgcttttctcaagaaggacatccaaacagcaagtctacttctttctctttaacgatgtgctcattatcaccaagaagaagagtgaagaaagttacaacgtcaatgattattccttaagagatcagctattggtggaatcttgtgacaatgaagagcttaattcttctccagggaagaacagctccacaatgctctattcaagacagagctctgccagtcacctctttactctgacagtccttagtaaccacgcgaatgagaaagtggagatgctactaggagctgagacgcagagcgagcgagcccgctggataactgccctgggacacagcagcgggaagccgcctgcagaccgaacctcactgacccaggtggaaatcgttaggtcatttactgctaagcagccagatgaactctccctgcaggtggctgacgtcgtcctcatctatcaacgtgtcagcgatggctggtatgagggggaacgactacgagatggagaaagaggctggtttcctatggaatgtgccaaggagataacatgtcaagctacaattgataagaatgtggagagaatgggacgcttgctaggactggagaccaacgtgtagtctctcagatggtcttttgttactgcaagatttgcacgacacttaccgggctggttggttctgggctagttttattgttaattttgtcacagcctatttaattaaaagaacgaaaacacttgcctttaagcttgccaggttgttctgctctctcatgagaagagcttggatacagtgagtttgcacagctcagtttttacctaaccacacacttgcagacctcctgaggtacacagaatagctgagcagttcacttcagggatcaggtcatctctgctcctcctagtttcaccatgttctggcaataaaaaacacatattatatcctggttttctctatccttgcattactaaggtgactgtctctctttatacatccttgtatggttctcccagtattagcaagattgtatatctgtaaagaatgtccagttttgtaaatatttccctgcctttttttttctttttttacatctgattttaatgcttcgttaacttcaaaaggaactggtagagttcagaaggtgagctgttgtttttctaaacctcttcccaggaaggggacattgacacttgaatttttgtcacctttttcctcattagaaggaaagtagaaagccttactgtaggatttttaaaaaaaaatccatctcaccccatattggtcttaaataagtatagactaattaacctaagctacctttaacaacgtagaatttagatgggttcatatatgtgagaaaaacctgaatataggacaggggtcctacttttttccccacctctgtcgcccaggctagagtatagtggtgtgatcttggcccactgcaacctctgcttcctaggttcaagtgattctctactttttgtatttttagtagagacagggtttcatcatgttggccaggatggtctcttaactcctgccctcaagtgatccaccagagaggagatcctcggcctccccaagtgctgggattataggcatgagccaccgtgcccagcctactttctaattaattaaaaaaaaaaaaaaaaaaaaaaaaaaaccttcccaaatgagctgataaaaaactgacgtgaggctgctttgccttcaataatacctagttttcagctgttccaactcgtttccaaatagaaattagctggaacacactacagtaatctcaaggaagggaaaattaggccttaaaagataccaagaagtcagcatggtacccaattgaaaccttttgaccttagtgggaattcattctatttgcactaaaagccttaacttgctgtattcagagtccctcttaactgtgagtttctatagaactttactttttccactagtgcacagagagagaaaggttatcttaatagtcggtttcatggagatgaaggatgggagattaagaggggggaaatgatttttactggcagctatattccctctctgttctatttgctttaacaaagggataaaacctggcaaagtgtacattattggaggactcaaatctgtatgtgacatgtcccaactactgtccgctaactagttatccaaattgtaaagctacagaagcccagttgaggggtaagtgtgcctggctcacacagcctgcaccctgtcacctcggcaatgagccagtgtggggcactggggacttctaacccttggattgctctttttgacctgtgcataccttctaattgtaaaatatatttcagaccgtgagtaccttgagatctgagcaactgtgttaatgaagtaatagcaatggtccacagtgaaagatgtgttggggtttgcaaaacaagcattccgtcacctctttaataatgtcacagactttttaaaagagaggctatcaagttgtaatataatctgtcatgttttatttaggaaggaaggtaaatttgtgcttgcacggggatcattttgtattatttttgctaatacccagttgaagctaaaaagcaactatttgaatcctgtgaattaatttataagaatgttaaacagctttggaaatacatgcatcttatgaatcatagccttatttagcaagatcaatgttaaagtgttgttatatggcaagtatttaacacattcacagtgtttgtttgatttcaactgtgaattgtcttacagttttttcaaacctagttgtttctatggacacctgctctgaattgtacattgacttcattactaaagaacaaaaatgttcatttttgtcccagtaaattgagactgcttgtacactttcagaaaaatatgtgaatttataaagattttgtagatactt

SEQ ID NO: 343661 - DNA, 582 bp, Homo sapiens
tctcatttctttgatgatagcttctctgtttctccttcagaaagtcttgttttttatatgcatatttactttttgggtgcactctccttgttaatgagttatttgcatctgattttgagtttattcagcaaatatttattaatgatttactgtatactctgtgcttggggagttgacctagggaactcaaaggaggctcctttgaagaattgatgcttgagctgagatctcaggaatgagtaggaattatctaagacatgagagaacagctgttaaggtagggaaagtagcatttgtttatatatttggaggaaggaagtatgatgagtactaggtactgtaagaaaacccttgtggttggagtagagaatgtaggagaagggacagtatgaagtgagatgcggctagagaaggtacgtaggggcttgacttcccagggccttcatgtgagccatattaagcagttatttatccacctcctacccccagcagtggaaagccattgagaaacttttagtacagaagtgatatggtgaaatttgtattttgaaagatttacttaggctgcagtttggagaatga

SEQ ID NO: 343662 - DNA, 294 bp, Homo sapiens
aggtaagatgtgcgttgaatccagtgagttcaagaccagcactaggcaagtatagcaaaacccttgtggttggagtagagaatgtaggagaagggacagtatgaagtgagatgcggctagagaaggtacgtaggggcttgacttcccagggccttcatgtgagccatattaagcagttatttatccacctcctacccccagcagtggaaagccattgagaaacttttagtacagaagtgatatggtgaaatttgtattttgaaagatttacttaggctgcagtttggagaatga

SEQ ID NO: 343663 - DNA, 705 bp, Homo sapiens
aagctcttgaggcccaacatgtggcatgaatcagtgctccggggcagggctcctcaacctcggcattcctggtattgcgggctgggtcattctttgttgtgggaccctcctgtgcatgctaggatgtttaccagcatccctggctgctacccactagagttaggagcaccgtccttagttgtgacaacccaaaatgtctccagacatcgccaaacatgtcctagtttcggggggggaggtgcggggaattgccactgctgtgggtgacagctgctgttgccaagtctgccacagtcagtcagtggtggacctgccctcaacacttacctagcagacatcttcccagtctgcatgtgactggggcttagacccaacttagtccatagaggtgcatgcttagacaaaagctggtttttctcagcatatcgtgtgcttcctgcacaaagaccctaacagttaattgctgtgattaggcaggggctgcgccatctccttgttggtggtgactagttggtgatgactggcgaggagatgtgggagctttcacaggtctgttcccaagccacaaggagtccaggcccggttctagcacacctgtgccggcctcttctatttagcttggctggttcctggggctgcggaagcaactgtcttaaactacccatgaaaaaaataataaagccaaaaaagcgatttacaccatta

SEQ ID NO: 343664 - DNA, 1062 bp, Homo sapiens
atacagccaagattgagaatctggatgatttctagtcctggaggataaatacaatactaataacttccaaattaatgtatttaacacatttttcccaaactccagatgtgattattctgttgtctgttttacatttccactagaaataggcatcttgattgcatgccctttaccccacactggctccttcctgggtttgcctttcgtgcatgcagctctcaggccacaagcccaggaggcatcctgattcctctgttcactcatcacacagctcacctggcagcaagttctttccacttgccctagcaaatacgcacatcctaaatctcactgcttctcccaccatcacttctcttctgggtagcctcagaagcctcctaactcccctgtgctcttgcactgtcactctcagacagtccttgtgcaatgagaatggtcttatcgctgatcacagtcattcccttgctccaaccccccacggctttccattccaacggacaaactccccactccttaccaggagctacaggctccccttcatgtggcctctgcccaattctgctacctaatttcctcccactccctccttccctgcctcagtcaggccacactgaccaccatgctgttcctcaaacttcccaagctctttcctcctacttcagagcctttgcacacacccctccctctgcctggaagccccttccctatagattgttccttggctctctctctaatttttctcaggtttctgctcagatgttaccccaggagaaagcctatccaaaatgctcctctctcccacccactctctagcccctgcctctggtttgttttttccctccacagcgtttatctccactcaaaatcctgtttttccagctattttgttagaacttttgtcactgctctatccccagcaccatcagcagtgctcacacgcagtaaatgacctatacatacttgtggctgaatgatgaagtgctactccttgaggagtggtcccaggaccttggccccttttccagcctctgagcagaccatgctggctatggccaggatctc

SEQ ID NO: 343665 - DNA, 345 bp, Homo sapiens
tatttaaagtgtaccatttcatgctctttgacatacagatatacctgtgaacccgttgtcagaatcaagatattgaacatgtagattttcctcacaagtgtctttacaaccctttgtaatttatcatactcatccttcacctatcttcaggcaaccagtgatctgctttctattatcatggattagttttcttgctctgcatattatgtataatcatacagtgtaaattctattttgtctgacttctttcactaagcataagtctgaaatttattcatgtttgttcatgtatcagtggcttgcctttttttgtgctaagtaatattctattgtatgagtatatta

SEQ ID NO: 343666 - DNA, 415 bp, Homo sapiens
gatgaataatctaggaaatcccttgaaaggaagaaaagaggatcatcagagacatcttctggagctccacaaactgctcagagcagagaggccaccagatacgaatgctgcctcagataatccaatggaggaagagggtttggctggtattttctggctgagttcttgataagaaactgtaatcacatctgctagctagggatccaagaaaaacaagatattgtctctttatacacattccacagcccctaccttctctcaagagatgttaaaatggcttaaaatgtgttaaaatgtgacaatttaataaatgtggcagaaacaaaaaagagactcctaaagtattcctctcttcagagagtatgaagctattaattcagcaaatgaatccaggagctcagaaagggttaccccg

SEQ ID NO: 343667 - DNA, 824 bp, Homo sapiens
gggggagtggggagagggaagggtgctactggtatctcgtgggtagaggttaggtataaacaaggtataggacagcatccacaacaaaaaaattacctggtccagaatgccagccctgccaagcaacattgggaaacccagcttagttcctttgtataaggtactttgccagttagattctgtatacatgctgattattgataaagatgagtcacagacatggataggcttcatttaacattcattttaaaagacagacatgtaagaaggttagtaggtttcatttctttttaaggttacagggaaagtactccaaaattaatctaaaagtccttacacttttttcagaaactgagaaaaggttccagatgaattttactaatttaatttttttatgacgagctattcatgtaaaagtgtattatgaatagagggcttatgagatatgagtgccgtagtgtgtattcataaagtcaaacgtacacttaaaaaacaagtatcaaggtaaatggaatgatctattgggggaaaccttggagctctctctctttccatatgttttattactcaccaagtcaagggctctttaacttaggatcttgtttttctgtgtacacttttcctgtttactgtttaaaattggacccttactaaaaatacagaaaattagctgggcatggtggcgtgcacctgtaatttcagctactggggaggctgaggtagggagaatcgcttgaaccagggagacggaggttgcagtgagctgagatcgcgccattgcactccagcctgggtgacagggcgagactcagtctcaaaaaaaa

SEQ ID NO: 343668 - DNA, 127 bp, Homo sapiens
caatcaacattgccagcctagcactaaaagattccactatgacagacaaccacatgaggccgtatctcagcattagaaacaaatggatgggggagagtggttaagagcactgattttaagaattaaa

SEQ ID NO: 343669 - DNA, 614 bp, Homo sapiens
agttgagggcaactgacttgggcatattccacggggttacctccgtcctggggggtcaccgcttcctgtcttcagacccctcctccatatttccctctcttcactcttgagttctctctctgaagtgccaggagaggtgcattgaggttagttggcatattccttgaaatattcctggcctgcttctcagggggcagagtcaggaggtaattctgaagcactgggaggagagtgtgggcgcaggggggcttcccggggggcacttaagacactgtgtgttcaggaacctgggggctgtgccttgggaatccagagagtgctgagggctgccctgctcctggaaaagatgaagaagcccttctcttccttctgattcccaagttgtggaacccaagcagatccattattgccccagctaaactcctttgtgatgattcttttaagagaatgagctgggccaggggtggaggaaggcaagtggagggagagcattaggacaaatacctaatgcatgcggggcttcaaacctagatgacaggttgacaggtgcagcaaaccaccatggcacatgtatacctatgtaacaaacctgcacgttctgcacatgtatcccg

SEQ ID NO: 343670 - DNA, 207 bp, Homo sapiens
  misc_feature (47)..(49): n is a, c, g, or t
attcgcggccgcgtcgactgatatttcataatatctaaattttgtannntagatattttatattagttcaaaagtaacatgatacgcatttccaaaatgggacaggagaatctgaagttatatttggctctttttactatctcattttattcttgcatctatgcatattgaaaatctaaaacatctaattttataacttatatttac

SEQ ID NO: 343671 - DNA, 395 bp, Homo sapiens
gctgttttttttttttttaattgccctggccctacaacaatgcctagtacctggtaggagaacaagaaatagttgttaaataaatgaatatacttctctgaaacttactctctctttcctgatcaatatatgccatcatttggtgaacatacagaaatttatttaccatagacaacataatatactttaaaagtatattagttagagatagccaaaatattcaggaagttattactcatttatttttaatttttcctagtattaagttaggccatgtgaaatcgcaatttttgtagatacaaaaaaagatgaataaaggcaatttcatattgcccagctatttaaatgagcctctttctctcaagttttctgtcattttgaaaaaaaattgtttg

SEQ ID NO: 343672 - DNA, 224 bp, Homo sapiens
tgctgggattacaggtgtgagccaccgcgccctgccatttgggtccctcttaacggctgtgttcatggatcattatctcttctgagcctcagttccttgatctgtaaagtggaggactcaaagaatcagcctcctagaagagttgcatagattaaatgagatagtgggtgtaaagtgtttagctttctgtgcatgtgtaaactgcccaagaggaagttagctga

SEQ ID NO: 343673 - DNA, 657 bp, Homo sapiens
tctgtctgaaaatgagttgttgctaaactaattgttggattaaagtccagtttaaacatcgacgccattgataatgaaagaccttgagctgtcagctaattttcatgacattgtgtagcgcctgctttcctaaagtctgtgggatgttgcggaagcacacttccagttttttgtttcagatatttaatttctgttggtcataatattgggcatgtacccatgggctgacattggccatctgagatccatgatttctctctatctgcattataatttatgtattgtaattgtatgtggtttacatctgctggtatgtatacgtcttctctttgatatgttttgtcttagtgtgcttcaagtagcaaagaattaccttttctgggttaatagctttacaactggattatattctccgtgcttaaaaccttagcactgtttgatgcgttttcccaacatcgtaaggctggcagattggagtgttctttcttttcagtgtatggaagcaccaggtagcaatccagttttaattttctgcctgttaattcaggtatgggcattagatcattaatgaaattcagttaaggtaatgtacaaatctcgttaactgattctagacatttatttatttatttatttatttatttatttatttattta

SEQ ID NO: 343674 - DNA, 1272 bp, Homo sapiens
cagaaacattgtctgtaatacaagtgctaacttatagtgcaaaaattaccctaaagaaaaccatttgaggctgggcacggtggctcactcctgtaatcctagcactttgggaggccgaggtgggcgaatcacctgaggttggttgttccagaccagcctgaccaacatggagaaaccccatatctactaaaaatacaaaattagtcaggcgtggtggcgcgtgcctgtgataccagctactcaggaggctgaggcaggagaatcacttgaacccagaaggcagagattgtggtgagctgagatcatgccattgtattccagcctgggcaacgagagcaaaactctgtctcaaaaaaagaaagaaagccatttggtggctgggtgtggtagctcacccctgtaatctcagcacgttgggaggctgaggcgggtggatcacttgaggtcaggagtttgagaccagtccccccaacatggcaaaaccctgtctctactcaaaacacacagaaaaattagctgagtgtggcagcatgtgcctgtaatcccagctactcaggaggctgaggcaggagaatcgcttgaatctgggaggcagagaggttgcagtgagccgagattgtgccagtgcattccagtctgggcaacagtgagactccatttcaaaacaaaaacaaagaaacaaacaaaaagaaagccatttggtctcttaatagtgtattaggagatattttataggagtgtgtttgatttctttttttctttctgaaactttttaatgtacatgttatccctttttaaggagtggaggtaagtcacttgagccttaagaatttgaggtttgaattagggagttaggaagggggcccaattttagtattttacaagtatggtgggtggtaatggctttggacatgttgaaattaaggtgaatggcatattgtgttttactcttgtgtagtaaagttagcagcaaatacagaactgagcctaggccagggaactgggattggggttagatctaagcaagatcagcatgtaagtgatagtggagaaagtaaattgagaggtgaggactcatccccttggtggaaattcggaattaataaagcaggaggagagtcaggataatgggctgttgaataaagaaagtaagtttttaggaagaggtaatgtgtatccaagaagtaggaaagaaatgagacttaaagcgtttggggtttggctgtgttagagctcagtacccaacaggtgctcagtaaagtaacttgactc

SEQ ID NO: 343675 - DNA, 768 bp, Homo sapiens
cagaaacattgtctgtaatacaagtgctaacttatagtgcaaaaattaccctaaagaaaaccatttgaggctgggcacggtggctcactcctgtaatcctagcactttgggaggccgaggtgggcgaatcacctgaggttggttgttccagaccagcctgaccaacatggagaaaccccatatctactaaaaatacaaaattagtcaggcgtggtggcgcgtgcctgtgataccagctactcaggaggctgaggcaggagaatcacttgaacccagaaggcagagattgtggtgagctgagatcatgccattgtattccagcctgggcaacgagagcaaaactctgtctcaaaaaaagaaagaaagccatttggtggctgggtgtggtagctcacccctgtaatctcagcacgttgggaggctgaggcgggtggatcacttgaggtcaggagtttgagaccagtccccccaacatggcaaaaccctgtctctactcaaaacacacagaaaaattagctgagtgtggcagcatgtgcctgtaatcccagctactcaggaggctgaggcaggagaatcgcttgaatctgggaggcagagaggttgcagtgagccgagattgtgccagtgcattccagtctgggcaacagtgagactccatttcaaaacaaaaacaaagaaacaaacaaaaagaaagccatttggtctcttaatctatatgtatgaggacaggagtggtgactcacgcctgtacgaagggggatggcgagg

SEQ ID NO: 343676 - DNA, 358 bp, Homo sapiens
actcctgttcctggaacaggagtaggtcaggcaattcctctctacagttatcaagtgcaaaatgtgatacgtttactaaaaataatcattccaggacactggaaaatgaccaatggcaggcaacaacttaagcagtacttgctcagtggggaagtgctagggcactgggtgagaactgtgtgttcatggccttcctgcctggaggcgttcccatcgtaggcagtgacaccccagggcctggaggtgtgaacgtggtagagggcaagtggcaggcacagctgctagaaattgaagggggacagctggaagcaagagggctacagaggttaagagatgttacaatctccccacatctctg

SEQ ID NO: 343677 - DNA, 1592 bp, Homo sapiens
gcattcatggcaatccactactccagacagacggctttggaatccaccagctacatccagctccctgaggcagagttgagaatggagagaatgttacctctcctggctctggggctcttggcggctgggttctgccctgctgtcctctgccaccctaacagcccacttgacgaggagaatctgacccaggagaaccaagaccgagggacacacgtggacctcggattagcctccgccaacgtggacttcgctttcagcctgtacaagcagttagtcctgaaggcccctgataagaatgtcatcttctccccactgagcatctccaccgccttggccttcctgtctctgggggcccataataccaccctgacagagattctcaaaggcctcaagttcaacctcacggagacttctgaggcagaaattcaccagagcttccagcacctcctgcgcaccctcaatcagtccagcgatgagctgcagctgagtatgggaaatgccatgtttgtcaaagagcaactcagtctgctggacaggttcacggaggatgccaagaggctgtatggctccgaggcctttgccactgactttcaggactcagctgcagctaagaagctcatcaacgactacgtgaagaatggaactagggggaaaatcacagatctgatcaaggaccttgactcgcagacaatgatggtcctggtgaattacatcttctttaaagccaaatgggagatgccctttgacccccaagatactcatcagtcaaggttctacttgagcaagaaaaagtgggtaatggtgcccatgatgagtttgcatcacctgactataccttacttccgggacgaggagctgtcctgcaccgtggtggagctgaagtacacaggcaatgccagcgcactcttcatcctccctgatcaagacaagatggaggaagtggaagccatgctgctcccagagaccctgaagcggtggagagactctctggagttcagagagataggtgagctctacctgccaaagttttccatctcgagggactataacctgaacgacatacttctccagctgggcattgaggaagccttcaccagcaaggctgacctgtcagggatcacaggggccaggaacctagcagtctcccaggtggtccataaggctgtgcttgatgtatttgaggagggcacagaagcatctgctgccacagcagtcaaaatcaccctcctttctgcattagtggagacaaggaccattgtgcgtttcaacaggcccttcctgatgatcattgtccctacagacacccagaacatcttcttcatgagcaaagtcaccaatcccaagcaagcctagagcttgccatcaagcagtggggctctcagtaaggaacttggaatgcaagctggatgcctgggtctctgggcacagcctggcccctgtgcaccgagtggccatggcatgtgtggccctgtctgcttatccttggaaggtgacagcgattccctgtgtagctctcacatgcacaggggcccatggactcttcagtctggagggtcctgggcctcctgacagcaataaataatttcgttgga

SEQ ID NO: 343678 - DNA, 1401 bp, Homo sapiens
ccccagtcattccatgttgggaggctgcagggaccagagaagctgagatggtctttggggaggggaaaggaaagatggacagttattttggtcctagaaagcccaaaggtggggaagtgtcaagaaggaagatgagggcacaagagaatgtagggccacccagaagctggctctcattgcaattacagaaagaaaaaccaaaataaagaaagaaaggaaagaagctcccatttattgagcagctactctcaccagccattcacatgcaatacctcgtttaattctcgcagcggctctgaaaggtggatggtggtattgccatttgttaggtaggagacatgccgtccagaaaagcaaataattaaacattcaaagttgacctgggcccatttgaaaattccttttgctccctcattttaacccctaaagtaaagccgtttgtgactttatgagcttttaccaagcatctcctaaaaccaagaatggaggtgaaagattgtggagcccacaacctagagaaaggattgacaattttttttccataaagggcctagtagtatgtattttaggctgtgtggtccacatgagggcagattcttctttttgacttcctcctctgcatcttcttcatcttctctttcctcttcattttttttacaacgagctgtcctgcaccgtggtggagctgaagtacacaggcaatgccagcgcactcttcatcctccctgatcaagacaagatggaggaagtggaagccatgctgctcccagagaccctgaagcggtggagagactctctggagttcagagagataggtgagctctacctgccaaagttttccatctcgagggactataacctgaacgacatacttctccagctgggcattgaggaagccttcaccagcaaggctgacctgtcagggatcacaggggccaggaacctagcagtctcccaggtggtccataaggctgtgcttgatgtatttgaggagggcacagaagcatctgctgccacagcagtcaaaatcaccctcctttctgcattagtggagacaaggaccattgtgcgtttcaacaggcccttcctgatgatcattgtccctacagacacccagaacatcttcttcatgagcaaagtcaccaatcccaagcaagcctagagcttgccatcaagcagtggggctctcagtaaggaacttggaatgcaagctggatgcctgggtctctgggcacagcctggcccctgtgcaccgagtggccatggcatgtgtggccctgtctgcttatccttggaaggtgacagcgattccctgtgtagctctcacatgcacaggggcccatggactcttcagtctggagggtcctgggcctcctgacagcaataaataatttcgttgga

SEQ ID NO: 343679 - DNA, 712 bp, Homo sapiens
gcattcatggcaatccactactccagacagacggctttggaatccaccagctacatccagctccctgaggcagagttgagaatggagagaatgttacctctcctggctctggggctcttggcggctgggttctgccctgctgtcctctgccaccctaacagcccacttgacgaggagaatctgacccaggagaaccaagaccgagggacacacgtggacctcggattagcctccgccaacgtggacttcgctttcagcctgtacaagcagtggtccataaggctgtgcttgatgtatttgaggagggcacagaagcatctgctgccacagcagtcaaaatcaccctcctttctgcattagtggagacaaggaccattgtgcgtttcaacaggcccttcctgatgatcattgtccctacagacacccagaacatcttcttcatgagcaaagtcaccaatcccaagcaagcctagagcttgccatcaagcagtggggctctcagtaaggaacttggaatgcaagctggatgcctgggtctctgggcacagcctggcccctgtgcaccgagtggccatggcatgtgtggccctgtctgcttatccttggaaggtgacagcgattccctgtgtagctctcacatgcacaggggcccatggactcttcagtctggagggtcctgggcctcctgacagcaataaataatttcgttgga

SEQ ID NO: 343680 - DNA, 382 bp, Homo sapiens
  misc_feature (22)..(22): n is a, c, g, or t
caggcgttctagaggatccgangtagcccaagagctgtcctgcaccgtggtggagctgaagtacacaggcaatgccagcgcactcttcatcctccctgatcaagacaagatggaggaagtggaagccatgctgctcccagagaccctgaagcggtggagagactctctggagttcagagagataggtgagctctacctgccaaagttttccatctcgagggactataacctgaacgacatacttctccagctgggcattgaggaagccttcaccagcaaggctgacctgtcagggatcacaggggccaggaacctagcagtctcccagtccataaggctgtgcttgatctactttgaggagacgcgtcagttcggacgccta

SEQ ID NO: 343681 - DNA, 884 bp, Homo sapiens
ccccagtcattccatgttgggaggctgcagggaccagagaagctgagatggtctttggggaggggaaaggaaagatggacagttattttggtcctagaaagcccaaaggtggggaagtgtcaagaaggaagatgagggcacaagagaatgtagggccacccagaagctggctctcattgcaattacagaaagaaaaaccaaaataaagaaagaaaggaaagaagctcccatttattgagcagctactctcaccagccattcacatgcaatacctcgtttaattctcgcagcggctctgaaaggtggatggtggtattgccatttgttaggtaggagacatgccgtccagaaaagcaaataattaaacattcaaagttgacctgggcccatttgaaaattccttttgctccctcattttaacccctaaagtaaagccgtttgtgactttatgagcttttaccaagcatctcctaaaaccaagaatggaggtgaaagattgtggagcccacaacctagagaaaggattgacaattttttttccataaagggcctagtagtatgtattttaggctgtgtggtccacatgagggcagattcttctttttgacttcctcctctgcatcttcttcatcttctctttcctcttcattttttttacaacctttgaaaaatataagcaccattcttagctttaggtacacacaaaaataagctatggctgtattggcttacaggctatagtttcctgacccctgttctaggggaggaaaataattgtacccaactaaatgcgtgcgaatcatgggcctatgtcatgattcccaaagaatgagtttcatggaattttcaacattttaaatattttactccattcttcccttgct

SEQ ID NO: 343682 - DNA, 1650 bp, Homo sapiens
gcattcatggcaatccactactccagacagacggctttggaatccaccagctacatccagctccctgaggcagagttgagaatggagagaatgttacctctcctggctctggggctcttggcggctgggttctgccctgctgtcctctgccaccctaacagcccacttgacgaggagaatctgacccaggagaaccaagaccgagggacacacgtggacctcggattagcctccgccaacgtggacttcgctttcagcctgtacaagcagttagtcctgaaggcccctgataagaatgtcatcttctccccactgagcatctccaccgccttggccttcctgtctctgggggcccataataccaccctgacagagattctcaaaggcctcaagttcaacctcacggagacttctgaggcagaaattcaccagagcttccagcacctcctgcgcaccctcaatcagtccagcgatgagctgcagctgagtatgggaaatgccatgtttgtcaaagagcaactcagtctgctggacaggttcacggaggatgccaagaggctgtatggctccgaggcctttgccactgactttcaggactcagctgcagctaagaagctcatcaacgactacgtgaagaatggaactagggggaaaatcacagatctgatcaaggaccttgactcgcagacaatgatggtcctggtgaattacatcttctttaaagccaaatgggagatgccctttgacccccaagatactcatcagtcaaggttctacttgagcaagaaaaagtgggtaatggtgcccatgatgagtttgcatcacctgactataccttacttccgggacgaggagctgtcctgcaccgtggtggagctgaagtacacaggcaatgccagcgcactcttcatcctccctgatcaagacaagatggaggaagtggaagccatgctgctcccagagaccctgaagcggtggagagactctctggagttcagagagataggtgagctctacctgccaaagttttccatctcgagggactataacctgaacgacatacttctccagctgggcattgaggaagccttcaccagcaaggctgacctgtcagggatcacaggggccaggaacctagcagtctcccaggtggtccataaggctgtgcttgatgtatttgaggagggcacagaagcatctgctgccacagcagtcaaaatcaccctcctttctgcattagtggagacaaggaccattgtgcgtttcaacaggcccttcctgatgatcattgtccctacagacacccagaacatcttcttcatgagcaaagtcaccaatcccaagcaagcctagagcttgccatcaagcagtggggctctcagtaaggaacttggaatgcaagctggatgcctgggtctctgggcacagcctggcccctgtgcaccgagtggccatggcatgtgtggccctgtctgcttatccttggaaggtgacagcgattccctgtgtagctctcacatgcacaggggcccatggactcttcagtctggagggtcctgggcctcctgacagcaataaataatttcgttggaaaaaaaaaagagaagttggcctataggagtcgattacagtgagcgcggaatttagatt

SEQ ID NO: 343683 - DNA, 1805 bp, Homo sapiens
gcattcatggcaatccactactccagacagacggctttggaatccaccagctacatccagctccctgaggcagagttgagaatggagagaatgttacctctcctggctctggggctcttggcggctgggttctgccctgctgtcctctgccaccctaacagcccacttgacgaggagaatctgacccaggagaaccaagaccgagggacacacgtggacctcggattagcctccgccaacgtggacttcgctttcagcctgtacaagcagttagtcctgaaggcccctgataagaatgtcatcttctccccactgagcatctccaccgccttggccttcctgtctctgggggcccataataccaccctgacagagattctcaaaggcctcaagttcaacctcacggagacttctgaggcagaaattcaccagagcttccagcacctcctgcgcaccctcaatcagtccagcgatgagctgcagctgagtatgggaaatgccatgtttgtcaaagagcaactcagtctgctggacaggttcacggaggatgccaagaggctgtatggctccgaggcctttgccactgactttcaggactcagctgcagctaagaagctcatcaacgactacgtgaagaatggaactagggggaaaatcacagatctgatcaaggaccttgactcgcagacaatgatggtcctggtgaattacatcttctttaaagccaaatgggagatgccctttgacccccaagatactcatcagtcaaggttctacttgagcaagaaaaagtgggtaatggtgcccatgatgagtttgcatcacctgactataccttacttccgggacgaggagctgtcctgcaccgtggtggagctgaagtacacaggcaatgccagcgcactcttcatcctccctgatcaagacaagatggaggaagtggaagccatgctgctcccagagaccctgaagcggtggagagactctctggagttcagagagataggtgagctctacctgccaaagttttccatctcgagggactataacctgaacgacatacttctccagctgggcattgaggaagccttcaccagcaaggctgacctgtcagggatcacaggggccaggaacctagcagtctcccaggtggtccataaggctgtgcttgatgtatttgaggagggcacagaagcatctgctgccacagcagtcaaaatcaccctcctttctgcattagtggagacaaggaccattgtgcgtttcaacaggcccttcctgatgatcattgtccctacagacacccagaacatcttcttcatgagcaaagtcaccaatcccaagcaagcctagagcttgccatcaagcagtggggctctcagtaaggaacttggaatgcaagctggatgcctgggtctctgggcacagcctggcccctgtgcaccgagtggccatggcatgtgtggccctgtctgcttatccttggaaggtgacagcgattccctgtgtagctctcacatgcacaggggcccatggactcttcagtctggagggtcctgggcctcctgacagcaataaataatttcgttggagtaaaaacaagagacgacacaccagaaacaacaaacattgtgttggcgcggcctgggacccgcgaagaagggttttcaaagcccctctggttgggcgccgggggcccgatgggaacgcggaccgggccaacgcggggccacaggaaaccgggcacaagccggcgcggggtttcccacataaaaacccggggaacagggcgctgaaaccccaag

SEQ ID NO: 343684 - DNA, 1882 bp, Homo sapiens
  misc_feature (1629)..(1629): n is a, c, g, or t
  misc_feature (1717)..(1717): n is a, c, g, or t
  misc_feature (1854)..(1854): n is a, c, g, or t
  misc_feature (1861)..(1861): n is a, c, g, or t
gcattcatggcaatccactactccagacagacggctttggaatccaccagctacatccagctccctgaggcagagttgagaatggagagaatgttacctctcctggctctggggctcttggcggctgggttctgccctgctgtcctctgccaccctaacagcccacttgacgaggagaatctgacccaggagaaccaagaccgagggacacacgtggacctcggattagcctccgccaacgtggacttcgctttcagcctgtacaagcagttagtcctgaaggcccctgataagaatgtcatcttctccccactgagcatctccaccgccttggccttcctgtctctgggggcccataataccaccctgacagagattctcaaaggcctcaagttcaacctcacggagacttctgaggcagaaattcaccagagcttccagcacctcctgcgcaccctcaatcagtccagcgatgagctgcagctgagtatgggaaatgccatgtttgtcaaagagcaactcagtctgctggacaggttcacggaggatgccaagaggctgtatggctccgaggcctttgccactgactttcaggactcagctgcagctaagaagctcatcaacgactacgtgaagaatggaactagggggaaaatcacagatctgatcaaggaccttgactcgcagacaatgatggtcctggtgaattacatcttctttaaagccaaatgggagatgccctttgacccccaagatactcatcagtcaaggttctacttgagcaagaaaaagtgggtaatggtgcccatgatgagtttgcatcacctgactataccttacttccgggacgaggagctgtcctgcaccgtggtggagctgaagtacacaggcaatgccagcgcactcttcatcctccctgatcaagacaagatggaggaagtggaagccatgctgctcccagagaccctgaagcggtggagagactctctggagttcagagagataggtgagctctacctgccaaagttttccatctcgagggactataacctgaacgacatacttctccagctgggcattgaggaagccttcaccagcaaggctgacctgtcagggatcacaggggccaggaacctagcagtctcccaggtggtccataaggctgtgcttgatgtatttgaggagggcacagaagcatctgctgccacagcagtcaaaatcaccctcctttctgcattagtggagacaaggaccattgtgcgtttcaacaggcccttcctgatgatcattgtccctacagacacccagaacatcttcttcatgagcaaagtcaccaatcccaagcaagcctagagcttgccatcaagcagtggggctctcagtaaggaacttggaatgcaagctggatgcctgggtctctgggcacagcctggcccctgtgcaccgagtggccatggcatgtgtggccctgtctgcttatccttggaaggtgacagcgattccctgtgtagctctcacatgcacaggggcccatggactcttcagtctggaggcccaggaccctccagactgaagagtccatgggccccctgtgccatgtgagagcttacacagggaatcgctgtcacnttccaaggataagcagacagggccacacatgccagcgcactcttcatcctccctgatcaagacaagatggaggaagtggaagccatgntgctcccagagaccctgaagcggtggagagactctctggagttcagagagataggtgagctctacctgccaaagttttccatctcgagggactataacctgaacgacatacttctccagctgggcattgaggaagcnttcaccngcaaggctgacctgtcaaggg

SEQ ID NO: 343685 - DNA, 1582 bp, Homo sapiens
ggacgcgtgggtcgacccacgcgtccgtggaatccaccagctacatccagctccctgaggcagagttgagaatggagagaatgttacctctcctggctctggggctcttggcggctgggttctgccctgctgtcctctgccaccctaacagcccacttgacgaggagaatctgacccaggagaaccaagaccgagggacacacgtggacctcggattagcctccgccaacgtggacttcgctttcagcctgtacaagcagttagtcctgaaggcccctgataagaatgtcatcttctccccactgagcatctccaccgccttggccttcctgtctctgggggcccataataccaccctgacagagattctcaaaggcctcaagttcaacctcacggagacttctgaggcagaaattcaccagagcttccagcacctcctgcgcaccctcaatcagtccagcgatgagctgcagctgagtatgggaaatgccatgtttgtcaaagagcaactcagtctgctggacaggttcacggaggatgccaagaggctgtatggctccgaggcctttgccactgactttcaggactcagctgcagctaagaagctcatcaacgactacgtgaagaatggaactagggggaaaatcacagatctgatcaaggaccttgactcgcagacaatgatggtcctggtgaattacatcttctttaaagccaaatgggagatgccctttgacccccaagatactcatcagtcaaggttctacttgagcaagaaaaagtgggtaatggtgcccatgatgagtttgcatcacctgactataccttacttccgggacgaggagctgtcctgcaccgtggtggagctgaagtacacaggcaatgccagcgcactcttcatcctccctgatcaagacaagatggaggaagtggaagccatgctgctcccagagaccctgaagcggtggagagactctctggagttcagagagataggtgagctctacctgccaaagttttccatctcgagggactataacctgaacgacatacttctccagctgggcattgaggaagccttcaccagcaaggctgacctgtcagggatcacaggggccaggaacctagcagtctcccaggtggtccataaggctgtgcttgatgtatttgaggagggcacagaagcatctgctgccacagcagtcaaaatcaccctcctttctgcattagtggagacaaggaccattgtgcgtttcaacaggcccttcctgatgatcattgtccctacagacacccagaacatcttcttcatgagcaaagtcaccaatcccaagcaagcctagagcttgccatcaagcagtggggctctcagtaaggaacttggaatgcaagctggatgcctgggtctctgggcacagcctggcccctgtgcaccgagtggccatggcatgtgtggccctgtctgcttatccttggaaggtgacagcgattccctgtgtagctctcacatgcacaggggcccatggactcttcagtctggagggtcctgggcctcctgacagcaataaataatttcgttgga

SEQ ID NO: 343686 - DNA, 1600 bp, Homo sapiens
gcattcatggcaatccactactccagacagacggctttggaatccaccagctacatccagctccctgaggcagagttgagaatggagagaatgttacctctcctggctctggggctcttggcggctgggttctgccctgctgtcctctgccaccctaacagcccacttgacgaggagaatctgacccaggagaaccaagaccgagggacacacgtggacctcggattagcctccgccaacgtggacttcgctttcagcctgtacaagcagttagtcctgaaggcccctgataagaatgtcatcttctccccactgagcatctccaccgccttggccttcctgtctctgggggcccataataccaccctgacagagattctcaaaggcctcaagttcaacctcacggagacttctgaggcagaaattcaccagagcttccagcacctcctgcgcaccctcaatcagtccagcgatgagctgcagctgagtatgggaaatgccatgtttgtcaaagagcaactcagtctgctggacaggttcacggaggatgccaagaggctgtatggctccgaggcctttgccactgactttcaggactcagctgcagctaagaagctcatcaacgactacgtgaagaatggaactagggggaaaatcacagatctgatcaaggaccttgactcgcagacaatgatggtcctggtgaattacatcttctttaaagccaaatgggagatgccctttgacccccaagatactcatcagtcaaggttctacttgagcaagaaaaagtgggtaatggtgcccatgatgagtttgcatcacctgactataccttacttccgggacgaggagctgtcctgcaccgtggtggagctgaagtacacaggcaatgccagcgcactcttcatcctccctgatcaagacaagatggaggaagtggaagccatgctgctcccagagaccctgaagcggtggagagactctctggagttcagagagataggtgagctctacctgccaaagttttccatctcgagggactataacctgaacgacatacttctccagctgggcattgaggaagccttcaccagcaaggctgacctgtcagggatcacaggggccaggaacctagcagtctcccaggtggtccataaggctgtgcttgatgtatttgaggagggcacagaagcatctgctgccacagcagtcaaaatcaccctcctttctgcattagtggagacaaggaccattgtgcgtttcaacaggcccttcctgatgatcattgtccctacagacacccagaacatcaagcagtggggctctcagtaaggaacttggaatgcaagctggatgcctgggtctctgggcacagcctggcccctgtgcaccgagtggccatggcatgtgtggccctgtctgcttatccttggaaggtgacagcgattccctgtgtagctctcacatgcacaggggcccatggactcttcagtctggagggtcctgggcctcctgacagcaataaataatttcgttggaaaaaaaaaagagaagttggcctataggagtcgattacagtgagcgcggaatttagatt

SEQ ID NO: 343687 - DNA, 1538 bp, Homo sapiens
gcattcatggcaatccactactccagacagacggctttggaatccaccagctacatccagctccctgaggcagagttgagaatggagagaatgttacctctcctggctctggggctcttggcggctgggttctgccctgctgtcctctgccaccctaacagcccacttgacgaggagaatctgacccaggagaaccaagaccgagggacacacgtggacctcggattagcctccgccaacgtggacttcgctttcagcctgtacaagcagttagtcctgaaggcccctgataagaatgtcatcttctccccactgagcatctccaccgccttggccttcctgtctctgggggcccataataccaccctgacagagattctcaaaggcctcaagttcaacctcacggagacttctgaggcagaaattcaccagagcttccagcacctcctgcgcaccctcaatcagtccagcgatgagctgcagctgagtatgggaaatgccatgtttgtcaaagagcaactcagtctgctggacaggttcacggaggatgccaagaggctgtatggctccgaggcctttgccactgactttcaggactcagctgcagctaagaagctcatcaacgactacgtgaagaatggaactagggggaaaatcacagatctgatcaaggaccttgactcgcagacaatgatggtcctggtgaattacatcttctttaaagccaaatgggagatgccctttgacccccaagatactcatcagtcaaggttctacttgagcaagaaaaagtgggtaatggtgcccatgatgagtttgcatcacctgactataccttacttccgggacgaggagctgtcctgcaccgtggtggagctgaagtacacaggcaatgccagcgcactcttcatcctccctgatcaagacaagatggaggaagtggaagccatgctgctcccagagaccctgaagcggtggagagactctctggagttcagagagataggtgagctctacctgccaaagttttccatctcgagggactataacctgaacgacatacttctccagctgggcattgaggaagccttcaccagcaaggctgacctgtcagggatcacaggggccaggaacctagcagtctcccaggtggtccataaggctgtgcttgatgtatttgaggagggcacagaagcatctgctgccacagcagtcaggcccttcctgatgatcattgtccctacagacacccagaacatcttcttcatgagcaaagtcaccaatcccaagcaagcctagagcttgccatcaagcagtggggctctcagtaaggaacttggaatgcaagctggatgcctgggtctctgggcacagcctggcccctgtgcaccgagtggccatggcatgtgtggccctgtctgcttatccttggaaggtgacagcgattccctgtgtagctctcacatgcacaggggcccatggactcttcagtctggagggtcctgggcctcctgacagcaataaataatttcgttgga

SEQ ID NO: 343688 - DNA, 1367 bp, Homo sapiens
  misc_feature (1216)..(1216): n is a, c, g, or t
  misc_feature (1227)..(1227): n is a, c, g, or t
  misc_feature (1266)..(1266): n is a, c, g, or t
  misc_feature (1275)..(1275): n is a, c, g, or t
  misc_feature (1277)..(1277): n is a, c, g, or t
  misc_feature (1283)..(1283): n is a, c, g, or t
  misc_feature (1296)..(1296): n is a, c, g, or t
  misc_feature (1301)..(1302): n is a, c, g, or t
  misc_feature (1322)..(1322): n is a, c, g, or t
  misc_feature (1325)..(1325): n is a, c, g, or t
  misc_feature (1336)..(1336): n is a, c, g, or t
  misc_feature (1340)..(1341): n is a, c, g, or t
  misc_feature (1355)..(1355): n is a, c, g, or t
gcattcatggcaatccactactccagacagacggctttggaatccaccagctacatccagctccctgaggcagagttgagaatggagagaatgttacctctcctggctctggggctcttggcggctgggttctgccctgctgtcctctgccaccctaacagcccacttgacgaggagaatctgacccaggagaaccaagaccgagggacacacgtggacctcggattagcctccgccaacgtggacttcgctttcagcctgtacaagcagttagtcctgaaggcccctgataagaatgtcatcttctccccactgagcatctccaccgccttggccttcctgtctctgggggcccataataccaccctgacagagattctcaaaggcctcaagttcaacctcacggagacttctgaggcagaaattcaccagagcttccagcacctcctgcgcaccctcaatcagtccagcgatgagctgcagctgagtatgggaaatgccatgtttgtcaaagagcaactcagtctgctggacaggttcacggaggatgccaagaggctgtatggctccgaggcctttgccactgactttcaggactcagctgcagctaagaagctcatcaacgactacgtgaagaatggaactagggggaaaatcacagatctgatcaaggaccttgactcgcagacaatgatggtcctggtgaattacatcttctttaaagccaaatgggagatgccctttgacccccaagatactcatcagtcaaggttctacttgagcaagaaaaagtgggtaatggtgcccatgatgagtttgcatcacctgactataccttacttccgggacgaggagctgtcctgcaccgtggtggagctgaagtacacaggcaatgccagcgcactcttcatcctccctgatcaagacaagatggaggaagtggaagccatgctgctcccagagaccctgaagcggtggagagactctctggagttcagagagataggtgagctctacctgccaaagttttccatctcgagggactataacctgaacgacatacttctccagctgggcattgaggaagccttcaccagcaaggctgacctgtcagggatcacaggggccaggaacctagcagtctcccaggtggtccataaggctgtgcttgatgtatttgaggagggcacagaagcatctgctgccacagcagttnctgatgacatngcctacagcaccagacatctcttatgacaagcaccatcnagcagctanantgcatnagcatgggcttanagganntgatgagctgatgctggctntgncagctgccctngccnntgcatgatggtgcntgtgtatcttga

SEQ ID NO: 343689 - DNA, 1203 bp, Homo sapiens
gcattcatggcaatccactactccagacagacggctttggaatccaccagctacatccagctccctgaggcagagttgagaatggagagaatgttacctctcctggctctggggctcttggcggctgggttctgccctgctgtcctctgccaccctaacagcccacttgacgaggagaatctgacccaggagaaccaagaccgagggacacacgtggacctcggattagcctccgccaacgtggacttcgctttcagcctgtacaagcagttagtcctgaaggcccctgataagaatgtcatcttctccccactgagcatctccaccgccttggccttcctgtctctgggggcccataataccaccctgacagagattctcaaaggcctcaagttcaacctcacggagacttctgaggcagaaattcaccagagcttccagcacctcctgcgcaccctcaatcagtccagcgatgagctgcagctgagtatgggaaatgccatgtttgtcaaagagcaactcagtctgctggacaggttcacggaggatgccaagaggctgtatggctccgaggcctttgccactgactttcaggactcagctgcagctaagaagctcatcaacgactacgtgaagaatggaactagggggaaaatcacagatctgatcaaggaccttgactcgcagacaatgatggtcctggtgaattacatcttctttaaagccaaatgggagatgccctttgacccccaagatactcatcagtcaaggttctacttgagcaagaaaaagtgggtaatggtgcccatgatgagtttgcatcacctgactataccttacttccgggacgaggagctgtcctgcaccgtggtggagctgaagtacacaggcaatgccagcgcactcttcatcctccctgatcaagacaagatggaggaagtggaagccatgctgctcccagagaccctgaagcggtggagagactctctggagttcagagagataggtgagctctacctgccaaagttttccatctcgagggactataacctgaacgacatacttctccagctgggcattgaggaagccttcaccagcaaggctgacctgtcagggatcacaggggccaggaacctagcagtctcccagtccataaggctgtgcttgatctactttgaggagacgcgtcagttcggacgccta

SEQ ID NO: 343690 - DNA, 1263 bp, Homo sapiens
gcattcatggcaatccactactccagacagacggctttggaatccaccagctacatccagctccctgaggcagagttgagaatggagagaatgttacctctcctggctctggggctcttggcggctgggttctgccctgctgtcctctgccaccctaacagcccacttgacgaggagaatctgacccaggagaaccaagaccgagggacacacgtggacctcggattagcctccgccaacgtggacttcgctttcagcctgtacaagcagttagtcctgaaggcccctgataagaatgtcatcttctccccactgagcatctccaccgccttggccttcctgtctctgggggcccataataccaccctgacagagattctcaaaggcctcaagttcaacctcacggagacttctgaggcagaaattcaccagagcttccagcacctcctgcgcaccctcaatcagtccagcgatgagctgcagctgagtatgggaaatgccatgtttgtcaaagagcaactcagtctgctggacaggttcacggaggatgccaagaggctgtatggctccgaggcctttgccactgactttcaggactcagctgcagctaagaagctcatcaacgactacgtgaagaatggaactagggggaaaatcacagatctgatcaaggaccttgactcgcagacaatgatggtcctggtgaattacatcttctttaaagccaaatgggagatgccctttgacccccaagatactcatcagtcaaggttctacttgagcaagaaaaagtgggtaatggtgcccatgatgagtttgcatcacctgactataccttacttccgggacgaggagctgtcctgcaccgtggtggagctgaagtacacaggcaatgccagcgcactcttcatcctccctgatcaagacaagatggaggaagtggaagccatgctgctcccagagaccctgaagcggtggagagactctctggagttcagagagataggtgagctctacctgccaaagttttccatctcgagggactataacctgaacgacatacttctccagctgggcattgaggaagccttcaccagcaaggctgacctgtgcaccgagtggccatggcatgtgtggccctgtctgcttatccttggaaggtgacagcgattccctgtgtagctctcacatgcacaggggcccatggactcttcagtctggagggtcctgggcctcctgacagcaataaataatttcgttgga

SEQ ID NO: 343691 - DNA, 1329 bp, Homo sapiens
gcattcatggcaatccactactccagacagacggctttggaatccaccagctacatccagctccctgaggcagagttgagaatggagagaatgttacctctcctggctctggggctcttggcggctgggttctgccctgctgtcctctgccaccctaacagcccacttgacgaggagaatctgacccaggagaaccaagaccgagggacacacgtggacctcggattagcctccgccaacgtggacttcgctttcagcctgtacaagcagttagtcctgaaggcccctgataagaatgtcatcttctccccactgagcatctccaccgccttggccttcctgtctctgggggcccataataccaccctgacagagattctcaaaggcctcaagttcaacctcacggagacttctgaggcagaaattcaccagagcttccagcacctcctgcgcaccctcaatcagtccagcgatgagctgcagctgagtatgggaaatgccatgtttgtcaaagagcaactcagtctgctggacaggttcacggaggatgccaagaggctgtatggctccgaggcctttgccactgactttcaggactcagctgcagctaagaagctcatcaacgactacgtgaagaatggaactagggggaaaatcacagatctgatcaaggaccttgactcgcagacaatgatggtcctggtgaattacatcttctttaaagccaaatgggagatgccctttgacccccaagatactcatcagtcaaggttctacttgagcaagaaaaagtgggtaatggtgcccatgatgagtttgcatcacctgactataccttacttccgggacgaggagctgtcctgcaccgtggtggagctgaagtacacaggcaatgccagcgcactcttcatcctccctgatcaagacaagatggaggaagtggaagccatgctgctcccagagaccctgaagcggtggagagactctctggagttcaggtgattcttcctggcccccaaagaccccacatctctccacgtcaaggtctcaccaatgtccagggacaagggcatggtggtgggagaactcatacagggacaggtggaatttacacttactttgccctatgctgcctacatggctttgggcttgatttttctttttcttctttaagacaatgacatcagacaggacaaggggctgaggcttcctctgactccagcatgttctaagtcatgagaaatcttctgcacagtcccaaacactcatgcatggtttctcctggtctcaatctcttgaagggagagagaaacagaaggaattgtgatc

SEQ ID NO: 343692 - DNA, 1454 bp, Homo sapiens
gcattcatggcaatccactactccagacagacggctttggaatccaccagctacatccagctccctgaggcagagttgagaatggagagaatgttacctctcctggctctggggctcttggcggctgggttctgccctgctgtcctctgccaccctaacagcccacttgacgaggagaatctgacccaggagaaccaagaccgagggacacacgtggacctcggattagcctccgccaacgtggacttcgctttcagcctgtacaagcagttagtcctgaaggcccctgataagaatgtcatcttctccccactgagcatctccaccgccttggccttcctgtctctgggggcccataataccaccctgacagagattctcaaaggcctcaagttcaacctcacggagacttctgaggcagaaattcaccagagcttccagcacctcctgcgcaccctcaatcagtccactaagaagctcatcaacgactacgtgaagaatggaactagggggaaaatcacagatctgatcaaggaccttgactcgcagacaatgatggtcctggtgaattacatcttctttaaagccaaatgggagatgccctttgacccccaagatactcatcagtcaaggttctacttgagcaagaaaaagtgggtaatggtgcccatgatgagtttgcatcacctgactataccttacttccgggacgaggagctgtcctgcaccgtggtggagctgaagtacacaggcaatgccagcgcactcttcatcctccctgatcaagacaagatggaggaagtggaagccatgctgctcccagagaccctgaagcggtggagagactctctggagttcagagagataggtgagctctacctgccaaagttttccatctcgagggactataacctgaacgacatacttctccagctgggcattgaggaagccttcaccagcaaggctgacctgtcagggatcacaggggccaggaacctagcagtctcccaggtggtccataaggctgtgcttgatgtatttgaggagggcacagaagcatctgctgccacagcagtcaaaatcaccctcctttctgcattagtggagacaaggaccattgtgcgtttcaacaggcccttcctgatgatcattgtccctacagacacccagaacatcttcttcatgagcaaagtcaccaatcccaagcaagcctagagcttgccatcaagcagtggggctctcagtaaggaacttggaatgcaagctggatgcctgggtctctgggcacagcctggcccctgtgcaccgagtggccatggcatgtgtggccctgtctgcttatccttggaaggtgacagcgattccctgtgtagctctcacatgcacaggggcccatggactcttcagtctggagggtcctgggcctcctgacagcaataaataatttcgttgga

SEQ ID NO: 343693 - DNA, 1521 bp, Homo sapiens
gcattcatggcaatccactactccagacagacggctttggaatccaccagctacatccagctccctgaggcagagttgagaatggagagaatgttacctctcctggctctggggctcttggcggctgggttctgccctgctgtcctctgccaccctaacagcccacttgacgaggagaatctgacccaggagaaccaagaccgagggacacacgtggacctcggattagcctccgccaacgtggacttcgctttcagcctgtacaagcagttagtcctgaaggcccctgataagaatgtcatcttctccccactgagcatctccaccgccttggccttcctgtctctgggggcccataataccaccctgacagagattctcaaaggcctcaagttcaacctcacggagacttctgaggcagaaattcaccagagcttccagcacctcctgcgcaccctcaatcagtccagcgatgagctgcagctgagtatgggaaatgccatgtttgtcaaagagcaactcagtctgctggacaggttcacggaggatgccaagaggctgtatggctccgaggcctttgccactgactttcaggactcagctgcagctaagaagctcatcaacgactacgtgaagaatggaactagggggaaccaaatgggagatgccctttgacccccaagatactcatcagtcaaggttctacttgagcaagaaaaagtgggtaatggtgcccatgatgagtttgcatcacctgactataccttacttccgggacgaggagctgtcctgcaccgtggtggagctgaagtacacaggcaatgccagcgcactcttcatcctccctgatcaagacaagatggaggaagtggaagccatgctgctcccagagaccctgaagcggtggagagactctctggagttcagagagataggtgagctctacctgccaaagttttccatctcgagggactataacctgaacgacatacttctccagctgggcattgaggaagccttcaccagcaaggctgacctgtcagggatcacaggggccaggaacctagcagtctcccaggtggtccataaggctgtgcttgatgtatttgaggagggcacagaagcatctgctgccacagcagtcaaaatcaccctcctttctgcattagtggagacaaggaccattgtgcgtttcaacaggcccttcctgatgatcattgtccctacagacacccagaacatcttcttcatgagcaaagtcaccaatcccaagcaagcctagagcttgccatcaagcagtggggctctcagtaaggaacttggaatgcaagctggatgcctgggtctctgggcacagcctggcccctgtgcaccgagtggccatggcatgtgtggccctgtctgcttatccttggaaggtgacagcgattccctgtgtagctctcacatgcacaggggcccatggactcttcagtctggagggtcctgggcctcctgacagcaataaataatttcgttgga

SEQ ID NO: 343694 - DNA, 1318 bp, Homo sapiens
gcattcatggcaatccactactccagacagacggctttggaatccaccagctacatccagctccctgaggcagagttgagaatggagagaatgttacctctcctggctctggggctcttggcggctgggttctgccctgctgtcctctgccaccctaacagcccacttgacgaggagaatctgacccaggagaaccaagaccgagggacacacgtggacctcggattagcctccgccaacgtggacttcgctttcagcctgtacaagcagttagtcctgaaggcccctgataagaatgtcatcttctccccactgagcatctccaccgccttggccttcctgtctctgggggcccataataccaccctgacagagattctcaaaggcctcaagttcaacctcacggagacttctgaggcagaaattcaccagagcttccagcacctcctgcgcaccctcaatcagtccagcgatgagctgcagctgagtatgggaaatgccatgtttgtcaaagagcaactcagtctgctggacaggttcacggaggatgccaagaggctgtatggctccgaggcctttgccactgactttcaggactcagctgcagctaagaagctcatcaacgactacgtgaagaatggaactagggggaaaatcacagatctgatcaaggaccttgactcgcagacaatgatggtcctggtgaattacatcttctttaaagagagataggtgagctctacctgccaaagttttccatctcgagggactataacctgaacgacatacttctccagctgggcattgaggaagccttcaccagcaaggctgacctgtcagggatcacaggggccaggaacctagcagtctcccaggtggtccataaggctgtgcttgatgtatttgaggagggcacagaagcatctgctgccacagcagtcaaaatcaccctcctttctgcattagtggagacaaggaccattgtgcgtttcaacaggcccttcctgatgatcattgtccctacagacacccagaacatcttcttcatgagcaaagtcaccaatcccaagcaagcctagagcttgccatcaagcagtggggctctcagtaaggaacttggaatgcaagctggatgcctgggtctctgggcacagcctggcccctgtgcaccgagtggccatggcatgtgtggccctgtctgcttatccttggaaggtgacagcgattccctgtgtagctctcacatgcacaggggcccatggactcttcagtctggagggtcctgggcctcctgacagcaataaataatttcgttgga

SEQ ID NO: 343695 - DNA, 769 bp, Homo sapiens
ccgggctgcaggaattggcacgaggcaaggagctgtcctgcaccgtggtggagctgaagtacacaggcaatgccagcgcactcttcatcctccctgatcaagacaagatggaggaagtggaagccatgctgctcccagagaccctgaagcggtggagagactctctggagttcagagagataggtgagctctacctgccaaagttttccatctcgagggactataacctgaacgacatacttctccagctgggcattgaggaagccttcaccagcaaggctgacctgtcagggatcacaggggccaggaacctagcagtctcccaggtggtccataaggctgtgcttgatgtatttgaggagggcacagaagcatctgctgccacagcagtcaaaatcaccctcctttctgcattagtggagacaaggaccattgtgcgtttcaacaggcccttcctgatgatcattgtccctacagacacccagaacatcttcttcatgagcaaagtcaccaatcccaagcaagcctagagcttgccatcaagcagtggggctctcagtaaggaacttggaatgcaagctggatgcctgggtctctgggcacagcctggcccctgtgcaccgagtggccatggcatgtgtggccctgtctgcttatccttggaaggtgacagcgattccctgtgtagctctcacatgcacaggggcccatggactcttcagtctggagggtcctgggcctcctgacagcaataaataatttcgttgga

SEQ ID NO: 343696 - DNA, 771 bp, Homo sapiens
  misc_feature (22)..(22): n is a, c, g, or t
caggcgttctagaggatccgangtagcccaagagctgtcctgcaccgtggtggagctgaagtacacaggcaatgccagcgcactcttcatcctccctgatcaagacaagatggaggaagtggaagccatgctgctcccagagaccctgaagcggtggagagactctctggagttcagagagataggtgagctctacctgccaaagttttccatctcgagggactataacctgaacgacatacttctccagctgggcattgaggaagccttcaccagcaaggctgacctgtcagggatcacaggggccaggaacctagcagtctcccaggtggtccataaggctgtgcttgatgtatttgaggagggcacagaagcatctgctgccacagcagtcaaaatcaccctcctttctgcattagtggagacaaggaccattgtgcgtttcaacaggcccttcctgatgatcattgtccctacagacacccagaacatcttcttcatgagcaaagtcaccaatcccaagcaagcctagagcttgccatcaagcagtggggctctcagtaaggaacttggaatgcaagctggatgcctgggtctctgggcacagcctggcccctgtgcaccgagtggccatggcatgtgtggccctgtctgcttatccttggaaggtgacagcgattccctgtgtagctctcacatgcacaggggcccatggactcttcagtctggagggtcctgggcctcctgacagcaataaataatttcgttgga

SEQ ID NO: 343697 - DNA, 792 bp, Homo sapiens
gcattcatggcaatccactactccagacagacggctttggaatccaccagctacatccagctccctgaggcagagttgagaatggagagaatgttacctctcctggctctggggctcttggcggctgggttctgccctgctgtcctctgccaccctaacagcccacttgacgaggagaatctgacccaggagaaccaagaccgagggacacacgtggacctcggattagcctccgccaacgtggacttcgctttcagcctgtacaagcagttagtcctgaaggcccctgataagaatgtcatcttctccccactgagcatctccaccgccttggccttcctgtctctgggggcccataataccaccctgacagagattctcaaaggcctcaagttcaacctcacggagacttctgaggcagaaattcaccagagcttccagcacctcctgcgcaccctcaatcagtccagcgatgagctgcagctgagtatgggaaatgccatgtttgtcaaagagcaactcagtctgctggacaggttcacggaggatgccaagaggctgtatggctccgaggcctttgccactgactttcaggactcagctgcagctaagaagctcatcaacgactacgtgaagaatggaactagggggaaaatcacagatctgatcaaggaccttgactcgcagacaatgatggtcctggtgaattacatcttctttaaagccaaatgggagatgcccattcagccctccattcagcctctgtccatcaccactgtccattcacctctg

SEQ ID NO: 343698 - DNA, 1017 bp, Homo sapiens
gcattcatggcaatccactactccagacagacggctttggaatccaccagctacatccagctccctgaggcagagttgagaatggagagaatgttacctctcctggctctggggctcttggcggctgggttctgccctgctgtcctctgccaccctaacagcccacttgacgaggagaatctgacccaggagaaccaagaccgagggacacacgtggacctcggattagcctccgccaacgtggacttcgctttcagcctgtacaagcagttagtcctgaaggcccctgataagaatgtcatcttctccccactgagcatctccaccgccttggccttcctgtctctgggggcccataataccaccctgacagagattctcaaaggcctcaagttcaacctcacggagacttctgaggcagaaattcaccagagcttccagcacctcctgcgcaccctcaatcagtccagcgatgagctgcagctgagtatgggaaatgccatgtttgtcaaagagcaactcagtctgctggacaggttcacggaggatgccaagaggctgtatggctccgaggcctttgccactgactttcaggactcagctgcagctaagaagctcatcaacgactacgtgaagaatggaactagggggaacctgaagcggtggagagactctctggagttcaggtgattcttcctggcccccaaagaccccacatctctccacgtcaaggtctcaccaatgtccagggacaagggcatggtggtgggagaactcatacagggacaggtggaatttacacttactttgccctatgctgcctacatggctttgggcttgatttttctttttcttctttaagacaatgacatcagacaggacaaggggctgaggcttcctctgactccagcatgttctaagtcatgagaaatcttctgcacagtcccaaacactcatgcatggtttctcctggtctcaatctcttgaagggagagagaaacagaaggaattgtgatc

SEQ ID NO: 343699 - DNA, 628 bp, Homo sapiens
ttccaacgaaattatttattgctgtcaggaggcccaggaccctccagactgaagagtccatgggcccctgtgcatgtgagagctacacagggaatcgctgtcaccttccaaggataagcagacagggccacacactgccattggtgcactcggtgcacagagtgccaggaacctagcagtctcccgtggtccataaggctgtgcttgatgtatttgaggagggcacagaagcatctgctgccacagcagtcaaaatcaccctcctttctgcattagtggagacaaggaccattgtgcgtttcaacaggcccttcctgatgatcattgtccctacagacacccagaacatcttcttcatgagcaaagtcaccaatcccaagcaagcctagagcttgccatcaagcagtggggctctcagtaaggaacttggaatgcaagctggatgcctgggtctctgggcacagcctggcccctgtgcaccgagtggccatggcatgtgtggccctgtctgcttatccttggaaggtgacagcgattccctgtgtagctctcacatgcacaggggcccatggactcttcagtctggagggtcctgggcctcctgacagcaataaataatttcgttgga

SEQ ID NO: 343700 - DNA, 777 bp, Homo sapiens
ccgggctgcaggaattggcacgaggcaagagtgggtaatggtgcccatgatgagtttgcatcacctgactataccttacttccgggacgaggagctgtcctgcaccgtggtggagctgaagtacacaggcaatgccagcgcactcttcatcctccctgatcaagacaagatggaggaagtggaagccatgctgctcccagagaccctgaagcggtggagagactctctggagttcagagagataggtgagctctacctgccaaagttttccatctcgagggactataacctgaacgacatacttctccagctgggcattgaggaagccttcaccagcaaggctgacctgtcagggatcacaggggccaggaacctagcagtctcccaggtggtccataaggctgtgcttgatgtatttgaggagggcacagaagcatctgctgccacagcagtcaggcccttcctgatgatcattgtccctacagacacccagaacatcttcttcatgagcaaagtcaccaatcccaagcaagcctagagcttgccatcaagcagtggggctctcagtaaggaacttggaatgcaagctggatgcctgggtctctgggcacagcctggcccctgtgcaccgagtggccatggcatgtgtggccctgtctgcttatccttggaaggtgacagcgattccctgtgtagctctcacatgcacaggggcccatggactcttcagtctggagggtcctgggcctcctgacagcaataaataatttcgttgga

SEQ ID NO: 343701 - DNA, 611 bp, Homo sapiens
ggcaaatcatactcagcatctgggtctccatttgcacatctaggcatcaggactgtgcaaaactagttggcaggggagttgggaggagcaaacattcaacagcacaaagacaggccagcactaggtgctcaatgcacattagaccccttagtggcacacaggcaggtcgctgaactcctgcgcatctgtgtttcccgtgtgtaatgttctgctgtccccacagtggtccataaggctgtgcttgatgtatttgaggagggcacagaagcatctgctgccacagcagtcaggcccttcctgatgatcattgtccctacagacacccagaacatcttcttcatgagcaaagtcaccaatcccaagcaagcctagagcttgccatcaagcagtggggctctcagtaaggaacttggaatgcaagctggatgcctgggtctctgggcacagcctggcccctgtgcaccgagtggccatggcatgtgtggccctgtctgcttatccttggaaggtgacagcgattccctgtgtagctctcacatgcacaggggcccatggactcttcagtctggagggtcctgggcctcctgacagcaataaataatttcgttgga

SEQ ID NO: 343702 - DNA, 525 bp, Homo sapiens
ttccaacgaaattatttattgctgtcaggaggcccaggaccctccagactgaagagtccatgggcccctgtgcatgtgagagctacacagggaatcgctgtcaccttccaaggataagcagacagggccacacatgccatggccactcggtgcacaggggccaggctgtgcccagacacccagaacatcttcttcatgagcaaagtcaccaatcccaagcaagcctagagcttgccatcaagcagtggggctctcagtaaggaacttggaatgcaagctggatgcctgggtctctgggcacagcctggcccctgtgcaccgagtggccatggcatgtgtggccctgtctgcttatccttggaaggtgacagcgattccctgtgtagctctcacatgcacaggggcccatggactcttcagtctggagggtcctgggcctcctgacagcaataaataatttcgttggaaaaaaaaaagagaagttggcctataggagtcgattacagtgagcgcggaatttagatt

SEQ ID NO: 343703 - DNA, 339 bp, Homo sapiens
gcattcatggcaatccactactccagacagacggctttggaatccaccagctacatccagctccctgaggcagagttgagaatggagagaatgttacctctcctggctctggggctcttggcggctgggttctgccctgctgtcctctgccaccctaacagcccacttgacgaggagaatctgacccaggagaaccaagaccgagggacacacgtggacctcggattagcctccgccaacgtggacttcgctttcagcctgtacaagcagttagtcctgaaggcccctgataagaatgtcatcttctccctatcctagagtagacaaggtagagccgag

SEQ ID NO: 343704 - DNA, 817 bp, Homo sapiens
  misc_feature (716)..(716): n is a, c, g, or t
  misc_feature (725)..(725): n is a, c, g, or t
  misc_feature (727)..(727): n is a, c, g, or t
  misc_feature (733)..(733): n is a, c, g, or t
  misc_feature (746)..(746): n is a, c, g, or t
  misc_feature (751)..(752): n is a, c, g, or t
  misc_feature (772)..(772): n is a, c, g, or t
  misc_feature (775)..(775): n is a, c, g, or t
  misc_feature (786)..(786): n is a, c, g, or t
  misc_feature (790)..(791): n is a, c, g, or t
  misc_feature (805)..(805): n is a, c, g, or t
ccgggctgcaggaattggcacgaggcaagaatcacagatctgatcaaggaccttgactcgcagacaatgatggtcctggtgaattacatcttctttaaagccaaatgggagatgccctttgacccccaagatactcatcagtcaaggttctacttgagcaagaaaaagtgggtaatggtgcccatgatgagtttgcatcacctgactataccttacttccgggacgaggagctgtcctgcaccgtggtggagctgaagtacacaggcaatgccagcgcactcttcatcctccctgatcaagacaagatggaggaagtggaagccatgctgctcccagagaccctgaagcggtggagagactctctggagttcagagagataggtgagctctacctgccaaagttttccatctcgagggactataacctgaacgacatacttctccagctgggcattgaggaagccttcaccagcaaggctgacctgtcagggatcacaggggccaggaacctagcagtctcccaggtggtccataaggctgtgcttgatgtatttgaggagggcacagaagcatctgctgccacagcagtcaaaatcaccctcctttctgcattagtggagacaaggaccattgtgcgtttcaacaggcccttcctgatgatcattgtccctacagacacccagaacatcttcttcatgagcaaagtcaccaatcnagcagctanantgcatnagcatgggcttanagganntgatgagctgatgctggctntgncagctgccctngccnntgcatgatggtgcntgtgtatcttga

SEQ ID NO: 343705 - DNA, 789 bp, Homo sapiens
gactagttctagatcgcgatctagacactagtcggctttggaatccaccagctacatccagctccctgagagttgagaatggagagaatgttacctctcctggctctggggctcttggcggctgggttctgccctgctgtcctctgccaccctaacagcccacttgacgaggagaatctgacccaggagaaccaagaccgagggacacacgtggacctcggattagcctccgccaacgtggacttcgctttcagcctgtacaagcagttagtcctgaaggcccctgataagaatgtcatcttctccccactgagcatctccaccgccttggccttcctgtctctgggggcccataataccaccctgacagagattctcaaaggcctcaagttcaacctcacggagacttctgaggcagaaattcaccagagcttccagcacctcctgcgcaccctcaatcagtccagcgatgagctgcagctgagtatgggaaatgccatgtttgtcaaagagcaactcagtctgctggacaggttcacggaggatgccaagaggctgtatggctccgaggcctttgccactgactttcaggactcagctgcagctaagaagctcatcaacgactacgtgaagaatggaactagggggaaaatcacagatctgatcaaggaccttgactcgcagacaatgatggtcctggtgaattacatcttctttaaagccaaatgggagatgcccattcagccctccattcagcctctgtccatcaccactgtccattcacctctg

SEQ ID NO: 343706 - DNA, 249 bp, Homo sapiens
ttgtaggctggtggggtcgtcagtctcacaactgtcgtgtctggggagagagcctggtggcaccctaacagcccacttgacgaggagaatctgacccaggagaaccaagaccgagggacacacgtggacctcggattagcctccgccaacgtggacttcgctttcagcctgtacaagcagttagtcctgaaggcccctgataagaatgtcatcttctccctatcctagagtagacaaggtagagccgag

SEQ ID NO: 343707 - DNA, 1624 bp, Homo sapiens
gcattcatggcaatccactactccagacagacggctttggaatccaccagctacatccagctccctgaggcagagttgagaatggagagaatgttacctctcctggctctggggctcttggcggctgggttctgccctgctgtcctctgccaccctaacagcccacttgacgaggagaatctgacccaggagaaccaagaccgagggacacacgtggacctcggattagcctccgccaacgtggacttcgctttcagcctgtacaagcagttagtcctgaaggcccctgataagaatgtcatcttctccccactgagcatctccaccgccttggccttcctgtctctgggggcccataataccaccctgacagagattctcaaaggcctcaagttcaacctcacggagacttctgaggcagaaattcaccagagcttccagcacctcctgcgcaccctcaatcagtccagcgatgagctgcagctgagtatgggaaatgccatgtttgtcaaagagcaactcagtctgctggacaggttcacggaggatgccaagaggctgtatggctccgaggcctttgccactgactttcaggactcagctgcagctaagaagctcatcaacgactacgtgaagaatggaactagggggaaaatcacagatctgatcaaggaccttgactcgcagacaatgatggtcctggtgaattacatcttctttaaagccaaatgggagatgccctttgacccccaagatactcatcagtcaaggttctacttgagcaagaaaaagtgggtaatggtgcccatgatgagtttgcatcacctgactataccttacttccgggacgaggagctgtcctgcaccgtggtggagctgaagtacacaggcaatgccagcgcactcttcatcctccctgatcaagacaagatggaggaagtggaagccatgctgctcccagagaccctgaagcggtggagagactctctggagttcagagagataggtgagctctacctgccaaagttttccatctcgagggactataacctgaacgacatacttctccagctgggcattgaggaagccttcaccagcaaggctgacctgtcagggatcacaggggccaggaacctagcagtctcccaggtggtccataaggctgtgcttgatgtatttgaggagggcacagaagcatctgctgccacagcagtcaaaatcaccctcctttctgcattagtggagacaaggaccattgtgcgtttcaacaggcccttcctgatgatcattgtccctacagacacccagaacatcttcttcatgagcaaagtcaccaatcccaagcaagcctagagcttgccatcaagcagtggggctctcagtaaggaacttggaatgcaagctggatgcctgggtctctgggcacagcctggcccctgtgcaccgagtggccatggcatgtgtggccctgtctgcttatccttggaaggtgacagcgattccctgtgtagctctcacatgcacaggggcccatggactcttcagtctggagggtcctgggcctcctgacagcaataaataatttcgttggaaaacaaaacaatcaaagaaaaatcacaccacg

SEQ ID NO: 343708 - DNA, 1805 bp, Homo sapiens
gcattcatggcaatccactactccagacagacggctttggaatccaccagctacatccagctccctgaggcagagttgagaatggagagaatgttacctctcctggctctggggctcttggcggctgggttctgccctgctgtcctctgccaccctaacagcccacttgacgaggagaatctgacccaggagaaccaagaccgagggacacacgtggacctcggattagcctccgccaacgtggacttcgctttcagcctgtacaagcagttagtcctgaaggcccctgataagaatgtcatcttctccccactgagcatctccaccgccttggccttcctgtctctgggggcccataataccaccctgacagagattctcaaaggcctcaagttcaacctcacggagacttctgaggcagaaattcaccagagcttccagcacctcctgcgcaccctcaatcagtccagcgatgagctgcagctgagtatgggaaatgccatgtttgtcaaagagcaactcagtctgctggacaggttcacggaggatgccaagaggctgtatggctccgaggcctttgccactgactttcaggactcagctgcagctaagaagctcatcaacgactacgtgaagaatggaactagggggaaaatcacagatctgatcaaggaccttgactcgcagacaatgatggtcctggtgaattacatcttctttaaagccaaatgggagatgccctttgacccccaagatactcatcagtcaaggttctacttgagcaagaaaaagtgggtaatggtgcccatgatgagtttgcatcacctgactataccttacttccgggacgaggagctgtcctgcaccgtggtggagctgaagtacacaggcaatgccagcgcactcttcatcctccctgatcaagacaagatggaggaagtggaagccatgctgctcccagagaccctgaagcggtggagagactctctggagttcagagagataggtgagctctacctgccaaagttttccatctcgagggactataacctgaacgacatacttctccagctgggcattgaggaagccttcaccagcaaggctgacctgtcagggatcacaggggccaggaacctagcagtctcccaggtggtccataaggctgtgcttgatgtatttgaggagggcacagaagcatctgctgccacagcagtcaaaatcaccctcctttctgcattagtggagacaaggaccattgtgcgtttcaacaggcccttcctgatgatcattgtccctacagacacccagaacatcttcttcatgagcaaagtcaccaatcccaagcaagcctagagcttgccatcaagcagtggggctctcagtaaggaacttggaatgcaagctggatgcctgggtctctgggcacagcctggcccctgtgcaccgagtggccatggcatgtgtggccctgtctgcttatccttggaaggtgacagcgattccctgtgtagctctcacatgcacaggggcccatggactcttcagtctggagggtcctgggcctcctgacagcaataaataatttcgttggaaaaaaaaaaaaaaaaaaaaaaaaaaaaaaaaaaaaaaaaaaaaaaaaaaaaaaaaataaaaaaatattaaaaaataaaaaaaattataataaatttaaaattaaaattaatatattattatttatattatatattttttatattaaattataaattattttataatttaatataattttaatttaaatattttaatataattaatattaatcc

SEQ ID NO: 343709 - DNA, 1589 bp, Homo sapiens
gactagttctagatcgcgatctagacactagtcggctttggaatccaccagctacatccagctccctgagagttgagaatggagagaatgttacctctcctggctctggggctcttggcggctgggttctgccctgctgtcctctgccaccctaacagcccacttgacgaggagaatctgacccaggagaaccaagaccgagggacacacgtggacctcggattagcctccgccaacgtggacttcgctttcagcctgtacaagcagttagtcctgaaggcccctgataagaatgtcatcttctccccactgagcatctccaccgccttggccttcctgtctctgggggcccataataccaccctgacagagattctcaaaggcctcaagttcaacctcacggagacttctgaggcagaaattcaccagagcttccagcacctcctgcgcaccctcaatcagtccagcgatgagctgcagctgagtatgggaaatgccatgtttgtcaaagagcaactcagtctgctggacaggttcacggaggatgccaagaggctgtatggctccgaggcctttgccactgactttcaggactcagctgcagctaagaagctcatcaacgactacgtgaagaatggaactagggggaaaatcacagatctgatcaaggaccttgactcgcagacaatgatggtcctggtgaattacatcttctttaaagccaaatgggagatgccctttgacccccaagatactcatcagtcaaggttctacttgagcaagaaaaagtgggtaatggtgcccatgatgagtttgcatcacctgactataccttacttccgggacgaggagctgtcctgcaccgtggtggagctgaagtacacaggcaatgccagcgcactcttcatcctccctgatcaagacaagatggaggaagtggaagccatgctgctcccagagaccctgaagcggtggagagactctctggagttcagagagataggtgagctctacctgccaaagttttccatctcgagggactataacctgaacgacatacttctccagctgggcattgaggaagccttcaccagcaaggctgacctgtcagggatcacaggggccaggaacctagcagtctcccaggtggtccataaggctgtgcttgatgtatttgaggagggcacagaagcatctgctgccacagcagtcaaaatcaccctcctttctgcattagtggagacaaggaccattgtgcgtttcaacaggcccttcctgatgatcattgtccctacagacacccagaacatcttcttcatgagcaaagtcaccaatcccaagcaagcctagagcttgccatcaagcagtggggctctcagtaaggaacttggaatgcaagctggatgcctgggtctctgggcacagcctggcccctgtgcaccgagtggccatggcatgtgtggccctgtctgcttatccttggaaggtgacagcgattccctgtgtagctctcacatgcacaggggcccatggactcttcagtctggagggtcctgggcctcctgacagcaataaataatttcgttgga

SEQ ID NO: 343710 - DNA, 1542 bp, Homo sapiens
gcattcatggcaatccactactccagacagacggctttggaatccaccagctacatccagctccctgaggcagagttgagaatggagagaatgttacctctcctggctctggggctcttggcggctgggttctgccctgctgtcctctgccaccctaacagcccacttgacgaggagaatctgacccaggagaaccaagaccgagggacacacgtggacctcggattagcctccgccaacgtggacttcgctttcagcctgtacaagcagttagtcctgaaggcccctgataagaatgtcatcttctccccactgagcatctccaccgccttggccttcctgtctctgggggcccataataccaccctgacagagattctcaaaggcctcaagttcaacctcacggagacttctgaggcagaaattcaccagagcttccagcacctcctgcgcaccctcaatcagtccagcgatgagctgcagctgagtatgggaaatgccatgtttgtcaaagagcaactcagtctgctggacaggttcacggaggatgccaagaggctgtatggctccgaggcctttgccactgactttcaggactcagctgcagctaagaagctcatcaacgactacgtgaagaatggaactagggggaaaatcacagatctgatcaaggaccttgactcgcagacaatgatggtcctggtgaattacatcttctttaaagccaaatgggagatgccctttgacccccaagatactcatcagtcaaggttctacttgagcaagaaaaagtgggtaatggtgcccatgatgagtttgcatcacctgactataccttacttccgggacgaggagctgtcctgcaccgtggtggagctgaagtacacaggcaatgccagcgcactcttcatcctccctgatcaagacaagatggaggaagtggaagccatgctgctcccagagaccctgaagcggtggagagactctctggagttcagagagataggtgagctctacctgccaaagttttccatctcgagggactataacctgaacgacatacttctccagctgggcattgaggaagccttcaccagcaaggctgacctgtcagggatcacaggggccaggaacctagcagtctcccaggtggtccataaggctgtgcttgatgtatttgaggagggcacagaagcatctgctgccacagcagtcaaaatcaccctcctttctgcattagtggagacaaggaccattgtgcgtttcaacaggcccttcctgatgatcattgtccctacagacacccagaacatcaagcagtggggctctcagtaaggaacttggaatgcaagctggatgcctgggtctctgggcacagcctggcccctgtgcaccgagtggccatggcatgtgtggccctgtctgcttatccttggaaggtgacagcgattccctgtgtagctctcacatgcacaggggcccatggactcttcagtctggagggtcctgggcctcctgacagcaataaataatttcgttgga

SEQ ID NO: 343711 - DNA, 1492 bp, Homo sapiens
gcattcatggcaatccactactccagacagacggctttggaatccaccagcaccctaacagcccacttgacgaggagaatctgacccaggagaaccaagaccgagggacacacgtggacctcggattagcctccgccaacgtggacttcgctttcagcctgtacaagcagttagtcctgaaggcccctgataagaatgtcatcttctccccactgagcatctccaccgccttggccttcctgtctctgggggcccataataccaccctgacagagattctcaaaggcctcaagttcaacctcacggagacttctgaggcagaaattcaccagagcttccagcacctcctgcgcaccctcaatcagtccagcgatgagctgcagctgagtatgggaaatgccatgtttgtcaaagagcaactcagtctgctggacaggttcacggaggatgccaagaggctgtatggctccgaggcctttgccactgactttcaggactcagctgcagctaagaagctcatcaacgactacgtgaagaatggaactagggggaaaatcacagatctgatcaaggaccttgactcgcagacaatgatggtcctggtgaattacatcttctttaaagccaaatgggagatgccctttgacccccaagatactcatcagtcaaggttctacttgagcaagaaaaagtgggtaatggtgcccatgatgagtttgcatcacctgactataccttacttccgggacgaggagctgtcctgcaccgtggtggagctgaagtacacaggcaatgccagcgcactcttcatcctccctgatcaagacaagatggaggaagtggaagccatgctgctcccagagaccctgaagcggtggagagactctctggagttcagagagataggtgagctctacctgccaaagttttccatctcgagggactataacctgaacgacatacttctccagctgggcattgaggaagccttcaccagcaaggctgacctgtcagggatcacaggggccaggaacctagcagtctcccaggtggtccataaggctgtgcttgatgtatttgaggagggcacagaagcatctgctgccacagcagtcaaaatcaccctcctttctgcattagtggagacaaggaccattgtgcgtttcaacaggcccttcctgatgatcattgtccctacagacacccagaacatcttcttcatgagcaaagtcaccaatcccaagcaagcctagagcttgccatcaagcagtggggctctcagtaaggaacttggaatgcaagctggatgcctgggtctctgggcacagcctggcccctgtgcaccgagtggccatggcatgtgtggccctgtctgcttatccttggaaggtgacagcgattccctgtgtagctctcacatgcacaggggcccatggactcttcagtctggagggtcctgggcctcctgacagcaataaataatttcgttgga

SEQ ID NO: 343712 - DNA, 1530 bp, Homo sapiens
gcattcatggcaatccactactccagacagacggctttggaatccaccagctacatccagctccctgaggcagagttgagaatggagagaatgttacctctcctggctctggggctcttggcggctgggttctgccctgctgtcctctgccaccctaacagcccacttgacgaggagaatctgacccaggagaaccaagaccgagggacacacgtggacctcggattagcctccgccaacgtggacttcgctttcagcctgtacaagcagttagtcctgaaggcccctgataagaatgtcatcttctccccactgagcatctccaccgccttggccttcctgtctctgggggcccataataccaccctgacagagattctcaaaggcctcaagttcaacctcacggagacttctgaggcagaaattcaccagagcttccagcacctcctgcgcaccctcaatcagtccagcgatgagctgcagctgagtatgggaaatgccatgtttgtcaaagagcaactcagtctgctggacaggttcacggaggatgccaagaggctgtatggctccgaggcctttgccactgactttcaggactcagctgcagctaagaagctcatcaacgactacgtgaagaatggaactagggggaaaatcacagatctgatcaaggaccttgactcgcagacaatgatggtcctggtgaattacatcttctttaaagccaaatgggagatgccctttgacccccaagatactcatcagtcaaggttctacttgagcaagaaaagagctgtcctgcaccgtggtggagctgaagtacacaggcaatgccagcgcactcttcatcctccctgatcaagacaagatggaggaagtggaagccatgctgctcccagagaccctgaagcggtggagagactctctggagttcagagagataggtgagctctacctgccaaagttttccatctcgagggactataacctgaacgacatacttctccagctgggcattgaggaagccttcaccagcaaggctgacctgtcagggatcacaggggccaggaacctagcagtctcccaggtggtccataaggctgtgcttgatgtatttgaggagggcacagaagcatctgctgccacagcagtcaaaatcaccctcctttctgcattagtggagacaaggaccattgtgcgtttcaacaggcccttcctgatgatcattgtccctacagacacccagaacatcttcttcatgagcaaagtcaccaatcccaagcaagcctagagcttgccatcaagcagtggggctctcagtaaggaacttggaatgcaagctggatgcctgggtctctgggcacagcctggcccctgtgcaccgagtggccatggcatgtgtggccctgtctgcttatccttggaaggtgacagcgattccctgtgtagctctcacatgcacaggggcccatggactcttcagtctggagggtcctgggcctcctgacagcaataaataatttcgttgga

SEQ ID NO: 343713 - DNA, 1476 bp, Homo sapiens
cccatcagtgaatcatcaaggacatggtgcttaaacacaagtgtattcctttcacgtcttactactctccaaatcggagtccatcacttcacttcagattattcatcattcatcattccttttgattctttgaatgcattaaggggttcctctacagctttcctaggaggttgtatagtcttctgatgggccagcactgagcatctccaccgccttggccttcctgtctctgggggcccataataccaccctgacagagattctcaaaggcctcaagttcaacctcacggagacttctgaggcagaaattcaccagagcttccagcacctcctgcgcaccctcaatcagtccagcgatgagctgcagctgagtatgggaaatgccatgtttgtcaaagagcaactcagtctgctggacaggttcacggaggatgccaagaggctgtatggctccgaggcctttgccactgactttcaggactcagctgcagctaagaagctcatcaacgactacgtgaagaatggaactagggggaaaatcacagatctgatcaaggaccttgactcgcagacaatgatggtcctggtgaattacatcttctttaaagccaaatgggagatgccctttgacccccaagatactcatcagtcaaggttctacttgagcaagaaaaagtgggtaatggtgcccatgatgagtttgcatcacctgactataccttacttccgggacgaggagctgtcctgcaccgtggtggagctgaagtacacaggcaatgccagcgcactcttcatcctccctgatcaagacaagatggaggaagtggaagccatgctgctcccagagaccctgaagcggtggagagactctctggagttcagagagataggtgagctctacctgccaaagttttccatctcgagggactataacctgaacgacatacttctccagctgggcattgaggaagccttcaccagcaaggctgacctgtcagggatcacaggggccaggaacctagcagtctcccaggtggtccataaggctgtgcttgatgtatttgaggagggcacagaagcatctgctgccacagcagtcaaaatcaccctcctttctgcattagtggagacaaggaccattgtgcgtttcaacaggcccttcctgatgatcattgtccctacagacacccagaacatcttcttcatgagcaaagtcaccaatcccaagcaagcctagagcttgccatcaagcagtggggctctcagtaaggaacttggaatgcaagctggatgcctgggtctctgggcacagcctggcccctgtgcaccgagtggccatggcatgtgtggccctgtctgcttatccttggaaggtgacagcgattccctgtgtagctctcacatgcacaggggcccatggactcttcagtctggagggtcctgggcctcctgacagcaataaataatttcgttgga

SEQ ID NO: 343714 - DNA, 1260 bp, Homo sapiens
ctcggctctaccttgtcttgatcagcgcactcttcatcctccctgatcaagacaagatggaggaagtggaagccatgctgctcccagagaccctgaagcggtggagagactctctggagttcagagagataggtgagctctacctgccaaagttttccatctcgagggactataacctgaacgacatacttctctgctggacaggttcacggaggatgccaagaggctgtatggctccgaggcctttgccactgactttcaggactcagctgcagctaagaagctcatcaacgactacgtgaagaatggaactagggggaaaatcacagatctgatcaaggaccttgactcgcagacaatgatggtcctggtgaattacatcttctttaaagccaaatgggagatgccctttgacccccaagatactcatcagtcaaggttctacttgagcaagaaaaagtgggtaatggtgcccatgatgagtttgcatcacctgactataccttacttccgggacgaggagctgtcctgcaccgtggtggagctgaagtacacaggcaatgccagcgcactcttcatcctccctgatcaagacaagatggaggaagtggaagccatgctgctcccagagaccctgaagcggtggagagactctctggagttcagagagataggtgagctctacctgccaaagttttccatctcgagggactataacctgaacgacatacttctccagctgggcattgaggaagccttcaccagcaaggctgacctgtcagggatcacaggggccaggaacctagcagtctcccaggtggtccataaggctgtgcttgatgtatttgaggagggcacagaagcatctgctgccacagcagtcaaaatcaccctcctttctgcattagtggagacaaggaccattgtgcgtttcaacaggcccttcctgatgatcattgtccctacagacacccagaacatcttcttcatgagcaaagtcaccaatcccaagcaagcctagagcttgccatcaagcagtggggctctcagtaaggaacttggaatgcaagctggatgcctgggtctctgggcacagcctggcccctgtgcaccgagtggccatggcatgtgtggccctgtctgcttatccttggaaggtgacagcgattccctgtgtagctctcacatgcacaggggcccatggactcttcagtctggagggtcctgggcctcctgacagcaataaataatttcgttgga

SEQ ID NO: 343715 - DNA, 1084 bp, Homo sapiens
gcattcatggcaatccactactccagacagacggctttggaatccaccagctacatccagctccctgaggcagagttgagaatggagagaatgttacctctcctggctctggggctcttggcggctgggttctgccctgctgtcctctgccaccctaacagcccacttgacgaggagaatctgacccaggagaaccaagaccgagggacacacgtggacctcggattagcctccgccaacgtggacttcgctttcagcctgtacaagcagttagtcctgaaggcccctgataagaatgtcatcttctccccactgagcatctccaccgccttggccttcctgtctctgggggcccataataccaccctgacagagattctcaaaggcctcaagttcaacctcacggagacttctgaggcagaaattcaccagagcttccagcacctcctgcgcaccctcaatcagtccagcgatgagctgcagctgagtatgggaaatgccatgtttgtcaaagagcaactcagtctgctggacaggttcacggaggatgccaagaggctgtatggctccgaggcctttgccactgactttcaggactcagctgcagctaagaagctcatcaacgactacgtgaagaatggaactagggggaaaatcacagatctgatcaaggaccttgactcgcagacaatgatggtcctggtgaattacatcttctttaaagccaaatgggagatgccctttgacccccaagatactcatcagtcaaggttctacttgagcaagaaaaagtgggtaatggtgcccatgatgagtttgcatcacctgactataccttacttccgggacgagctgggcacagcctggcccctgtgcaccgagtggccatggcatgtgtggccctgtctgcttatccttggaaggtgacagcgattccctgtgtagctctcacatgcacaggggcccatggactcttcagtctggagggtcctgggcctcctgacagcaataaataatttcgttggaaaaaaaaaagagaagttggcctataggagtcgattacagtgagcgcggaatttagatt

SEQ ID NO: 343716 - DNA, 891 bp, Homo sapiens
tccaactgcttgctccaccttcaccaaatgggagatgccctttgacccccaagatactcatcagtcaaggttctacttgagcaagaaaaagtgggtaatggtgcccatgatgagtttgcatcacctgactataccttacttccgggacgaggagctgtcctgcaccgtggtggagctgaagtacacaggcaatgccagcgcactcttcatcctccctgatcaagacaagatggaggaagtggaagccatgctgctcccagagaccctgaagcggtggagagactctctggagttcagagagataggtgagctctacctgccaaagttttccatctcgagggactataacctgaacgacatacttctccagctgggcattgaggaagccttcaccagcaaggctgacctgtcagggatcacaggggccaggaacctagcagtctcccaggtggtccataaggctgtgcttgatgtatttgaggagggcacagaagcatctgctgccacagcagtcaaaatcaccctcctttctgcattagtggagacaaggaccattgtgcgtttcaacaggcccttcctgatgatcattgtccctacagacacccagaacatcttcttcatgagcaaagtcaccaatcccaagcaagcctagagcttgccatcaagcagtggggctctcagtaaggaacttggaatgcaagctggatgcctgggtctctgggcacagcctggcccctgtgcaccgagtggccatggcatgtgtggccctgtctgcttatccttggaaggtgacagcgattccctgtgtagctctcacatgcacaggggcccatggactcttcagtctggagggtcctgggcctcctgacagcaataaataatttcgttgga

SEQ ID NO: 343717 - DNA, 869 bp, Homo sapiens
ttccaacgaaattatttattgctgtcaggaggcccaggaccctccagactgaagagtccatgggcccctgtgcatgtgagagctacacagggaatcgctgtcaccttccaaggataagcagacagggccgagctgtcctgcaccgtggtggagctgaagtacacaggcaatgccagcgcactcttcatcctccctgatcaagacaagatggaggaagtggaagccatgctgctcccagagaccctgaagcggtggagagactctctggagttcagagagataggtgagctctacctgccaaagttttccatctcgagggactataacctgaacgacatacttctccagctgggcattgaggaagccttcaccagcaaggctgacctgtcagggatcacaggggccaggaacctagcagtctcccaggtggtccataaggctgtgcttgatgtatttgaggagggcacagaagcatctgctgccacagcagtcaaaatcaccctcctttctgcattagtggagacaaggaccattgtgcgtttcaacaggcccttcctgatgatcattgtccctacagacacccagaacatcttcttcatgagcaaagtcaccaatcccaagcaagcctagagcttgccatcaagcagtggggctctcagtaaggaacttggaatgcaagctggatgcctgggtctctgggcacagcctggcccctgtgcaccgagtggccatggcatgtgtggccctgtctgcttatccttggaaggtgacagcgattccctgtgtagctctcacatgcacaggggcccatggactcttcagtctggagggtcctgggcctcctgacagcaataaataatttcgttgga

SEQ ID NO: 343718 - DNA, 884 bp, Homo sapiens
gcattcatggcaatccactactccagacagacggctttggaatccaccagctacatccagctccctgaggcagagttgagaatggagagaatgttacctctcctggctctggggctcttggcggctgggttctgccctgctgtcctctgccaccctaacagcccacttgacgaggagaatctgacccaggagaaccaagaccgagggacacacgtggacctcggattagcctccgccaacgtggacttcgctttcagcctgtacaagcagttagtcctgaaggcccctgataagaatgtcatcttctccccactgagcatctccaccgccttggccttcctgtctctgggggcccataataccaccctgacagagattctcaaaggcctcaagttcaacctcacggagacttctgaggcagaaattcaccagagcttccaggtggtccataaggctgtgcttgatgtatttgaggagggcacagaagcatctgctgccacagcagtcaaaatcaccctcctttctgcattagtggagacaaggaccattgtgcgtttcaacaggcccttcctgatgatcattgtccctacagacacccagaacatcttcttcatgagcaaagtcaccaatcccaagcaagcctagagcttgccatcaagcagtggggctctcagtaaggaacttggaatgcaagctggatgcctgggtctctgggcacagcctggcccctgtgcaccgagtggccatggcatgtgtggccctgtctgcttatccttggaaggtgacagcgattccctgtgtagctctcacatgcacaggggcccatggactcttcagtctggagggtcctgggcctcctgacagcaataaataatttcgttgga

SEQ ID NO: 343719 - DNA, 541 bp, Homo sapiens
caagctagagcttgccatcagcagtggggctctcagtaaggaacttggaatgcaagctggatgcctgggtctctgggccaggaacctagcagtctcccgtggtccataaggctgtgcttgatgtatttgaggagggcacagaagcatctgctgccacagcagtcaaaatcaccctcctttctgcattagtggagacaaggaccattgtgcgtttcaacaggcccttcctgatgatcattgtccctacagacacccagaacatcttcttcatgagcaaagtcaccaatcccaagcaagcctagagcttgccatcaagcagtggggctctcagtaaggaacttggaatgcaagctggatgcctgggtctctgggcacagcctggcccctgtgcaccgagtggccatggcatgtgtggccctgtctgcttatccttggaaggtgacagcgattccctgtgtagctctcacatgcacaggggcccatggactcttcagtctggagggtcctgggcctcctgacagcaataaataatttcgttgga

SEQ ID NO: 343720 - DNA, 510 bp, Homo sapiens
gcattcatggcaatccactactccagacagacggctttggaatccaccagctacatccagctccctgaggcagagttgagaatggagagaatgttacctctcctggctctggggctcttggcggctgggttctgccctgctgtcctctgccaccctaacagcccacttgacgaggagaatctgacccaggagaaccaagaccgagggacacacgtggacctcggattagcctccgccaacgtggacttcgctttcagcctgtacaagcagttagtcctgaaggcccctgataagaatgtcatcttctccccactgagcatctccaccgccttggccttcctgtctctgggggcccataataccaccctgacagagattctcaaaggcctcaagttcaacctcacggagacttctgaggcagaaattcaccagagcttccaggggacctggcccagcttcgctgcgagatggagcagcacaacctggacggagccaacgcagcacaaccta

SEQ ID NO: 343721 - DNA, 370 bp, Homo sapiens
gcattcatggcaatccactactccagacagacggctttggaatccaccagctacatccagctccctgaggcagagttgagaatggagagaatgttacctctcctggctctggggctcttggcggctgggttctgccctgctgtcctctgccaccctaacagcccacttgacgaggagaatctgacccaggagaaccaagaccgagggagcaggcggcgaaggcagagaggaggaagcagcagctggcggaggaggaggcgcggcggcctcggggagaggacgggaagcctgtcaggaaggggcccgggaagcaggaggaggtgtgtgtcatcgatgccctgctggctgacatacaggtttctggtgacac

SEQ ID NO: 343722 - DNA, 501 bp, Homo sapiens
tccaaggagaaggaacagagtaagtaaaagcaagggaaaacacagcacatctaaacaagcttgaggacactcagagtatcttggaataatgttgctgccttaagaaagatggttcctgctggaggagagggaccttgtggagcagcttgcactgacctgtgagctgcgctcagaccaaggagcatacccagtcaatactgcagagtctgttccagatcagaagacccaagcagctgatcccatagactcataggaaataataaagttactgtttttagccactgagttttggggtggtttgttacagaacaatagccagttggttaaaaaacaccttactcaaccttagctcatgaaaaatacctgaagaatcaagtgaaataaatttctgactctctctctctctctctctctccagctattccaaggagaaggaacagagtaagtaaaagcaagggaaaacacagcacatctaaacaagcttgaggacactcagagtat

SEQ ID NO: 343723 - DNA, 233 bp, Homo sapiens
tccgatgactaccggaatcaggaaggagtgctagagttgggataaaccacagtgcctcattcctgtttattagtatcagacatcagacatatattttttattagttattcaaatgagttaaaatttaatacgactatattagcttttttccaaagtgctggctttttcattaaaatagctatttagtgaaaattctttataatacaatgatattccagagcagactaattttg

SEQ ID NO: 343724 - DNA, 106 bp, Homo sapiens
ttggtttcctatcatgtgagaccatagccagagtagttagatttccatgagaacaacattacgacaaaaatatgaccggtaagtatatagactatctacctattta

SEQ ID NO: 343725 - DNA, 923 bp, Homo sapiens
tcccacctgtagtcctggctactcaggagactgaggagggaggctcgcttgagccaggagttggaaaccagcctgggcagtataacaagacctcatctcggggaagaacggaaaggaaagaaaaagtttgagtctcatcaatatctaccatattaaaaattaaaactgggaaattcatttcatttaaaatatcaattgtaaacccattatatggtaacatatgtaacatctttgtgaaaagtaatttttaaaaaaatagacattgaacatcttagtaatgtttgacttaatagaaaaagacacttagaatttcataatttcgtatctgcttctgcattcaatctgttatgatacatccagtgttttgttgagcctctgggtaaacttcactgtatgcttgtggtaaaatgaggaagaaaaaaataatcatgttagtattattatgaaaatagttctggtcttgtgaaaggctgttggggttccccaaggtttcctggataacacttggagagctgctttagagcatatattggcaaccatcccaggccaaatctagaaaactttaaatgtttgcaggcctttcgtttaagtcctcaatattagttactctttttgtaaagttaagaaatttgacacctgctattgcacatcggcattgtaaaaattatcccataatttgaagggtttctttttccttaactccttgaggatggcagtggggtggagaaaataaagttattggtatgtgattgtatgctctaccctggaattctgttaagtgtaaggtatcagcttggactaatctagaatttgataggcaaaatcaatgtagtgtggtagaccggtgctcgggtttgtgaactttctgtcctggaggttgtgccagaatgttaatcacttaaatagaatgtttagttcagctg

SEQ ID NO: 343726 - DNA, 475 bp, Homo sapiens
agccctggacaactttcaggaagacagttctggtctgtagcaattaacacatggtcatcctcagaaaaaggtcctctcaattatttcccagagatacccataacttaaaatgcaggaaccaagagatttgagcctagacatttggatgaaaagcgatttccacctggagaaagtcactgcccttctgtgcagagtaccattgtgtcttgaatccagcttggccataaggaaatggggcgagactttgtcatgtatgtcgctgaagttcagctatgcaaaaatgttcacctatccttgatcaaccagtccaggaaccatcaaagaagaaaatgagattcgacttagaagacctgttctttataaacccctgcacagccctaatgatcaacaccacttccagtgctcataaattactgcttcaataattgttctgcaattctgcctattctcattgaatgcttcgtataatcccttt

SEQ ID NO: 343727 - DNA, 96 bp, Homo sapiens
ggaatgccagatgctggggatgctggtacaagttgtgggactgcatgctactgtctagagcttgtctcaatggatctagaacttcatcgccctctg

SEQ ID NO: 343728 - DNA, 315 bp, Homo sapiens
tcaggtaatgagggactgggagggacagtcagaccaggcctggggagaagaacaccaggaaggaagaacaggtgggaatggagaagcagctgggagtggtgggggggttgggggccatcatgtgcccagatccccatgagaaactggtcccagccacctgtttctccctgcccctccctctgccgccagctatgggttttgcctccaaatatgtccaagccacccccttcctctcctgtgcctagaccgggttcatgcctactccccacatctggtcctgacaccttccatccctccctcctgggacgaccagcc

SEQ ID NO: 343729 - DNA, 640 bp, Homo sapiens
aatgagctagccctgcacactagcttgattggtttatagcttaaattaaaaagccaaatggtaccaagtgttgatatggatcaggaacaacttgaattttcagatattgctgatagtttagctttttcttataaggttaaacatatacttaacatatttgcccactatatcactcgtgaatattgacccaagagaaacgaaagcatatgccatacaaatacttatttgtgaatgttcaaagcaacttaatttttaagagtcaaaaactagaaacagctcaacattcaagaggtgaaatgataaatttttgttatatccataaaattggaatgctactcagaaattcaaacaatgactatttgatttatgcaactacatggatacacccagtgttctgctggcaaatgtttaaaaactggctctccaaatgctcctgccatgactgatttcaagttaccaatataaggtcaatgaatgtggagttaggaagagatgcctagtagcaaactattttatagtatttcttctatccatgtcttctatccggtatttcttctgtcttatatccaatagacataatcttgaacacagatttcttgttttgttttgtagagacagggtctcactctgtcacctaggc

SEQ ID NO: 343730 - DNA, 285 bp, Homo sapiens
ttaagtatagagcttatcatgcttttactttgtagtaatgggaacatgaaaaatgattttaggcttttccggccatttcttgatgaggtatgtggatctcatcagatatattcatcctggctgaatctagtagaagagagggtccaagatcagacctagcagttcctgaggagcatggaactctctatgtatgcccttgtttttctctgggagttgttactctcaaaaatatacttcattttggaattcagttttgagctacctaaagccatatatggtagcgtg

SEQ ID NO: 343731 - DNA, 821 bp, Homo sapiens
agaaagcaacgacgaaacaagaataggatgagttctcagttacctactttattcttcaaatagcccttattcagcacatctttcttgtttgttgtagaatggagagcagtttattacatttgataatccttgaaagcattaatttgcttggagggtacccagggagtagagttcaagcagtatgaagagtgaagaatattcattctggtagagtttagtgacagactaagcttatattaataacggttctatattatagaagaatactactgctggagtatggcagtatattaggtttctccagagaagcaaggccaatagggtgtgtgtgtgtagagattgactggttgattgatgtttgaggaattggctcatgctattgtgaaggcttgcaagttcaaaatctgtagggtaggctgacaggccggggacctggggaagaggtgatgttgcatctcaagtccaaacgcagtcttttggcagaattctatcttacttgggaaatcagtcttttctttttctcttaaggtcttcaactgatagaataaggcccgcccacattataaagataattgactttactctgagtctgctgacttaaatgttaattgtatctgaagaaatatcttcacagcaacatctaaactattgtttgatcaaatatactgggcctagccaagttggaatgtaaaattaaccatcacaagactgtaatagaaaccatctcataatgtacatttgggacttatggtgaaaggcaaagggcgtgagccaccgcgcccagcctgaaactttctctttttagaggggcagtgaagaag

SEQ ID NO: 343732 - DNA, 895 bp, Homo sapiens
agaaagcaacgacgaaacaagaataggatgagttctcagttacctactttattcttcaaatagcccttattcagcacatctttcttgtttgttgtagaatggagagcagtttattacatttgataatccttgaaagcattaatttgcttggagggtacccagggagtagagttcaagcagtatgaagagtgaagaatattcattctggtagagtttagtgacagactaagcttatattaataacggttctatattatagaagaatactactgctggagtatggcagtatattaggtttctccagagaagcaaggccaatagggtgtgtgtgtgtagagattgactggttgattgatgtttgaggaattggctcatgctattgtgaaggcttgcaagttcaaaatctgtagggtaggctgacaggccggggacctggggaagaggtgatgttgcatctcaagtccaaacgcagtcttttggcagaattctatcttacttgggaaatcagtcttttctttttctcttaaggtcttcaactgatagaataaggcccgcccacattataaagataattgactttactctgagtctgctgacttaaatgttaattgtatctgaagaaatatcttcacagcaacatctaaactattgtttgatcaaatatactgggcctagccaagttggaatgtaaaattaaccatcacaagactgtaatagaaaccatctcataatgtacatttgggacttatggtgaaaggcaaagggcagaccgggtgcagtggctcacgcctgtaatcccagcactttgggaggccgaggcgaacagatcacgaggtcaagagatcgagaccatcctggctaacacggtgaaaccccgtctctactaaaaatacca

SEQ ID NO: 343733 - DNA, 391 bp, Homo sapiens
tcagtaactggatgaattttgtaatcatcatctcaatgataatacaaaggtttcctttccctaagtgataacaaagaaaacctctctttgtaattctttttgcaaggatccataagcctgaattctaaaaggagaggccaataaaaaggaaatgaagaatgttttaaaggtaaggggtttttttggtttgtttgtttgagacggagttacagtggtgtgatctcagctcactgcaacctccgcctccatgttcaagtgattctcctacctcagcctcctgagtagctggggttacaggtgcccgccaccacgcctgggtaatttttgtatttttggtagagatgggatttcaccatgtttgccaggctggtctcgaactcctgacctcaga

SEQ ID NO: 343734 - DNA, 960 bp, Homo sapiens
aaaacaaaacaaaaagaatccacactgcttccccgcttcactttacccagaaaaggaatgttctaggccacttcctcttcagcacacatccccagggaactaaaataggttcacagtcacccccatcttcctcattcccatcacctcttacccacagaggcatctctggtcctacagatccagccctgccttcaagaggcacaggtccaacccatccagtgtccctgctagtcacacacagcactcagggtacaatggagggcttctgtgctttggatgggaacaaaccccacctcacattcccacacctgagaagccaccagggtcctctctgtcctgtcctcacactcaatgtctgtcctgggtcacccttgtcatctctcctggaaataggcatggctcctgacaggtaggattgaggctttgtcttttcaggagtccctcccactctgagcacatgaaactgctcagctccatgcaaccctctctcaccaggggccttgttctctgggtccctgaatacctgggtccatgccatgtacattttaagaaaaatgacagtgactctcaccctgacatcctcacccaaggcacgtgtctgacaagaatcaccaggtgagatacctgtggctccacacacctgaggcttcactgcgcaggggtgtcctcatccctctcctcccacccctagggacagtaagcaccacaggctgccttggaccaccagctccccctcccagacacagcctcagatctatactgacatgctacatggagaggctctgatgaacagcaggtattaggaaatcccaccgaaccaggtgccacttgcggccccactcctcctcatatctgtgactgggacagacacacataacacacctctgttcaccgcccagcccccaaggtcaatcacagtctgcttctcccctagatccactgctccccatgtcttccgtc

SEQ ID NO: 343735 - DNA, 492 bp, Homo sapiens
tgtactccagcttgggcaacagactgagaccccatatcaaaaacaaacgaagagtgatcatccagttactcactgctgggtctgagggaagcccaaaggcagtgggagccagagaaaatagttgagagtcagatttcacagtggaggtgacattgaaacagggtattgaagggccaataagagttcaccaagtcaggagagagggaggaaaggacattccagcagagagcaggatctattctttccacaagcctttactgaggttcacctttgcacaggctagctactgggttctggaaatgcagagctcaagtaaacaacccttctcccacttttcccaaatgccgaaaacattaggagaactaggactctcatccctaggggcattgggaagaactcaaaagcctgctgcttgcaaagtattcaagatgatgtaaagcatttaacacactgtctgggagatagtacatttttaataaatactagctgtca

SEQ ID NO: 343736 - DNA, 124 bp, Homo sapiens
ggttatcacatgtagaatctggaggttctggtccatccatgaacagtccaaatgccacaacagcagtcacacagctgcagtcatggatcagccccaggaacaaaccttcctctattgagtggct

SEQ ID NO: 343737 - DNA, 350 bp, Homo sapiens
tggctgagtaatattctgtggtgtcgctataaacacattttctttatccactcattagtcgatgtgcacttaggttgcttccatgtttttgcagttgtgaattgtgctgctctaaacaaaacgtgtgcaagtgtctttttcgtataatgtgaaattgtctctagttttaatttttgtctttaaaaaatgtttttgcccttatttacctttataatttccattttcaaaaaaaaaagtaaagggaagaaatgttgctattttttagcatagtcattaaaaatagtagttattatgatcaagccccaatgtgtgaaaagactaataaatgctaaatttcttcattttattta

SEQ ID NO: 343738 - DNA, 575 bp, Homo sapiens
cttatttaaaaaggtcactcttatgacatttacttatgtatgcctccaaaactgtattataaggcagtgctttttcaaatctaggcagttttatttgcataactagtttatttgtaagtgaataaccaattctaattggtcgttagcctgaaaatctttggaagaaaagttcctattttccagtctcctttgtgtaaggtgtagcatttgttggatgtataaaaatatcacccaaatgctcagcttccggacaggcctggcagagactgttttcatttgctttttacagcctatttgcatagtagaatataggagtgaattaatcattactgatttccttggcactggcagcagttgggggtgagggcagaggagggatccgcagaaggcagagaaagagggccttttccagtggactcagttgacttccatgtttaccatacacacctgtggcagacagtgccatctggaaaggcgcttacgctatggagagagaggagcctggtcttacagcatccttctgtggtgtcatcctccttgcccctaacttttctccttcacccaagtgttcttga

SEQ ID NO: 343739 - DNA, 354 bp, Homo sapiens
gctttttcttttctttctcttttaaaacacatctagacaaggaaaaaacaagcctcggatctgatttttcactcctcgttcttgtgcttggttcttactgtgtttgtgtattttaaaggcgagaagacgaggggaacaaaaccagctggatccatccatcaccgtgggtggttttaatttttcgttttttctcgttatttttttttaaacaaccactcttcacaatgaacaaactgtatatcggaaacctcagcgagaacgccgccccctcggacctagaaagtatcttcaaggacgccaagatcccggtgtcgggacccttcctggtgaagactggctacgcgttcgtggact

SEQ ID NO: 343740 - DNA, 481 bp, Homo sapiens
ccccccccccccccccacccaccccccccccaacaccccaccccccaccccacccatcaccgaccgggaggcatatatagatgccgaacttagtgcggacacccgatcggcatagcgcactacagcccagaactcctgggctcaagcgatcctcctgccttagcctctcaaagtgctgggattataggcatgagccacagtgcctgtcccaatctttccttttaagttcgttcttctcacagtcttctcaatctcaataaatggccattctgttctttccttcttttgctcaaatcaaaaaccttggagttatccttgattcctttctgtccctcatagaagccatcagcaaatgctcttgattctaccttcaaaaagatatccaaagtctgaccaattctgtcaatctccattgctaccaccctggtccaggctagctctcttgggttattgtagatgccgcctatattgcctccctgct

SEQ ID NO: 343741 - DNA, 306 bp, Homo sapiens
tgctgggattacaggtgtaagccactgtgcccagccagagccaggattctaactcaggttggctccaaactgtgcttttagttactacattatcctgcctctggcatctttataatgtttgtaaagagaggtagagtgaccaggagaatctgttgtataattcagaagtatgctgtttatctcttggcaaaatacttaagagttgcgagaattacagatattctctatttttcttctacaaagcgacaatgtttgaaaatttattaactttctgtgtgaacaaaggggattatctaacaactatta

SEQ ID NO: 343742 - DNA, 243 bp, Homo sapiens
agtcaaagggtgttgttctctggcaggctggggtgggggtcacaaggtgctcagtgggggaggttctgagccaggagaaggaatttcacaaggttaatcgctcagttaaggtggggcaggaacaaatcacaatggtggaatgtcatcagttaaggcaggaacaggccattttcacttcttttgtgaatcttcagttacttcaggccatctggatgaatacgtgcagacttgggctcagaggcc

SEQ ID NO: 343743 - DNA, 223 bp, Homo sapiens
cccatctttaaaaataagtcagaaagttattaatattaaataacatttacttcttacaggaaatgttggaagtgcctagttaaagtaatttagtaaattaaaaacaaatttcttgaattttctttcacatttcttcttccttacaatatacgttttcccccatacaaattgaattatatgattgtgatatgtgattacatatgcaaggtaagataatatgatg

SEQ ID NO: 343744 - DNA, 307 bp, Homo sapiens
cactgatgtattcatttgtttcttaatgtgctcatcttgcccattaagaataattagcagctttactaacagattttctggcttctggcaatgtttctccccctttttttgttgacatccacttttacttcttagaaagtaatttttgaataatatcctacaactgctatataatttagacttcctaaaattttaaaggaaagatgtaaacagtaatttttaaataagtttgtttcaatctatatgcatcaatagtatgtgattcagtgaattagttattcttacagaaagtgggcatgcaaataga

SEQ ID NO: 343745 - DNA, 261 bp, Homo sapiens
agcgtgggggactccgcgcagaggtcgacagaggttgaggcagggccaggagccatgatggacacagaggggcagtagaggctgcaggcgtctccacaaccccagcgcagaggggcccgggccagggccacagggagccatggagagcttcatggagtcgctgaacaggctgaaggagatccacgagaaggaagtcctgggcctgcagaacaagcttctggaactgaactcagagaggtgccggtgagtcaggccaagcag

SEQ ID NO: 343746 - DNA, 354 bp, Homo sapiens
aggggacatgacatacatatacattactgataacccactttcacaggttagggaagctgattatttctgaatggccccaaataactttaagcacttaaaagcagcacctatcatgctgtaatgggtataactaggtaaattaagatgtgcctaccagcaaatggatagatttccaaacatgagatgaccagcacatatataccagatcttgtttcccaaggttttgttctaaaatatcactgcctaaaatggcataatgaataatgctaagctgggcttaatgcaaagtatttgctcattaaaagaaagaaatattcgcttattaaaagaaagaaatatttgctcattaaaaga

SEQ ID NO: 343747 - DNA, 291 bp, Homo sapiens
gaaactgtgctatgaatcatacagcagtcctcccttatcttcaagggatacgttctgaaattccccagtgggtgcctgaaactgcaggtagtaccagatctaaatacattgctttttcctatacacacatacctatggtaaagtttaaattataaattaggcacagtaaaagatgaataacaatgtaaaaggaaaataaacttggggaccccaaacccactaagtcaaagagaaaagtcaaggtaggaacggcatcatgcaaacctacctccctcacaatctgcccaatag

SEQ ID NO: 343748 - DNA, 4242 bp, Homo sapiens
gaagctcccgaccccgcctccgcagggtccaggcttcgcccctggtgacaggtggtgctggtgtagtcaaggaggagggctcgctttttttggttcaggttgtcatggtggcgcccaagcccgccttgccggccttgtcttttccggtctcagtccggcgtggcagcggaggcaggcaccgttaggtcttccagtccctctctgtcatggcgacgcccagcctcttcttccggccacagcctgtcatggcggcacccgaagtagtccctgccggggccagcctgttctgttgccctggctcttcctagtccaggctgccatggcggcgctcagggcttaccggaagtaaaacttcggaagtgaggcgttcctctgcccggaagtgagcgcggcgctaggaaagatggcggcagcggcggcggtgggcaacgcggtgccctgcggggcccggccttgcggggtccggcctgacgggcagcccaagcccgggccgcagccgcgcgcgctccttgccgccgggccggcgctcatagcgaacggtgacgagctggtggctgccgtgtggccgtaccggcggttggcgctgttgcggcgcctcacggtgctgccattcgccgggctgctttacccggcctggttgggtgccgcagccgctggctgctggggctggggcagcagttgggtgcagatccccgaagctgcgctgctcgtgcttgccaccatctgcctcgcgcacgcgctcactgtcctctcggggcattggtctgtgcacgcgcattgcgcgctcacctgcaccccggagtacgaccccagcaaagcgacctttgtgaaggtggtgccaacccccaacaatggctccacggagctcgtggccctgcaccgcaatgagggcgaagacgggcttgaggtgctgtccttcgaattccagaagatcaagtattcctacgatgccctggagaagaagcagtttctccccgtggcctttcctgtgggaaacgccttctcatactatcagagcaacagaggcttccaggaagactcagagatccgagcagctgagaagaaatttgggagcaacaaggccgagatggtggtgcctgacttctcggagcttttcaaggagagagccacagcccccttctttgtatttcaggtgttctgtgtggggctctggtgcctggatgagtactggtactacagcgtctttacgctatccatgctggtggcgttcgaggcctcgctggtgcagcagcagatgcggaacatgtcggagatccggaagatgggcaacaagccccacatgatccaggtctaccgaagccgcaagtggaggcccattgccagtgatgagatcgtaccaggggacatcgtctccatcggccgctccccacaggagaacctggtgccatgtgacgtgcttctgctgcgaggccgctgcatcgtagacgaggccatgctcacgggggagtccgtgccacagatgaaggagcccatcgaagacctcagcccagaccgggtgctggacctccaggctgattcccggctgcacgtcatcttcgggggcaccaaggtggtgcagcacatccccccacagaaagccaccacgggcctgaagccggttgacagcgggtgcgtggcctacgtcctgcggaccggattcaacacatcccagggcaagctgctgcgcaccatcctcttcggggtcaagagggtgactgcgaacaacctggagaccttcatcttcatcctcttcctcctggtgtttgccatcgctgcagctgcctatgtatggattgaaggtaccaaggaccccagccggaaccgctacaagctgtttctggagtgcaccctgatcctcacctcggtcgtgcctcctgagctgcccatcgagctgtccctggccgtcaacacctccctcatcgccctggccaagctctacatgtactgcacagagcccttccggatcccctttgctggcaaggtcgaggtgtgctgctttgacaagacggggacgttgaccagtgacagcctggtggtgcgcggtgtggccgggctgagagacgggaaggaggtgaccccagtgtccagcatccctgtagaaacacaccgggccctggcctcgtgccactcgctcatgcagctggacgacggcaccctcgtgggtgaccctctagagaaggccatgctgacggccgtggactggacgctgaccaaagatgagaaagtattcccccgaagtattaaaactcaggggctgaaaattcaccagcgctttcattttgccagtgccctgaagcgaatgtccgtgcttgcctcgtatgagaagctgggctccaccgacctctgctacatcgcggccgtgaagggggcccccgaaactctgcactccatgttctcccagtgcccgcccgactaccaccacatccacaccgagatctcccgggaaggagcccgcgtcctggcgctggggtacaaggagctgggacacctcactcaccagcaggcccgggaggtcaagcgggaggccctggagtgcagcctcaagttcgtcggcttcattgtggtctcctgcccgctcaaggctgactccaaggccgtgatccgggagatccagaatgcgtcccaccgggtggtcatgatcacgggagacaacccgctcactgcatgccacgtggcccaggagctgcacttcattgaaaaggcccacacgctgatcctgcagcctccctccgagaaaggccggcagtgcgagtggcgctccattgacggcagcatcgtgctgcccctggcccggggctccccaaaggcactggccctggagtacgcactgtgcctcacaggcgacggcttggcccacctgcaggccaccgacccccagcagctgctccgcctcatcccccatgtgcaggtgttcgcccgtgtggctcccaagcagaaggagtttgtcatcaccagcctgaaggagctgggctacgtgaccctcatgtgtggggatggcaccaacgacgtgggcgccctgaagcatgctgacgtgggtgtggcgctcttggccaatgcccctgagcgggttgtcgagcggcgacggcggccccgggacagcccaaccctgagcaacagtggcatcagagccacctccaggacagccaagcagcggtcggggctccctccctccgaggagcagccaacctcccagagggaccgcctgagccaggtgctgcgagacctcgaggacgagagtacgcccattgtgaaactgggggatgccagcatcgcagcacccttcacctccaagctctcatccatccagtgcatctgccacgtgatcaagcagggccgctgcacgctggtgaccacgctacagatgttcaagatcctggcgctcaatgccctcatcctggcctacagccagagcgtcctctacctggagggagtcaagttcagtgacttccaggccaccctacaggggctgctgctggccggctgcttcctcttcatctcccgttccaagcccctcaagaccctctcccgagaacggcccctgcccaacatcttcaacctgtacaccatcctcaccgtcatgctccagttctttgtgcacttcctgagccttgtctacctgtaccgtgaggcccaggcccggagccccgagaagcaggagcagttcgtggacttgtacaaggagtttgagccaagcctggtcaacagcaccgtctacatcatggccatggccatgcagatggccaccttcgccatcaattacaaaggcccgcccttcatggagagcctgcccgagaacaagcccctggtgtggagtctggcagtttcactcctggccatcattggcctgctcctcggctcctcgcccgacttcaacagccagtttggcctcgtggacatccctgtggagttcaagctggtcattgcccaggtcctgctcctggacttctgcctggcgctcctggccgaccgcgtcctgcagttcttcctggggaccccgaagctgaaagtgccttcctgagatggcagtgctggtacccactgcccaccctggctgccgctgggcgggaaccccaacagggccccgggagggaaccctgcccccaaccccccacagcaaggctgtacagtctcgcccttggaagactgagctgggacccccacagccatccgctggcttggccagcagaaccagccccaagccagcacctttggtaaataaagcagcatctgagattttaaaaa

SEQ ID NO: 343749 - DNA, 2016 bp, Homo sapiens
gaagctcccgaccccgcctccgcagggtccaggcttcgcccctggtgacaggtggtgctggtgtagtcaaggaggagggctcgctttttttggttcaggttgtcatggtggcgcccaagcccgccttgccggccttgtcttttccggtctcagtccggcgtggcagcggaggcaggcaccgttaggtcttccagtccctctctgtcatggcgacgcccagcctcttcttccggccacagcctgtcatggcggcacccgaagtagtccctgccggggccagcctgttctgttgccctggctcttcctagtccaggctgccatggcggcgctcagggcttaccggaagtaaaacttcggaagtgaggcgttcctctgcccggaagtgagcgcggcgctaggaaagatggcggcagcggcggcggtgggcaacgcggtgccctgcggggcccggccttgcggggtccggcctgacgggcagcccaagcccgggccgcagccgcgcgcgctccttgccgccgggccggcgctcatagcgaacggtgacgagctggtggtgcccctggcccggggctccccaaaggcactggccctggagtacgcactgtgcctcacaggcgacggcttggcccacctgcaggccaccgacccccagcagctgctccgcctcatcccccatgtgcaggtgttcgcccgtgtggctcccaagcagaaggagtttgtcatcaccagcctgaaggagctgggctacgtgaccctcatgtgtggggatggcaccaacgacgtgggcgccctgaagcatgctgacgtgggtgtggcgctcttggccaatgcccctgagcgggttgtcgagcggcgacggcggccccgggacagcccaaccctgagcaacagtggcatcagagccacctccaggacagccaagcagcggtcggggctccctccctccgaggagcagccaacctcccagagggaccgcctgagccaggtgctgcgagacctcgaggacgagagtacgcccattgtgaaactgggggatgccagcatcgcagcacccttcacctccaagctctcatccatccagtgcatctgccacgtgatcaagcagggccgctgcacgctggtgaccacgctacagatgttcaagatcctggcgctcaatgccctcatcctggcctacagccagagcgtcctctacctggagggagtcaagttcagtgacttccaggccaccctacaggggctgctgctggccggctgcttcctcttcatctcccgttccaagcccctcaagaccctctcccgagaacggcccctgcccaacatcttcaacctgtacaccatcctcaccgtcatgctccagttctttgtgcacttcctgagccttgtctacctgtaccgtgaggcccaggcccggagccccgagaagcaggagcagttcgtggacttgtacaaggagtttgagccaagcctggtcaacagcaccgtctacatcatggccatggccatgcagatggccaccttcgccatcaattacaaaggcccgcccttcatggagagcctgcccgagaacaagcccctggtgtggagtctggcagtttcactcctggccatcattggcctgctcctcggctcctcgcccgacttcaacagccagtttggcctcgtggacatccctgtggagttcaagctggtcattgcccaggtcctgctcctggacttctgcctggcgctcctggccgaccgcgtcctgcagttcttcctggggaccccgaagctgaaagtgccttcctgagatggcagtgctggtacccactgcccaccctggctgccgctgggcgggaaccccaacagggccccgggagggaaccctgcccccaaccccccacagcaaggctgtacagtctcgcccttggaagactgagctgggacccccacagccatccgctggcttggccagcagaaccagccccaagccagcacctttggtaaataaagcagcatctgagattttaaaaa

SEQ ID NO: 343750 - DNA, 334 bp, Homo sapiens
ctcggacctctgttggcgcttgtttcccagtgctccgccgtgcatctggagagccctgccatatggttctccctagtctgagagctcgccaggctttacttcgtcctcatgttcttcttggttccttgtttgaagcggcctgccatgctcaggttggaggggtcagggtggagactccataccccagaggccttgccctgggaacaggatggggcctggtctcttgcagggccgagatggtggtgcctgacttctcggagcttttcaaggagagagccacagcccccttctttgtatttcaggtaaagcagcagctctggcccatctccccatt

SEQ ID NO: 343751 - DNA, 4312 bp, Homo sapiens
gaagctcccgaccccgcctccgcagggtccaggcttcgcccctggtgacaggtggtgctggtgtagtcaaggaggagggctcgctttttttggttcaggttgtcatggtggcgcccaagcccgccttgccggccttgtcttttccggtctcagtccggcgtggcagcggaggcaggcaccgttaggtcttccagtccctctctgtcatggcgacgcccagcctcttcttccggccacagcctgtcatggcggcacccgaagtagtccctgccggggccagcctgttctgttgccctggctcttcctagtccaggctgccatggcggcgctcagggcttaccggaagtaaaacttcggaagtgaggcgttcctctgcccggaagtgagcgcggcgctaggaaagatggcggcagcggcggcggtgggcaacgcggtgccctgcggggcccggccttgcggggtccggcctgacgggcagcccaagcccgggccgcagccgcgcgcgctccttgccgccgggccggcgctcatagcgaacggtgacgagctggtggctgccgtgtggccgtaccggcggttggcgctgttgcggcgcctcacggtgctgccattcgccgggctgctttacccggcctggttgggtgccgcagccgctggctgctggggctggggcagcagttgggtgcagatccccgaagctgcgctgctcgtgcttgccaccatctgcctcgcgcacgcgctcactgtcctctcggggcattggtctgtgcacgcgcattgcgcgctcacctgcaccccggagtacgaccccagcaaagcgacctttgtgaaggtggtgccaacccccaacaatggctccacggagctcgtggccctgcaccgcaatgagggcgaagacgggcttgaggtgctgtccttcgaattccagaagatcaagtattcctacgatgccctggagaagaagcagtttctccccgtggcctttcctgtgggaaacgccttctcatactatcagagcaacagaggcttccaggaagactcagagatccgagcagctgagaagaaatttgggagcaacaaggccgagatggtggtgcctgacttctcggagcttttcaaggagagagccacagcccccttctttgtatttcaggtgttctgtgtggggctctggtgcctggatgagtactggtactacagcgtctttacgctatccatgctggtggcgttcgaggcctcgctggtgcagcagcagatgcggaacatgtcggagatccggaagatgggcaacaagccccacatgatccaggtctaccgaagccgcaagtggaggcccattgccagtgatgagatcgtaccaggggacatcgtctccatcggccgctccccacaggagaacctggtgccatgtgacgtgcttctgctgcgaggccgctgcatcgtagacgaggccatgctcacgggggagtccgtgccacagatgaaggagcccatcgaagacctcagcccagaccgggtgctggacctccaggctgattcccggctgcacgtcatcttcgggggcaccaaggtggtgcagcacatccccccacagaaagccaccacgggcctgaagccggttgacagcgggtgcgtggcctacgtcctgcggaccggattcaacacatcccagggcaagctgctgcgcaccatcctcttcggggtcaagagggtgactgcgaacaacctggagaccttcatcttcatcctcttcctcctggtgtttgccatcgctgcagctgcctatgtatggattgaaggtaccaaggaccccagccggaaccgctacaagctgtttctggagtgcaccctgatcctcacctcggtcgtgcctcctgagctgcccatcgagctgtccctggccgtcaacacctccctcatcgccctggccaagctctacatgtactgcacagagcccttccggatcccctttgctggcaaggtcgaggtgtgctgctttgacaagacggggacgttgaccagtgacagcctggtggtgcgcggtgtggccgggctgagagacgggaaggaggtgaccccagtgtccagcatccctgtagaaacacaccgggccctggcctcgtgccactcgctcatgcagctggacgacggcaccctcgtgggtgaccctctagagaaggccatgctgacggccgtggactggacgctgaccaaagatgagaaagtattcccccgaagtattaaaactcaggggctgaaaattcaccagcgctttcattttgccagtgccctgaagcgaatgtccgtgcttgcctcgtatgagaagctgggctccaccgacctctgctacatcgcggccgtgaagggggcccccgaaactctgcactccatgttctcccagtgcccgcccgactaccaccacatccacaccgagatctcccgggaaggagcccgcgtcctggcgctggggtacaaggagctgggacacctcactcaccagcaggcccgggaggtcaagcgggaggccctggagtgcagcctcaagttcgtcggcttcattgtggtctcctgcccgctcaaggctgactccaaggccgtgatccgggagatccagaatgcgtcccaccgggtggtcatgatcacgggagacaacccgctcactgcatgccacgtggcccaggagctgcacttcattgaaaaggcccacacgctgatcctgcagcctccctccgagaaaggccggcagtgcgagtggcgctccattgacggcagcatcgtgctgcccctggcccggggctccccaaaggcactggccctggagtacgcactgtgcctcacaggcgacggcttggcccacctgcaggccaccgacccccagcagctgctccgcctcatcccccatgtgcaggtgttcgcccgtgtggctcccaagcagaaggagtttgtcatcaccagcctgaaggagctgggctacgtgaccctcatgtgtggggatggcaccaacgacgtgggcgccctgaagcatgctgacgtgggtgtggcgctcttggccaatgcccctgagcgggttgtcgagcggcgacggcggccccgggacagcccaaccctgagcaacagtggcatcagagccacctccaggacagccaagcagcggtcggggctccctccctccgaggagcagccaacctcccagagggtgagtcccaagaggggaggtgctgcaccccatcctggccagggctgacagcctgctgtctaccctgcaggaccgcctgagccaggtgctgcgagacctcgaggacgagagtacgcccattgtgaaactgggggatgccagcatcgcagcacccttcacctccaagctctcatccatccagtgcatctgccacgtgatcaagcagggccgctgcacgctggtgaccacgctacagatgttcaagatcctggcgctcaatgccctcatcctggcctacagccagagcgtcctctacctggagggagtcaagttcagtgacttccaggccaccctacaggggctgctgctggccggctgcttcctcttcatctcccgttccaagcccctcaagaccctctcccgagaacggcccctgcccaacatcttcaacctgtacaccatcctcaccgtcatgctccagttctttgtgcacttcctgagccttgtctacctgtaccgtgaggcccaggcccggagccccgagaagcaggagcagttcgtggacttgtacaaggagtttgagccaagcctggtcaacagcaccgtctacatcatggccatggccatgcagatggccaccttcgccatcaattacaaaggcccgcccttcatggagagcctgcccgagaacaagcccctggtgtggagtctggcagtttcactcctggccatcattggcctgctcctcggctcctcgcccgacttcaacagccagtttggcctcgtggacatccctgtggagttcaagctggtcattgcccaggtcctgctcctggacttctgcctggcgctcctggccgaccgcgtcctgcagttcttcctggggaccccgaagctgaaagtgccttcctgagatggcagtgctggtacccactgcccaccctggctgccgctgggcgggaaccccaacagggccccgggagggaaccctgcccccaaccccccacagcaaggctgtacagtctcgcccttggaagactgagctgggacccccacagccatccgctggcttggccagcagaaccagccccaagccagcacctttggtaaataaagcagcatctgagattttaaaaa

SEQ ID NO: 343752 - DNA, 4845 bp, Homo sapiens
  misc_feature (4248)..(4249): n is a, c, g, or t
gaagctcccgaccccgcctccgcagggtccaggcttcgcccctggtgacaggtggtgctggtgtagtcaaggaggagggctcgctttttttggttcaggttgtcatggtggcgcccaagcccgccttgccggccttgtcttttccggtctcagtccggcgtggcagcggaggcaggcaccgttaggtcttccagtccctctctgtcatggcgacgcccagcctcttcttccggccacagcctgtcatggcggcacccgaagtagtccctgccggggccagcctgttctgttgccctggctcttcctagtccaggctgccatggcggcgctcagggcttaccggaagtaaaacttcggaagtgaggcgttcctctgcccggaagtgagcgcggcgctaggaaagatggcggcagcggcggcggtgggcaacgcggtgccctgcggggcccggccttgcggggtccggcctgacgggcagcccaagcccgggccgcagccgcgcgcgctccttgccgccgggccggcgctcatagcgaacggtgacgagctggtggctgccgtgtggccgtaccggcggttggcgctgttgcggcgcctcacggtgctgccattcgccgggctgctttacccggcctggttgggtgccgcagccgctggctgctggggctggggcagcagttgggtgcagatccccgaagctgcgctgctcgtgcttgccaccatctgcctcgcgcacgcgctcactgtcctctcggggcattggtctgtgcacgcgcattgcgcgctcacctgcaccccggagtacgaccccagcaaagcgacctttgtgaaggtggtgccaacccccaacaatggctccacggagctcgtggccctgcaccgcaatgagggcgaagacgggcttgaggtgctgtccttcgaattccagaagatcaagtattcctacgatgccctggagaagaagcagtttctccccgtggcctttcctgtgggaaacgccttctcatactatcagagcaacagaggcttccaggaagactcagagatccgagcagctgagaagaaatttgggagcaacaaggccgagatggtggtgcctgacttctcggagcttttcaaggagagagccacagcccccttctttgtatttcaggtgttctgtgtggggctctggtgcctggatgagtactggtactacagcgtctttacgctatccatgctggtggcgttcgaggcctcgctggtgcagcagcagatgcggaacatgtcggagatccggaagatgggcaacaagccccacatgatccaggtctaccgaagccgcaagtggaggcccattgccagtgatgagatcgtaccaggggacatcgtctccatcggccgctccccacaggagaacctggtgccatgtgacgtgcttctgctgcgaggccgctgcatcgtagacgaggccatgctcacgggggagtccgtgccacagatgaaggagcccatcgaagacctcagcccagaccgggtgctggacctccaggctgattcccggctgcacgtcatcttcgggggcaccaaggtggtgcagcacatccccccacagaaagccaccacgggcctgaagccggttgacagcgggtgcgtggcctacgtcctgcggaccggattcaacacatcccagggcaagctgctgcgcaccatcctcttcggggtcaagagggtgactgcgaacaacctggagaccttcatcttcatcctcttcctcctggtgtttgccatcgctgcagctgcctatgtatggattgaaggtaccaaggaccccagccggaaccgctacaagctgtttctggagtgcaccctgatcctcacctcggtcgtgcctcctgagctgcccatcgagctgtccctggccgtcaacacctccctcatcgccctggccaagctctacatgtactgcacagagcccttccggatcccctttgctggcaaggtcgaggtgtgctgctttgacaagacggggacgttgaccagtgacagcctggtggtgcgcggtgtggccgggctgagagacgggaaggaggtgaccccagtgtccagcatccctgtagaaacacaccgggccctggcctcgtgccactcgctcatgcagctggacgacggcaccctcgtgggtgaccctctagagaaggccatgctgacggccgtggactggacgctgaccaaagatgagaaagtattcccccgaagtattaaaactcaggggctgaaaattcaccagcgctttcattttgccagtgccctgaagcgaatgtccgtgcttgcctcgtatgagaagctgggctccaccgacctctgctacatcgcggccgtgaagggggcccccgaaactctgcactccatgttctcccagtgcccgcccgactaccaccacatccacaccgagatctcccgggaaggagcccgcgtcctggcgctggggtacaaggagctgggacacctcactcaccagcaggcccgggaggtcaagcgggaggccctggagtgcagcctcaagttcgtcggcttcattgtggtctcctgcccgctcaaggctgactccaaggccgtgatccgggagatccagaatgcgtcccaccgggtggtcatgatcacgggagacaacccgctcactgcatgccacgtggcccaggagctgcacttcattgaaaaggcccacacgctgatcctgcagcctccctccgagaaaggccggcagtgcgagtggcgctccattgacggcagcatcgtgctgcccctggcccggggctccccaaaggcactggccctggagtacgcactgtgcctcacaggcgacggcttggcccacctgcaggccaccgacccccagcagctgctccgcctcatcccccatgtgcaggtgttcgcccgtgtggctcccaagcagaaggagtttgtcatcaccagcctgaaggagctgggctacgtgaccctcatgtgtggggatggcaccaacgacgtgggcgccctgaagcatgctgacgtgggtgtggcgctcttggccaatgcccctgagcgggttgtcgagcggcgacggcggccccgggacagcccaaccctgagcaacagtggcatcagagccacctccaggacagccaagcagcggtcggggctccctccctccgaggagcagccaacctcccagagggaccgcctgagccaggtgctgcgagacctcgaggacgagagtacgcccattgtgaaactgggggatgccagcatcgcagcacccttcacctccaagctctcatccatccagtgcatctgccacgtgatcaagcagggccgctgcacgctggtgaccacgctacagatgttcaagatcctggcgctcaatgccctcatcctggcctacagccagagcgtcctctacctggagggagtcaagttcagtgacttccaggccaccctacaggggctgctgctggccggctgcttcctcttcatctcccgttccaagcccctcaagaccctctcccgagaacggcccctgcccaacatcttcaacctgtacaccatcctcaccgtcatgctccagttctttgtgcacttcctgagccttgtctacctgtaccgtgaggcccaggcccggagccccgagaagcaggagcagttcgtggacttgtacaaggagtttgagccaagcctggtcaacagcaccgtctacatcatggccatggccatgcagatggccaccttcgccatcaattacaaaggcccgcccttcatggagagcctgcccgagaacaagcccctggtgtggagtctggcagtttcactcctggccatcattggcctgctcctcggctcctcgcccgacttcaacagccagtttggcctcgtggacatccctgtggagttcaagctggtcattgcccaggtcctgctcctggacttctgcctggcgctcctggccgaccgcgtcctgcagttcttcctggggaccccgaagctgaaagtgccttcctgagatggcagtgctggtacccactgcccaccctggctgccgctgggcgggaaccccaacagggccccgggagggaaccctgcccccaaccccccacagcaaggctgtacagtctcgcccttggaagactgagctgggacccccacagccatccgctggcttggccagcagaaccagccccaagccagcacctttggtaaataaagcagcatctgagattttaaaaaaaaaannaaaaaaaaaaaaaaaaaaaaaaaaaaaaaaaaaaaaaacaaaaatatagcaaccaccatacgaacataaccaaaggggggggggcgcgctaaataataaatatcctcccctgggagggggcgccagaagcatatattactcgagacaacccccagccatgtttgtattcaacaagaggggcgcgctcccataattttaaggagcggcggattaataaaagaagcagacgacgagcagcgcgccatattaacaaacaacagctggtgtctgatgagagaaaaaccgtggccatcacggggaactacgtttttggtgagaagaaacccaccacccaacttatttggtgggggggcgacacgaacaacacattggggggcagacccaacgctctgccagacaaaagagttattaccctccctcggccggaggcattataacaacctgttgatggatggtatataatggtgtgtaaagcacccacgaccatgcaatatatgcgtccgctccagagcaaaaaagtttggaacgcacgaggcgttagtataacacagacgaattatatatcacagggcgggtatagtagaaaatagagggtg

SEQ ID NO: 343753 - DNA, 1243 bp, Homo sapiens
gggctgctcttgtgccaatgccctctgacgcgggattgtcgcagctgtgctgacgtgctggcccctggtgacatgcccaacccatgagcaacacgtgtgcatcatgatgcctacctccatgtgacatgccaatgcagctgtgtctggggctctcctccactcccgatgtgatgcatgccacaccttcccacgatgtggaccgcctgagccaggtgctgcgagacctcgaggacgagagtacgcccattgtgaaactgggggatgccagcatcgcagcacccttcacctccaagctctcatccatccagtgcatctgccacgtgatcaagcagggccgctgcacgctggtgaccacgctacagatgttcaagatcctggcgctcaatgccctcatcctggcctacagccagagcgtcctctacctggagggagtcaagttcagtgacttccaggccaccctacaggggctgctgctggccggctgcttcctcttcatctcccgttccaagcccctcaagaccctctcccgagaacggcccctgcccaacatcttcaacctgtacaccatcctcaccgtcatgctccagttctttgtgcacttcctgagccttgtctacctgtaccgtgaggcccaggcccggagccccgagaagcaggagcagttcgtggacttgtacaaggagtttgagccaagcctggtcaacagcaccgtctacatcatggccatggccatgcagatggccaccttcgccatcaattacaaaggcccgcccttcatggagagcctgcccgagaacaagcccctggtgtggagtctggcagtttcactcctggccatcattggcctgctcctcggctcctcgcccgacttcaacagccagtttggcctcgtggacatccctgtggagttcaagctggtcattgcccaggtcctgctcctggacttctgcctggcgctcctggccgaccgcgtcctgcagttcttcctggggaccccgaagctgaaagtgccttcctgagatggcagtgctggtacccactgcccaccctggctgccgctgggcgggaaccccaacagggccccgggagggaaccctgcccccaaccccccacagcaaggctgtacagtctcgcccttggaagactgagctgggacccccacagccatccgctggcttggccagcagaaccagccccaagccagcacctttggtaaataaagcagcatctgagattttaaaaa

SEQ ID NO: 343754 - DNA, 4167 bp, Homo sapiens
gaagctcccgaccccgcctccgcagggtccaggcttcgcccctggtgacaggtggtgctggtgtagtcaaggaggagggctcgctttttttggttcaggttgtcatggtggcgcccaagcccgccttgccggccttgtcttttccggtctcagtccggcgtggcagcggaggcaggcaccgttaggtcttccagtccctctctgtcatggcgacgcccagcctcttcttccggccacagcctgtcatggcggcacccgaagtagtccctgccggggccagcctgttctgttgccctggctcttcctagtccaggctgccatggcggcgctcagggcttaccggaagtaaaacttcggaagtgaggcgttcctctgcccggaagtgagcgcggcgctaggaaagatggcggcagcggcggcggtgggcaacgcggtgccctgcggggcccggccttgcggggtccggcctgacgggcagcccaagcccgggccgcagccgcgcgcgctccttgccgccgggccggcgctcatagcgaacggtgacgagctggtggctgccgtgtggccgtaccggcggttggcgctgttgcggcgcctcacggtgctgccattcgccgggctgctttacccggcctggttgggtgccgcagccgctggctgctggggctggggcagcagttgggtgcagatccccgaagctgcgctgctcgtgcttgccaccatctgcctcgcgcacgcgctcactgtcctctcggggcattggtctgtgcacgcgcattgcgcgctcacctgcaccccggagtacgaccccagcaaagcgacctttgtgaaggtggtgccaacccccaacaatggctccacggagctcgtggccctgcaccgcaatgagggcgaagacgggcttgaggtgctgtccttcgaattccagaagatcaagtattcctacgatgccctggagaagaagcagtttctccccgtggcctttcctgtgggaaacgccttctcatactatcagagcaacagaggcttccaggaagactcagagatccgagcagctgagaagaaatttgggagcaacaaggccgagatggtggtgcctgacttctcggagcttttcaaggagagagccacagcccccttctttgtatttcaggtgttctgtgtggggctctggtgcctggatgagtactggtactacagcgtctttacgctatccatgctggtggcgttcgaggcctcgctggtgcagcagcagatgcggaacatgtcggagatccggaagatgggcaacaagccccacatgatccaggtctaccgaagccgcaagtggaggcccattgccagtgatgagatcgtaccaggggacatcgtctccatcggccgctccccacaggagaacctggtgccatgtgacgtgcttctgctgcgaggccgctgcatcgtagacgaggccatgctcacgggggagtccgtgccacagatgaaggagcccatcgaagacctcagcccagaccgggtgctggacctccaggctgattcccggctgcacgtcatcttcgggggcaccaaggtggtgcagcacatccccccacagaaagccaccacgggcctgaagccggttgacagcgggtgcgtggcctacgtcctgcggaccggattcaacacatcccagggcaagctgctgcgcaccatcctcttcggggtcaagagggtgactgcgaacaacctggagaccttcatcttcatcctcttcctcctggtgtttgccatcgctgcagctgcctatgtatggattgaaggtaccaaggaccccagccggaaccgctacaagctgtttctggagtgcaccctgatcctcacctcggtcgtgcctcctgagctgcccatcgagctgtccctggccgtcaacacctccctcatcgccctggccaagctctacatgtactgcacagagcccttccggatcccctttgctggcaaggtcgaggtgtgctgctttgacaagacggggacgttgaccagtgacagcctggtggtgcgcggtgtggccgggctgagagacgggaaggaggtgaccccagtgtccagcatccctgtagaaacacaccgggccctggcctcgtgccactcgctcatgcagctggacgacggcaccctcgtgggtgaccctctagagaaggccatgctgacggccgtggactggacgctgaccaaagatgagaaagtattcccccgaagtattaaaactcaggggctgaaaattcaccagcgctttcattttgccagtgccctgaagcgaatgtccgtgcttgcctcgtatgagaagctgggctccaccgacctctgctacatcgcggccgtgaagggggcccccgaaactctgcactccatgttctcccagtgcccgcccgactaccaccacatccacaccgagatctcccgggaaggagcccgcgtcctggcgctggggtacaaggagctgggacacctcactcaccagcaggcccgggaggtcaagcgggaggccctggagtgcagcctcaagttcgtcggcttcattgtggtctcctgcccgctcaaggctgactccaaggccgtgatccgggagatccagaatgcgtcccaccgggtggtcatgatcacgggagacaacccgctcactgcatgccacgtggcccaggagctgcacttcattgaaaaggcccacacgctgatcctgcagcctccctccgagaaaggccggcagtgcgagtggcgctccattgacggcagcatcgtgctgcccctggcccggggctccccaaaggcactggccctggagtacgcactgtgcctcacaggcgacggcttggcccacctgcaggccaccgacccccagcagctgctccgcctcatcccccatgtgcaggtgttcgcccgtgtggctcccaagcagaaggagtttgtcatcaccagcctgaaggagctgggctacgtgaccctcatgtgtggggatggcaccaacgacgtgggcgccctgaagcatgctgacgtgggtgtggcgctcttggccaatgcccctgagcgggttgtcgagcggcgacggcggccccgggacagcccaaccctgagcaacagtggcatcagagccacctccaggacagccaagcagcggtcggggctccctccctccgaggagcagccaacctcccagagggaccgcctgagccaggtgctgcgagacctcgaggacgagagtacgcccattgtgaaactgggggatgccagcatcgcagcacccttcacctccaagctctcatccatccagtgcatctgccacgtgatcaagcagggccgctgcacgctggtgaccacgctacagatgttcaagatcctggcgctcaatgccctcatcctggcctacagccagagcgtcctctacctggagggagtcaagttcagtgacttccaggccaccctacaggggctgctgctggccggctgcttcctcttcatctcccgttccaagcccctcaagaccctctcccgagaacggcccctgcccaacatcttcaacctgtacaccatcctcaccgtcatgctccagttctttgtgcacttcctgagccttgtctacctgtaccgtgaggcccaggcccggagccccgagaagcaggagcagttcgtggacttgtacaaggagtttgagccaagcctggtcaacagcaccgtctacatcatggccatggccatgcagatggccaccttcgccatcaattacaaaggcccgcccttcatggagagcctgcccgagaacaagcccctggtgtggagtctggcagtttcactcctggccatcattggcctgctcctcggctcctcgcccgacttcaacagccagtttggcctcgtggacatccctgtggagttcaagctggtcattgcccaggtcctgctcctggacttctgcctggcgctcctggccgaccgcgtcctgcagttcttcctggggaccccgaagctgaaagtgccttcctgagatggcagtgctggtacccagcaaggctgtacagtctcgcccttggaagactgagctgggacccccacagccatccgctggcttggccagcagaaccagccccaagccagcacctttggtaaataaagcagcatctgagattttaaaaa

SEQ ID NO: 343755 - DNA, 4013 bp, Homo sapiens
gaagctcccgaccccgcctccgcagggtccaggcttcgcccctggtgacaggtggtgctggtgtagtcaaggaggagggctcgctttttttggttcaggttgtcatggtggcgcccaagcccgccttgccggccttgtcttttccggtctcagtccggcgtggcagcggaggcaggcaccgttaggtcttccagtccctctctgtcatggcgacgcccagcctcttcttccggccacagcctgtcatggcggcacccgaagtagtccctgccggggccagcctgttctgttgccctggctcttcctagtccaggctgccatggcggcgctcagggcttaccggaagtaaaacttcggaagtgaggcgttcctctgcccggaagtgagcgcggcgctaggaaagatggcggcagcggcggcggtgggcaacgcggtgccctgcggggcccggccttgcggggtccggcctgacgggcagcccaagcccgggccgcagccgcgcgcgctccttgccgccgggccggcgctcatagcgaacggtgacgagctggtggctgccgtgtggccgtaccggcggttggcgctgttgcggcgcctcacggtgctgccattcgccgggctgctttacccggcctggttgggtgccgcagccgctggctgctggggctggggcagcagttgggtgcagatccccgaagctgcgctgctcgtgcttgccaccatctgcctcgcgcacgcgctcactgtcctctcggggcattggtctgtgcacgcgcattgcgcgctcacctgcaccccggagtacgaccccagcaaagcgacctttgtgaaggtggtgccaacccccaacaatggctccacggagctcgtggccctgcaccgcaatgagggcgaagacgggcttgaggtgctgtccttcgaattccagaagatcaagtattcctacgatgccctggagaagaagcagtttctccccgtggcctttcctgtgggaaacgccttctcatactatcagagcaacagaggcttccaggaagactcagagatccgagcagctgagaagaaatttgggagcaacaaggccgagatggtggtgcctgacttctcggagcttttcaaggagagagccacagcccccttctttgtatttcaggtgttctgtgtggggctctggtgcctggatgagtactggtactacagcgtctttacgctatccatgctggtggcgttcgaggcctcgctggtgcagcagcagatgcggaacatgtcggagatccggaagatgggcaacaagccccacatgatccaggtctaccgaagccgcaagtggaggcccattgccagtgatgagatcgtaccaggggacatcgtctccatcggccgctccccacaggagaacctggtgccatgtgacgtgcttctgctgcgaggccgctgcatcgtagacgaggccatgctcacgggggagtccgtgccacagatgaaggagcccatcgaagacctcagcccagaccgggtgctggacctccaggctgattcccggctgcacgtcatcttcgggggcaccaaggtggtgcagcacatccccccacagaaagccaccacgggcctgaagccggttgacagcgggtgcgtggcctacgtcctgcggaccggattcaacacatcccagggcaagctgctgcgcaccatcctcttcggggtcaagagggtgactgcgaacaacctggagaccttcatcttcatcctcttcctcctggtgtttgccatcgctgcagctgcctatgtatggattgaaggtaccaaggaccccagccggaaccgctacaagctgtttctggagtgcaccctgatcctcacctcggtcgtgcctcctgagctgcccatcgagctgtccctggccgtcaacacctccctcatcgccctggccaagctctacatgtactgcacagagcccttccggatcccctttgctggcaaggtcgaggtgtgctgctttgacaagacggggacgttgaccagtgacagcctggtggtgcgcggtgtggccgggctgagagacgggaaggaggtgaccccagtgtccagcatccctgtagaaacacaccgggccctggcctcgtgccactcgctcatgcagctggacgacggcaccctcgtgggtgaccctctagagaaggccatgctgacggccgtggactggacgctgaccaaagatgagaaagtattcccccgaagtattaaaactcaggggctgaaaattcaccagcgctttcattttgccagtgccctgaagcgaatgtccgtgcttgcctcgtatgagaagctgggctccaccgacctctgctacatcgcggccgtgaagggggcccccgaaactctgcactccatgttctcccagtgcccgcccgactaccaccacatccacaccgagatctcccgggaaggagcccgcgtcctggcgctggggtacaaggagctgggacacctcactcaccagcaggcccgggaggtcaagcgggaggccctggagtgcagcctcaagttcgtcggcttcattgtggtctcctgcccgctcaaggctgactccaaggccgtgatccgggagatccagaatgcgtcccaccgggtggtcatgatcacgggagacaacccgctcactgcatgccacgtggcccaggagctgcacttcattgaaaaggcccacacgctgatcctgcagcctccctccgagaaaggccggcagtgcgagtggcgctccattgacggcagcatcgtgctgcccctggcccggggctccccaaaggcactggccctggagtacgcactgtgcctcacaggcgacggcttggcccacctgcaggccaccgacccccagcagctgctccgcctcatcccccatgtgcaggtgttcgcccgtgtggctcccaagcagaaggagtttgtcatcaccagcctgaaggagctgggctacgtgaccctcatgtgtggggatggcaccaacgacgtgggcgccctgaagcatgctgacgtgggtgtggcgctcttggccaatgcccctgagcgggttgtcgagcggcgacggcggccccgggacagcccaaccctgagcaacagtggcatcagagccacctccaggacagccaagcagcggtcggggctccctccctccgaggagcagccaacctcccagagggaccgcctgagccaggtgctgcgagacctcgaggacgagagtacgcccattgtgaaactgggggatgccagcatcgcagcacccttcacctccaagctctcatccatccagtgcatctgccacgtgatcaagcagggccgctgcacgctggtgaccacgctacagatgttcaagatcctggcgctcaatgccctcatcctggcctacagccagagcgtcctctacctggagggagtcaagttcagtgacttccaggccaccctacaggggctgctgctggccggctgcttcctcttcatctcccgttccaagcccctcaagaccctctcccgagaacggcccctgcccaacatcttcaacctgtacaccatcctcaccgtcatgctccagttctttgtgcacttcctgagccttgtctacctgtaccgtgaggcccaggcccggagccccgagaagcaggagcagttcgtggacttgtacaaggagtttgagccaagcctggtcaacagcaccgtctacatcatggccatggccatgcagatggccaccttcgccatcaattacaaagtaaggcctgggccctgcccaaacattcactgtctgcccacccagccccaccccgaagctgaaagtgccttcctgagatggcagtgctggtacccactgcccaccctggctgccgctgggcgggaaccccaacagggccccgggagggaaccctgcccccaaccccccacaccatccgctggcttggccagcagaaccagccccaagccagcacctttggtaaataaagcagcatctgagattttaaaaa

SEQ ID NO: 343756 - DNA, 2907 bp, Homo sapiens
gaagctcccgaccccgcctccgcagggtccaggcttcgcccctggtgacaggtggtgctggtgtagtcaaggaggagggctcgctttttttggttcaggttgtcatggtggcgcccaagcccgccttgccggccttgtcttttccggtctcagtccggcgtggcagcggaggcaggcaccgttaggtcttccagtccctctctgtcatggcgacgcccagcctcttcttccggccacagcctgtcatggcggcacccgaagtagtccctgccggggccagcctgttctgttgccctggctcttcctagtccaggctgccatggcggcgctcagggcttaccggaagtaaaacttcggaagtgaggcgttcctctgcccggaagtgagcgcggcgctaggaaagatggcggcagcggcggcggtgggcaacgcggtgccctgcggggcccggccttgcggggtccggcctgacgggcagcccaagcccgggccgcagccgcgcgcgctccttgccgccgggccggcgctcatagcgaacggtgacgagctggtggctgccgtgtggccgtaccggcggttggcgctgttgcggcgcctcacggtgctgccattcgccgggctgctttacccggcctggttgggtgccgcagccgctggctgctggggctggggcagcagttgggtgcagatccccgaagctgcgctgctcgtgcttgccaccatctgcctcgcgcacgcgctcactgtcctctcggggcattggtctgtgcacgcgcattgcgcgctcacctgcaccccggagtacgaccccagcaaagcgacctttgtgaaggtggtgccaacccccaacaatggctccacggagctcgtggccctgcaccgcaatgagggcgaagacgggcttgaggtgctgtccttcgaattccagaagatcaagtattcctacgatgccctggagaagaagcagtttctccccgtggcctttcctgtgggaaacgccttctcatactatcagagcaacagaggcttccaggaagactcagagatccgagcagctgagaagaaatttgggagcaacaaggccgagatggtggtgcctgacttctcggagcttttcaaggagagagccacagcccccttctttgtatttcaggtgttctgtgtggggctctggtgcctggatgagtactggtactacagcgtctttacgctatccatgctggtggcgttcgaggcctcgctggtgcagcagcagatgcggaacatgtcggagatccggaagatgggcaacaagccccacatgatccaggtctaccgaagccgcaagtggaggcccattgccagtgatgagatcgtaccaggggacatcgtctccatcggccgctccccacaggagaacctggtgccatgtgacgtgcttctgctgcgaggccgctgcatcgtagacgaggccatgctcacgggggagtccgtgccacagatgaaggagcccatcgaagacctcagcccagaccgggtgctggacctccaggctgattcccggctgcacgtcatcttcgggggcaccaaggtggtgcagcacatccccccacagaaagccaccacgggcctgaagccggttgacagcgggtgcgtggcctacgtcctgcggaccggattcaacacatcccagggcaagctgctgcgcaccatcctcttcggggtcaagagggtgactgcgaacaacctggagaccttcatcttcatcctcttcctcctggtgtttgccatcgctgcagctgcctatgtatggattgaaggtaccaaggaccccagccggaaccgctacaagctgtttctggagtgcaccctgatcctcacctcggtcgtgcctcctgagctgcccatcgagctgtccctggccgtcaacacctccctcatcgccctggccaagctctacatgtactgcacagagcccttccggatcccctttgctggcaaggtcgaggtgtgctgctttgacaagacggggacgttgaccagtgacagcctggtggtgcgcggtgtggccgggctgagagacgggaaggaggtgaccccagtgtccagcatccctgtagaaacacaccgggccctggcctcgtgccactcgctcatgcagctggacgacggcaccctcgtgggtgaccctctagagaaggccatgctgacggccgtggactggacgctgaccaaagatgagaaagtattcccccgaagtattaaaactcaggggctgaaaattcaccagcgctttcattttgccagtgccctgaagcgaatgtccgtgcttgcctcgtatgagaagctgggctccaccgacctctgctacatcgcggccgtgaagggggcccccgaaactctgcactccatgttctcccagtgcccgcccgactaccaccacatccacaccgagatctcccgggaaggagcccgcgtcctggcgctggggtacaaggagctgggacacctcactcaccagcaggtacgggcccaggctccccctgccttcaccatgtgcctggcccgtcagctcctccctgagtcacctcctgtgtcccacagtgccaggttgaatggttgtgattttgtcctccttgccccgcctccagcttctacctttggagactccaaatggcactcagtctgtccactgctgtggggacccacccagtcctggctcacgcagagcacacgcagggcttacctgccccagtcctggtgtgtccctagctctactcttttgccctggtcttgggcagggctaggtggcatcctcagccctctcacccatccatcctccacaaagcccaccctccgcctccaccaccggcacatctgccgcttggcttcttcctgggctctcgttctttctgcttgcaccctaca

SEQ ID NO: 343757 - DNA, 3485 bp, Homo sapiens
atggagaagtgggaggagctgaacagccatcagccaggagaggagtacgaccccagcaaagcgacctttgtgaaggtggtgccaacccccaacaatggctccacggagctcgtggccctgcaccgcaatgagggcgaagacgggcttgaggtgctgtccttcgaattccagaagatcaagtattcctacgatgccctggagaagaagcagtttctccccgtggcctttcctgtgggaaacgccttctcatactatcagagcaacagaggcttccaggaagactcagagatccgagcagctgagaagaaatttgggagcaacaaggccgagatggtggtgcctgacttctcggagcttttcaaggagagagccacagcccccttctttgtatttcaggtgttctgtgtggggctctggtgcctggatgagtactggtactacagcgtctttacgctatccatgctggtggcgttcgaggcctcgctggtgcagcagcagatgcggaacatgtcggagatccggaagatgggcaacaagccccacatgatccaggtctaccgaagccgcaagtggaggcccattgccagtgatgagatcgtaccaggggacatcgtctccatcggccgctccccacaggagaacctggtgccatgtgacgtgcttctgctgcgaggccgctgcatcgtagacgaggccatgctcacgggggagtccgtgccacagatgaaggagcccatcgaagacctcagcccagaccgggtgctggacctccaggctgattcccggctgcacgtcatcttcgggggcaccaaggtggtgcagcacatccccccacagaaagccaccacgggcctgaagccggttgacagcgggtgcgtggcctacgtcctgcggaccggattcaacacatcccagggcaagctgctgcgcaccatcctcttcggggtcaagagggtgactgcgaacaacctggagaccttcatcttcatcctcttcctcctggtgtttgccatcgctgcagctgcctatgtatggattgaaggtaccaaggaccccagccggaaccgctacaagctgtttctggagtgcaccctgatcctcacctcggtcgtgcctcctgagctgcccatcgagctgtccctggccgtcaacacctccctcatcgccctggccaagctctacatgtactgcacagagcccttccggatcccctttgctggcaaggtcgaggtgtgctgctttgacaagacggggacgttgaccagtgacagcctggtggtgcgcggtgtggccgggctgagagacgggaaggaggtgaccccagtgtccagcatccctgtagaaacacaccgggccctggcctcgtgccactcgctcatgcagctggacgacggcaccctcgtgggtgaccctctagagaaggccatgctgacggccgtggactggacgctgaccaaagatgagaaagtattcccccgaagtattaaaactcaggggctgaaaattcaccagcgctttcattttgccagtgccctgaagcgaatgtccgtgcttgcctcgtatgagaagctgggctccaccgacctctgctacatcgcggccgtgaagggggcccccgaaactctgcactccatgttctcccagtgcccgcccgactaccaccacatccacaccgagatctcccgggaaggagcccgcgtcctggcgctggggtacaaggagctgggacacctcactcaccagcaggcccgggaggtcaagcgggaggccctggagtgcagcctcaagttcgtcggcttcattgtggtctcctgcccgctcaaggctgactccaaggccgtgatccgggagatccagaatgcgtcccaccgggtggtcatgatcacgggagacaacccgctcactgcatgccacgtggcccaggagctgcacttcattgaaaaggcccacacgctgatcctgcagcctccctccgagaaaggccggcagtgcgagtggcgctccattgacggcagcatcgtgctgcccctggcccggggctccccaaaggcactggccctggagtacgcactgtgcctcacaggcgacggcttggcccacctgcaggccaccgacccccagcagctgctccgcctcatcccccatgtgcaggtgttcgcccgtgtggctcccaagcagaaggagtttgtcatcaccagcctgaaggagctgggctacgtgaccctcatgtgtggggatggcaccaacgacgtgggcgccctgaagcatgctgacgtgggtgtggcgctcttggccaatgcccctgagcgggttgtcgagcggcgacggcggccccgggacagcccaaccctgagcaacagtggcatcagagccacctccaggacagccaagcagcggtcggggctccctccctccgaggagcagccaacctcccagagggaccgcctgagccaggtgctgcgagacctcgaggacgagagtacgcccattgtgaaactgggggatgccagcatcgcagcacccttcacctccaagctctcatccatccagtgcatctgccacgtgatcaagcagggccgctgcacgctggtgaccacgctacagatgttcaagatcctggcgctcaatgccctcatcctggcctacagccagagcgtcctctacctggagggagtcaagttcagtgacttccaggccaccctacaggggctgctgctggccggctgcttcctcttcatctcccgttccaagcccctcaagaccctctcccgagaacggcccctgcccaacatcttcaacctgtacaccatcctcaccgtcatgctccagttctttgtgcacttcctgagccttgtctacctgtaccgtgaggcccaggcccggagccccgagaagcaggagcagttcgtggacttgtacaaggagtttgagccaagcctggtcaacagcaccgtctacatcatggccatggccatgcagatggccaccttcgccatcaattacaaaggcccgcccttcatggagagcctgcccgagaacaagcccctggtgtggagtctggcagtttcactcctggccatcattggcctgctcctcggctcctcgcccgacttcaacagccagtttggcctcgtggacatccctgtggagttcaagctggtcattgcccaggtcctgctcctggacttctgcctggcgctcctggccgaccgcgtcctgcagttcttcctggggaccccgaagctgaaagtgccttcctgagatggcagtgctggtacccactgcccaccctggctgccgctgggcgggaaccccaacagggccccgggagggaaccctgcccccaaccccccacagcaaggctgtacagtctcgcccttggaagactgagctgggacccccacagccatccgctggcttggccagcagaaccagccccaagccagcacctttggtaaataaagcagcatctgagattttaaaaa

SEQ ID NO: 343758 - DNA, 771 bp, Homo sapiens
ctcccgggggggtcttggaactgtaggttgagaagagctaagccacaatgctttctttgtctctgtcaggagtacgaccccagcaaagcgacctttgtgaaggtggtgccaacccccaacaatggctccacggagctcgtggccctgcaccgcaatgagggcgaagacgggcttgaggtgctgtccttcgaattccagaagatcaagtattcctacgatgccctggagaagaagcagtttctccccgtggcctttcctgtgggaaacgccttctcatactatcagagcaacagaggcttccaggaagactcagagatccgagcagctgagaagaaatttgggagcaacaagtgagtccttgatttgcctgtagcacctttgcctttctgtcctgctcccctcctgattcagggtgcctaggaagcgggacagaggcatctgcccttttatttatttatttactattattttatttttattttattttttatttttgagactgagtctcgctctgtcacccaggctggagtgcagtgacgcgatctcagctcaccccaacctccgcctccccggttcaagtgattctcctgcctcaacctgccaagcagctgggaatacaggctccccccaccacgcctggctaatttttgtatttttagtagagatgggggtttcaccatgttggccaggctggtcttgaactcctgacctcaggtgatcctcccatgttggcctcccaaagtgctgggattacaggcgtgagccactgca

SEQ ID NO: 343759 - DNA, 4172 bp, Homo sapiens
gaagctcccgaccccgcctccgcagggtccaggcttcgcccctggtgacaggtggtgctggtgtagtcaaggaggagggctcgctttttttggttcaggttgtcatggtggcgcccaagcccgccttgccggccttgtcttttccggtctcagtccggcgtggcagcggaggcaggcaccgttaggtcttccagtccctctctgtcatggcgacgcccagcctcttcttccggccacagcctgtcatggcggcacccgaagtagtccctgccggggccagcctgttctgttgccctggctcttcctagtccaggctgccatggcggcgctcagggcttaccggaagtaaaacttcggaagtgaggcgttcctctgcccggaagtgagcgcggcgctaggaaagatggcggcagcggcggcggtgggcaacgcggtgccctgcggggcccggccttgcggggtccggcctgacgggcagcccaagcccgggccgcagccgcgcgcgctccttgccgccgggccggcgctcatagcgaacggtgacgagctggtggctgccgtgtggccgtaccggcggttggcgctgttgcggcgcctcacggtgctgccattcgccgggctgctttacccggcctggttgggtgccgcagccgctggctgctggggctggggcagcagttgggtgcagatccccgaagctgcgctgctcgtgcttgccaccatctgcctcgcgcacgcgctcactgtcctctcggggcattggtctgtgcacgcgcattgcgcgctcacctgcaccccggagtacgaccccagcaaagcgacctttgtgaaggtggtgccaacccccaacaatggctccacggagctcgtggccctgcaccgcaatgagggcgaagacgggcttgaggtgctgtccttcgaattccagaagatcaagtattcctacgatgccctggagaagaagcagtttctccccgtggcctttcctgtgggaaacgccttctcatactatcagagcaacagaggcttccaggaagactcagagatccgagcagctgagaagaaatttgggagcaacaaggccgagatggtggtgcctgacttctcggagcttttcaaggagagagccacagcccccttctttgtatttcaggtgttctgtgtggggctctggtgcctggatgagtactggtactacagcgtctttacgctatccatgctggtggcgttcgaggcctcgctggtgcagcagcagatgcggaacatgtcggagatccggaagatgggcaacaagccccacatgatccaggtctaccgaagccgcaagtggaggcccattgccagtgatgagatcgtaccaggggacatcgtctccatcggccgctccccacaggagaacctggtgccatgtgacgtgcttctgctgcgaggccgctgcatcgtagacgaggccatgctcacgggggagtccgtgccacagatgaaggagcccatcgaagacctcagcccagaccgggtgctggacctccaggctgattcccggctgcacgtcatcttcgggggcaccaaggtggtgcagcacatccccccacagaaagccaccacgggcctgaagccggttgacagcgggtgcgtggcctacgtcctgcggaccggattcaacacatcccagggcaagctgctgcgcaccatcctcttcggggtcaagagggtgactgcgaacaacctggagaccttcatcttcatcctcttcctcctggtgtttgccatcgctgcagctgcctatgtatggattgaaggtaccaaggaccccagccggaaccgctacaagctgtttctggagtgcaccctgatcctcacctcggtcgtgcctcctgagctgcccatcgagctgtccctggccgtcaacacctccctcatcgccctggccaagctctacatgtactgcacagagcccttccggatcccctttgctggcaaggtcgaggtgtgctgctttgacaagacggggacgttgaccagtgacagcctggtggtgcgcggtgtggccgggctgagagacgggaaggaggtgaccccagtgtccagcatccctgtagaaacacaccgggccctggcctcgtgccactcgctcatgcagctggacgacggcaccctcgtgggtgaccctctagagaaggccatgctgacggccgtggactggacgctgaccaaagtgccctgaagcgaatgtccgtgcttgcctcgtatgagaagctgggctccaccgacctctgctacatcgcggccgtgaagggggcccccgaaactctgcactccatgttctcccagtgcccgcccgactaccaccacatccacaccgagatctcccgggaaggagcccgcgtcctggcgctggggtacaaggagctgggacacctcactcaccagcaggcccgggaggtcaagcgggaggccctggagtgcagcctcaagttcgtcggcttcattgtggtctcctgcccgctcaaggctgactccaaggccgtgatccgggagatccagaatgcgtcccaccgggtggtcatgatcacgggagacaacccgctcactgcatgccacgtggcccaggagctgcacttcattgaaaaggcccacacgctgatcctgcagcctccctccgagaaaggccggcagtgcgagtggcgctccattgacggcagcatcgtgctgcccctggcccggggctccccaaaggcactggccctggagtacgcactgtgcctcacaggcgacggcttggcccacctgcaggccaccgacccccagcagctgctccgcctcatcccccatgtgcaggtgttcgcccgtgtggctcccaagcagaaggagtttgtcatcaccagcctgaaggagctgggctacgtgaccctcatgtgtggggatggcaccaacgacgtgggcgccctgaagcatgctgacgtgggtgtggcgctcttggccaatgcccctgagcgggttgtcgagcggcgacggcggccccgggacagcccaaccctgagcaacagtggcatcagagccacctccaggacagccaagcagcggtcggggctccctccctccgaggagcagccaacctcccagagggaccgcctgagccaggtgctgcgagacctcgaggacgagagtacgcccattgtgaaactgggggatgccagcatcgcagcacccttcacctccaagctctcatccatccagtgcatctgccacgtgatcaagcagggccgctgcacgctggtgaccacgctacagatgttcaagatcctggcgctcaatgccctcatcctggcctacagccagagcgtcctctacctggagggagtcaagttcagtgacttccaggccaccctacaggggctgctgctggccggctgcttcctcttcatctcccgttccaagcccctcaagaccctctcccgagaacggcccctgcccaacatcttcaacctgtacaccatcctcaccgtcatgctccagttctttgtgcacttcctgagccttgtctacctgtaccgtgaggcccaggcccggagccccgagaagcaggagcagttcgtggacttgtacaaggagtttgagccaagcctggtcaacagcaccgtctacatcatggccatggccatgcagatggccaccttcgccatcaattacaaaggcccgcccttcatggagagcctgcccgagaacaagcccctggtgtggagtctggcagtttcactcctggccatcattggcctgctcctcggctcctcgcccgacttcaacagccagtttggcctcgtggacatccctgtggagttcaagctggtcattgcccaggtcctgctcctggacttctgcctggcgctcctggccgaccgcgtcctgcagttcttcctggggaccccgaagctgaaagtgccttcctgagatggcagtgctggtacccactgcccaccctggctgccgctgggcgggaaccccaacagggccccgggagggaaccctgcccccaaccccccacagcaaggctgtacagtctcgcccttggaagactgagctgggacccccacagccatccgctggcttggccagcagaaccagccccaagccagcacctttggtaaataaagcagcatctgagattttaaaaa

SEQ ID NO: 343760 - DNA, 4325 bp, Homo sapiens
gaagctcccgaccccgcctccgcagggtccaggcttcgcccctggtgacaggtggtgctggtgtagtcaaggaggagggctcgctttttttggttcaggttgtcatggtggcgcccaagcccgccttgccggccttgtcttttccggtctcagtccggcgtggcagcggaggcaggcaccgttaggtcttccagtccctctctgtcatggcgacgcccagcctcttcttccggccacagcctgtcatggcggcacccgaagtagtccctgccggggccagcctgttctgttgccctggctcttcctagtccaggctgccatggcggcgctcagggcttaccggaagtaaaacttcggaagtgaggcgttcctctgcccggaagtgagcgcggcgctaggaaagatggcggcagcggcggcggtgggcaacgcggtgccctgcggggcccggccttgcggggtccggcctgacgggcagcccaagcccgggccgcagccgcgcgcgctccttgccgccgggccggcgctcatagcgaacggtgacgagctggtggctgccgtgtggccgtaccggcggttggcgctgttgcggcgcctcacggtgctgccattcgccgggctgctttacccggcctggttgggtgccgcagccgctggctgctggggctggggcagcagttgggtgcagatccccgaagctgcgctgctcgtgcttgccaccatctgcctcgcgcacgcgctcactgtcctctcggggcattggtctgtgcacgcgcattgcgcgctcacctgcaccccggagtacgaccccagcaaagcgacctttgtgaaggtggtgccaacccccaacaatggctccacggagctcgtggccctgcaccgcaatgagggcgaagacgggcttgaggtgctgtccttcgaattccagaagatcaagtattcctacgatgccctggagaagaagcagtttctccccgtggcctttcctgtgggaaacgccttctcatactatcagagcaacagaggcttccaggaagactcagagatccgagcagctgagaagaaatttgggagcaacaaggccgagatggtggtgcctgacttctcggagcttttcaaggagagagccacagcccccttctttgtatttcaggtgttctgtgtggggctctggtgcctggatgagtactggtactacagcgtctttacgctatccatgctggtggcgttcgaggcctcgctggtgcagcagcagatgcggaacatgtcggagatccggaagatgggcaacaagccccacatgatccaggtctaccgaagccgcaagtggaggcccattgccagtgatgagatcgtaccaggggacatcgtctccatcggccgctccccacaggagaacctggtgccatgtgacgtgcttctgctgcgaggccgctgcatcgtagacgaggccatgctcacgggggagtccgtgccacagatgaaggagcccatcgaagacctcagcccagaccgggtgctggacctccaggctgattcccggctgcacgtcatcttcgggggcaccaaggtggtgcagcacatccccccacagaaagccaccacgggcctgaagccggttgacagcgggtgcgtggcctacgtcctgcggaccggattcaacacatcccagggcaagctgctgcgcaccatcctcttcggggtcaagagggtgactgcgaacaacctggagaccttcatcttcatcctcttcctcctggtgtttgccatcgctgcagctgcctatgtatggattgaaggtaccaaggaccccagccggaaccgctacaagctgtttctggagtgcaccctgatcctcacctcggtcgtgcctcctgagctgcccatcgagctgtccctggccgtcaacacctccctcatcgccctggccaagctctacatgtactgcacagagcccttccggatcccctttgctggcaaggtcgaggtgtgctgctttgacaagacggggacgttgaccagtgacagcctggtggtgcgcggtgtggccgggctgagagacgggaaggaggtgaccccagtgtccagcatccctgtagaaacacaccgggccctggcctcgtgccactcgctcatgcagctggacgacggcaccctcgtgggtgaccctctagagaaggccatgctgacggccgtggactggacgctgaccaaagatgagaaagtattcccccgaagtattaaaactcaggggctgaaaattcaccagcgctttcattttgccagtgccctgaagcgaatgtccgtgcttgcctcgtatgagaagctgggctccaccgacctctgctacatcgcggccgtgaagggggcccccgaaactctgcactccatgttctcccagtgcccgcccgactaccaccacatccacaccgagatctcccgggaaggagcccgcgtcctggcgctggggtacaaggagctgggacacctcactcaccagcaggcccgggaggtcaagcgggaggccctggagtgcagcctcaagttcgtcggcttcattgtggtctcctgcccgctcaaggctgactccaaggccgtgatccgggagatccagaatgcgtcccaccgggtggtcatgatcacgggagacaacccgctcactgcatgccacgtggcccaggagctgcacttcattgaaaaggcccacacgctgatcctgcagcctccctccgagaaaggccggcagtgcgagtggcgctccattgacggcagcatcgtgctgcccctggcccggggctccccaaaggcactggccctggagtacgcactgtgcctcacaggcgacggcttggcccacctgcaggccaccgacccccagcagctgctccgcctcatcccccatgtgcaggtgttcgcccgtgtggctcccaagcagaaggagtttgtcatcaccagcctgaaggagctgggctacgtgaccctcatgtgtggggatggcaccaacgacgtgggcgccctgaagcatgctgacgtgggtgtggcgctcttggccaatgcccctgagcgggttgtcgagcggcgacggcggccccgggacagcccaaccctgagcaacagtggcatcagagccacctccaggacagccaagcagcggtcggggctccctccctccgaggagcagccaacctcccagagggaccgcctgagccaggtgctgcgagacctcgaggacgagagtacgcccattgtgaaactgggggatgccagcatcgcagcacccttcacctccaagctctcatccatccagtgcatctgccacgtgatcaagcagggccgctgcacgctggtgaccacgctacagatgttcaagatcctggcgctcaatgccctcatcctggcctacagccagagcgtcctctacctggagggagtcaagttcagtgacttccaggccaccctacaggggctgctgctggccggctgcttcctcttcatctcccgttccaagcccctcaagaccctctcccgagaacggcccctgcccaacatcttcaacctgtacaccatcctcaccgtcatgctccagttctttgtgcacttcctgagccttgtctacctgtaccgtgaggcccaggcccggagccccgagaagcaggagcagttcgtggacttgtacaaggagtttgagccaagcctggtcaacagcaccgtctacatcatggccatggccatgcagatggccaccttcgccatcaattacaaagtaaggcctgggccctgcccaaacattcactgtctgcccacccagccccaccccatgaagccatctgtccctcatccccacagggcccgcccttcatggagagcctgcccgagaacaagcccctggtgtggagtctggcagtttcactcctggccatcattggcctgctcctcggctcctcgcccgacttcaacagccagtttggcctcgtggacatccctgtggagttcaagctggtcattgcccaggtcctgctcctggacttctgcctggcgctcctggccgaccgcgtcctgcagttcttcctggggaccccgaagctgaaagtgccttcctgagatggcagtgctggtacccactgcccaccctggctgccgctgggcgggaaccccaacagggccccgggagggaaccctgcccccaaccccccacagcaaggctgtacagtctcgcccttggaagactgagctgggacccccacagccatccgctggcttggccagcagaaccagccccaagccagcacctttggtaaataaagcagcatctgagattttaaaaa

SEQ ID NO: 343761 - DNA, 4221 bp, Homo sapiens
gaagctcccgaccccgcctccgcagggtccaggcttcgcccctggtgacaggtggtgctggtgtagtcaaggaggagggctcgctttttttggttcaggttgtcatggtggcgcccaagcccgccttgccggccttgtcttttccggtctcagtccggcgtggcagcggaggcaggcaccgttaggtcttccagtccctctctgtcatggcgacgcccagcctcttcttccggccacagcctgtcatggcggcacccgaagtagtccctgccggggccagcctgttctgttgccctggctcttcctagtccaggctgccatggcggcgctcagggcttaccggaagtaaaacttcggaagtgaggcgttcctctgcccggaagtgagcgcggcgctaggaaagatggcggcagcggcggcggtgggcaacgcggtgccctgcggggcccggccttgcggggtccggcctgacgggcagcccaagcccgggccgcagccgcgcgcgctccttgccgccgggccggcgctcatagcgaacggtgacgagctggtggctgccgtgtggccgtaccggcggttggcgctgttgcggcgcctcacggtgctgccattcgccgggctgctttacccggcctggttgggtgccgcagccgctggctgctggggctggggcagcagttgggtgcagatccccgaagctgcgctgctcgtgcttgccaccatctgcctcgcgcacgcgctcactgtcctctcggggcattggtctgtgcacgcgcattgcgcgctcacctgcaccccggagtacgaccccagcaaagcgacctttgtgaaggtggtgccaacccccaacaatggctccacggagctcgtggccctgcaccgcaatgagggcgaagacgggcttgaggtgctgtccttcgaattccagaagatcaagtattcctacgatgccctggagaagaagcagtttctccccgtggcctttcctgtgggaaacgccttctcatactatcagagcaacagaggcttccaggaagactcagagatccgagcagctgagaagaaatttgggagcaacaaggccgagatggtggtgcctgacttctcggagcttttcaaggagagagccacagcccccttctttgtatttcaggtgttctgtgtggggctctggtgcctggatgagtactggtactacagcgtctttacgctatccatgctggtggcgttcgaggcctcgctggtgcagcagcagatgcggaacatgtcggagatccggaagatgggcaacaagccccacatgatccaggtctaccgaagccgcaagtggaggcccattgccagtgatgagatcgtaccaggggacatcgtctccatcggccgctccccacaggagaacctggtgccatgtgacgtgcttctgctgcgaggccgctgcatcgtagacgaggccatgctcacgggggagtccgtgccacagatgaaggagcccatcgaagacctcagcccagaccgggtgctggacctccaggctgattcccggctgcacgtcatcttcgggggcaccaaggtggtgcagcacatccccccacagaaagccaccacgggcctgaagccggttgacagcgggtgcgtggcctacgtcctgcggaccggattcaacacatcccagggcaagctgctgcgcaccatcctcttcggggtcaagagggtgactgcgaacaacctggagaccttcatcttcatcctcttcctcctggtgtttgccatcgctgcagctgcctatgtatggattgaaggtaccaaggaccccagccggaaccgctacaagctgtttctggagtgcaccctgatcctcacctcggtcgtgcctcctgagctgcccatcgagctgtccctggccgtcaacacctccctcatcgccctggccaagctctacatgtactgcacagagcccttccggatcccctttgctggcaaggtcgaggtgtgctgctttgacaagacggggacgttgaccagtgacagcctggtggtgcgcggtgtggccgggctgagagacgggaaggaggtgaccccagtgtccagcatccctgtagaaacacaccgggccctggcctcgtgccactcgctcatgcagctggacgacggcaccctcgtgggtgaccctctagagaaggccatgctgacggccgtggactggacgctgaccaaagatgagaaagtattcccccgaagtattaaaactcaggggctgaaaattcaccagcgctttcattttgccagtgccctgaagcgaatgtccgtgcttgcctcgtatgagaagctgggctccaccgacctctgctacatcgcggccgtgaagggggcccccgaaactctgcactccatgttctcccagtgcccgcccgactaccaccacatccacaccgagatctcccgggaaggagcccgcgtcctggcgctggggtacaaggagctgggacacctcactcaccagcaggcccgggaggtcaagcgggaggccctggagtgcagcctcaagttcgtcggcttcattgtggtctcctgcccgctcaaggctgactccaaggccgtgatccgggagatccagaatgcgtcccaccgggtggtcatgatcacgggagacaacccgctcactgcatgccacgtggcccaggagctgcacttcattgaaaaggcccacacgctgatcctgcagcctccctccgagaaaggccggcagtgcgagtggcgctccattgacggcagcatcgtgctgcccctggcccggggctccccaaaggcactggccctggagtacgcactgtgcctcacaggcgacggcttggcccacctgcaggccaccgacccccagcagctgctccgcctcatcccccatgtgcaggtgttcgcccgtgtggctcccaagcagaaggagtttgtcatcaccagcctgaaggagctgggctacgtgaccctcatgtgtggggatggcaccaacgacgtgggcgccctgaagcatgctgacgtgggtgtggcgctcttggccaatgcccctgagcgggttgtcgagcggcgacggcggccccgggacagcccaaccctgagcaacagtggcatcagagccacctccaggacagccaagcagcggtcggggctccctccctccgaggagcagccaacctcccagagggaccgcctgagccaggtgctgcgagacctcgaggacgagagtacgcccattgtgaaactgggggatgccagcatcgcagcacccttcacctccaagctctcatccatccagtgcatctgccacgtgatcaagcagggccgctgcacgctggtgaccacgctacagatgttcaagatcctggcgctcaatgccctcatcctggcctacagccagagcgtcctctacctggagggagtcaagttcagtgacttccaggccaccctacaggggctgctgctggccggctgcttcctcttcatctcccgttccaagcccctcaagaccctctcccgagaacggcccctgcccaacatcttcaacctgtacaccatcctcaccgtcatgctccagttctttgtgcacttcctgagccttgtctacctgtaccgtgaggcccaggcccggagccccgagaagcaggagcagttcgtggacttgtacaaggagtttgagccaagcctggtcaacagcaccgtctacatcatggccatggccatgcagatggccaccttcgccatcaattacaaaggcccgcccttcatggagagcctgcccgagaacaagcccctggtgtggagtctggcagtttcactcctggccatcattggcctgctcctcggctcctcgcccgacttcaacagccagtttggcctcgtggacatccctgtggaggtcctgctcctggacttctgcctggcgctcctggccgaccgcgtcctgcagttcttcctggggaccccgaagctgaaagtgccttcctgagatggcagtgctggtacccactgcccaccctggctgccgctgggcgggaaccccaacagggccccgggagggaaccctgcccccaaccccccacagcaaggctgtacagtctcgcccttggaagactgagctgggacccccacagccatccgctggcttggccagcagaaccagccccaagccagcacctttggtaaataaagcagcatctgagattttaaaaa

SEQ ID NO: 343762 - DNA, 789 bp, Homo sapiens
agggtggccccaagtgagccagatcctgactcccccacccgccttgctgctgcagcccctcaagaccctctcccgagaacggcccctgcccaacatcttcaacctgtacaccatcctcaccgtcatgctccagttctttgtgcacttcctgagccttgtctacctgtaccgtgaggcccaggcccggagccccgagaagcaggagcagttcgtggacttgtacaaggagtttgagccaagcctggtcaacagcaccgtctacatcatggccatggccatgcagatggccaccttcgccatcaattacaaaggcccgcccttcatggagagcctgcccgagaacaagcccctggtgtggagtctggcagtttcactcctggccatcattggcctgctcctcggctcctcgcccgacttcaacagccagtttggcctcgtggacatccctgtggagttcaagctggtcattgcccaggtcctgctcctggacttctgcctggcgctcctggccgaccgcgtcctgcagttcttcctggggaccccgaagctgaaagtgccttcctgagatggcagtgctggtacccactgcccaccctggctgccgctgggcgggaaccccaacagggccccgggagggaaccctgcccccaaccccccacagcaaggctgtacagtctcgcccttggaagactgagctgggacccccacagccatccgctggcttggccagcagaaccagccccaagccagcacctttggtaaataaagcagcatctgagattttaaaaa

SEQ ID NO: 343763 - DNA, 2955 bp, Homo sapiens
gaagctcccgaccccgcctccgcagggtccaggcttcgcccctggtgacaggtggtgctggtgtagtcaaggaggagggctcgctttttttggttcaggttgtcatggtggcgcccaagcccgccttgccggccttgtcttttccggtctcagtccggcgtggcagcggaggcaggcaccgttaggtcttccagtccctctctgtcatggcgacgcccagcctcttcttccggccacagcctgtcatggcggcacccgaagtagtccctgccggggccagcctgttctgttgccctggctcttcctagtccaggctgccatggcggcgctcagggcttaccggaagtaaaacttcggaagtgaggcgttcctctgcccggaagtgagcgcggcgctaggaaagatggcggcagcggcggcggtgggcaacgcggtgccctgcggggcccggccttgcggggtccggcctgacgggcagcccaagcccgggccgcagccgcgcgcgctccttgccgccgggccggcgctcatagcgaacggtgacgagctggtggctgccgtgtggccgtaccggcggttggcgctgttgcggcgcctcacggtgctgccattcgccgggctgctttacccggcctggttgggtgccgcagccgctggctgctggggctggggcagcagttgggtgcagatccccgaagctgcgctgctcgtgcttgccaccatctgcctcgcgcacgcgctcactgtcctctcggggcattggtctgtgcacgcgcattgcgcgctcacctgcaccccggagtacgaccccagcaaagcgacctttgtgaaggtggtgccaacccccaacaatggctccacggagctcgtggccctgcaccgcaatgagggcgaagacgggcttgaggtgctgtccttcgaattccagaagatcaagtattcctacgatgccctggagaagaagcagtttctccccgtggcctttcctgtgggaaacgccttctcatactatcagagcaacagaggcttccaggaagactcagagatccgagcagctgagaagaaatttgggagcaacaaggccgagatggtggtgcctgacttctcggagcttttcaaggagagagccacagcccccttctttgtatttcaggtgttctgtgtggggctctggtgcctggatgagtactggtactacagcgtctttacgctatccatgctggtggcgttcgaggcctcgctggtgcagcagcagatgcggaacatgtcggagatccggaagatgggcaacaagccccacatgatccaggtctaccgaagccgcaagtggaggcccattgccagtgatgagatcgtaccaggggacatcgtctccatcggccgctccccacaggagaacctggtgccatgtgacgtgcttctgctgcgaggccgctgcatcgtagacgaggccatgctcacgggggagtccgtgccacagatgaaggagcccatcgaagacctcagcccagaccgggtgctggacctccaggctgattcccggctgcacgtcatcttcgggggcaccaaggtggtgcagcacatccccccacagaaagccaccacgggcctgaagccggttgacagcgggtgcgtggcctacgtcctgcggaccggattcaacacatcccagggcaagctgctgcgcaccatcctcttcggggtcaagagggtgactgcgaacaacctggagaccttcatcttcatcctcttcctcctggtgtttgccatcgctgcagctgcctatgtatggattgaaggtaccaaggaccccagccggaaccgctacaagctgtttctggagtgcaccctgatcctcacctcggtcgtgcctcctgagctgcccatcgagctgtccctggccgtcaacacctccctcatcgccctggccaagctctacatgtactgcacagagcccttccggatcccctttgctggcaaggtcgaggtgtgctgctttgacaagacggggacgttgaccagtgacagcctggtggtgcgcggtgtggccgggctgagagacgggaaggaggtgaccccagtgtccagcatccctgtagaaacacaccgggccctggcctcgtgccactcgctcatgcagctggacgacggcaccctcgtgggtgaccctctagagaaggccatgctgacggccgtggactggacgctgaccaaagatgagaaagtattcccccgaagtattaaaactcaggggctgaaaattcaccagcgctttcattttgccagtgccctgaagcgaatgtccgtgcttgcctcgtatgagaagctgggctccaccgacctctgctacatcgcggccgtgaagggggcccccgaaactctgcactccatgttctcccagtgcccgcccgactaccaccacatccacaccgagatctcccgggaaggagcccgcgtcctggcgctggggtacaaggagctgggacacctcactcaccagcaggcccgggaggtcaagcgggaggccctggagtgcagcctcaagttcgtcggcttcattgtggtctcctgcccgctcaaggctgactccaaggccgtgatccgggagatccagaatgcgtcccaccgggtggtcatgatcacgggagacaacccgctcactgcatgccacgtggccgaccgcgtcctgcagttcttcctggggaccccgaagctgaaagtgccttcctgagatggcagtgctggtacccactgcccaccctggctgccgctgggcgggaaccccaacagggccccgggagggaaccctgcccccaaccccccacagcaaggctgtacagtctcgcccttggaagactgagctgggacccccacagccatccgctggcttggccagcagaaccagccccaagccagcacctttggtaaataaagcagcatctgagattttaaaaa

SEQ ID NO: 343764 - DNA, 234 bp, Homo sapiens
ctctcataaatttcatggcaacaggaactgagtggctttgaaactccagctgctggtgggctcgatatgaggtctgttccaaaacctggaacatttgcttttcctatcgtcagccccaagtgctactcagacttggtgtctggaggagatgggccagagtcctgggggccagtgccagtccttctctgccctcagctggcacatcttggggagactttctttggatattccctg

SEQ ID NO: 343765 - DNA, 321 bp, Homo sapiens
gaacactaatttgttgtagtcaaattatttgaaaatgtactattattataaaacaaatagtttaattaaaagaatggttaattcaaatacttcatttcctgaccatgtcgtatgtctgaacttaatatacacaaaaatgtgaagaaaaagatttagggagcaacagagtaaatcaaaaggattgcacagaggtttttaagatttactttcaaaagctagttccctcaagtgttagtttataaaccattaactatttgacaggttggagacaatcacacctggaacccgaatctagacatataaagaacagatacattctat

SEQ ID NO: 343766 - DNA, 206 bp, Homo sapiens
gggaactaaggcgtggaacttaggtttttgatcagtgtaggatttaatgtctttcactaaaaaggacaaaagtacaacccctgttggctccgagtctcccaagcagcagccctgtttctcactccttctcgaaagtgcagtgtgcactcccccgccatccccgcctctgccccttctgctctcgccctggcctctgtgcccactgt

SEQ ID NO: 343767 - DNA, 601 bp, Homo sapiens
aaaaaaaaaaaacactgggctcaagcagtctgcctgcctcagcttcccaaggagctgggattataggtgtgagccaccacacccagccaattttttttaaattaaaaaataaatctagcatagctctggaaatgatcaaatgtgtagggaagaaaatgcacatgtgtaaatgtgtccatttattttaattctaatgctaggctaaatgctttattatgcatgttatgatttaatccttatgacaactcttcaatattatttctctcatttttttgaggaaacaggagtgtcaactttatgcattctcatggctagtacatggcagctgaaattcaaaaccaagtctgtttcactcatttattcattgagtaaatttttaactgaaattcctctgctctttcaaccataatgcgttatcaatttggaggaattttttttttcatgtttatgcaaagcttcgtaacaacaataagagacttggggcacacaaagacaaaggtacatccacaaaagtagaacattggatacttagcatattaggtgtagcttaatgtagtctggatatgattaggcttaatctgtgtacatctttacttaccag

SEQ ID NO: 343768 - DNA, 359 bp, Homo sapiens
ccctctggcattgtgcacacccactggaagtgggctgttcttgcatttcacacaaaggcagcatatgggctagtgaagatactcggaaattcagtgatagcatccccagtttacagttgaagaaattgaactttgaacctaagagagtttgccaacttgcccagcccagatagtaaagtgatgaaagtggggtggaagccaagacctgccagaagtccaaaatctgtgttctttctgctgcctattttcctctctgaagtggaattttcccctacttaacctcaatgtgaaagcactgggtatccacctccaataccatactctaacttggagtaaattatttgtttatatctctacta

SEQ ID NO: 343769 - DNA, 484 bp, Homo sapiens
caggttatatatttctaggaatttattcatttcttctaggttatccaattttttggcatataatttttcattatggtctcatgatcctttatatttctgtggttatcagttgtaatgccttctctttcatttctagttttacttcagtcttgtctattttaatcttaagtagtctggctaaaggtttttgttggtttatcttttcatacaaccaacattcagtttcatcgatcttttctattgtcttcctagtctctcatttatttctgctgcgatctttattattatttccttccttgtactgactttgggcttagtttctttttccttctactgactttgggcttagctgctgctttttctagtaacttgaggtgtaacattaagctggtataagatctttcctactcacccttgctctctttggtttccatttacgtggaatgtcttttcccatctttttactttcgggctacatgcattc

SEQ ID NO: 343770 - DNA, 605 bp, Homo sapiens
tggggaccacagaagtaggcgagaccgggagaccctggtgggctgggccatcaccagagtcacagggttgaaagggaatgactgagctatgattcagcatttcccaaactactgttagacgttcaggggaaaagggaaacacagagtgaatctctctaatccctggctagtactgagaaggaattccctgttgtcctgaggctgaagctttgagggtgacgtgctgctctcatatccactctttcttggagggccaagatgcatcaggctgagatggtttcttcccactccactgctccatgggcatccccattaaaacaatgggttggtccaagagggagacacttgttcaccaacctatttggtcaagaatgtgaggccaggcacggtggctcacacctgtaaccctagcactttgggaggccaaggcgggtggatcacctgaagtcaggagttcgagaccagcctggccaacatggtgaaacccggtactgatctataggagtggtgcaccactcctatagatcagtattactatttccctccttcacagatgaggaaactgaagcagggaaaagttaaacaatttgcccaaagttacacaa

SEQ ID NO: 343771 - DNA, 586 bp, Homo sapiens
caggcatttatcagctacccctacaataattttaaatgattttaaattatgtcaacaagttggtaacataatttaataaattcttgagcatttcaagaaacttaatattactgatgaatagaaagatgacctttgctcccataacaaacagaaagcaggttattcatatttagaagcaatttatttggacatttaatatcatatgtataacaacacaatttaacttttccttagatgttaaaataagaagtatacatttgaaaattttagatttaataaggtttctcctacactgccagtttaaaaactgcaacccagatatatttatgagaattctttcatgatttcacactgttatttttctgatacttcaaattttcagttctcacaagttccttgggaagccaaacaactcatcataaatttagctcatattttagctcacaatgcagtcagcaaattctataaattttttaatctaaattactattaagttttatttactttgtacactgatagaattgagttaaatttgttttattatgttaaaatctattcttaaacccatcaattcaagtgatagata

SEQ ID NO: 343772 - DNA, 457 bp, Homo sapiens
tcctggctgcatgggtctctcaacttcgctcaccactatgagagccgctccaccccttctccagttccaggtctgggaaggagagagcagacaagcttgctcatgatggagtccttttacctggtttctctctctgttcacagataccacctctgttgatctgggaactaagaccatgttgcttgtccttagtcacatatgacttaatttgcacccatggtgggccactggtgtcagacaggaagcctaagcgcaggtatcactgaggaggatacacatgctaactacacgatcttcaccagacctgtgagcttccagccaccagatccaaagtcacagagcacagggacttacaaacccagtgctggaaaacatagcaaaggctatatccaatttaggtttctctttattggaaataaagatggcccatacttcaaatatgttatttagagaatgc

SEQ ID NO: 343773 - DNA, 928 bp, Homo sapiens
cagttttatggagccccaaatgctctgaaaacaattagtaacctggaagttgtcagcccaaaggaaagaaaaatcaattgtatcttgaaattttacctatggctctttggcctggcttctttgttcattataagttagtgtgttccttcaggaaacaatgccttaataccatagaacatgggggccttaatagttgctaacattaaaaaagcaaacagaatgattgagggatccttatgaaaacaaaatggtgaattggacatgcagaacctaccatttccttcccctgtttgcaatttttgtggggaggggaggatgttagtatttacaaaagatgattttaagaacttccaagagatgagtttaagaattccatagagtattagttgttcactgtgtaattaatccttccggagagtcttttttttttttttttaaagaaacttttgggtgggttttgttttttattagttaccctaggggtatgttaccctggggtatgaagggaggtgaagataacggaggggggagaaaaaaaaaagaagaaaaaaggagcctaaaatggggaataattgaaatggaacagggggtgtgaggctggttcctcagtccccattccaaacggaggatagaagctgtgtatttatgtgacctggcagatctctggggccataacactgaaaagtgaaagaacctggtgggcagctatctttggctactgataaccagcagaaatgtctgttaattctgattttctcaatttgaagggatcagctacactgttaaattttggaaagccactacctacttccatcaagtaacttaggtttcgaaatatgggttcaacgcacctcccttattaaatgcaagtaggtatatatgataaggagggtgcaagatgtcttgggtgatggcattggcctgccaa

SEQ ID NO: 343774 - DNA, 2703 bp, Homo sapiens
cagttttatggagccccaaatgctctgaaaacaattagtaacctggaagttgtcagcccaaaggaaagaaaaatcaattgtatcttgaaattttacctatggctctttggcctggcttctttgttcattataagttagtgtgttccttcaggaaacaatgccttaataccatagaacatgggggccttaatagttgctaacattaaaaaagcaaacagaatgattgagggatccttatgaaaacaaaatggtgaattggacatgcagaacctaccatttccttcccctgtttgcaatttttgtggggaggggaggatgttagtatttacaaaagatgattttaagaacttccaagagatgagtttaagaattccatagagtattagttgttcactgtgtaattaatccttccggagagtcttttttttttttttttaaagaaacttttgggtgggttttgttttttattagttaccctaggggtatgttaccctggggtatgaagggaggtgaagataacggaggggggagaaaaaaaaaagaagaaaaaaggagcctaaaatggggaataattgaaatggaacagggggtgtgaggctggttcctcagtccccattccaaacggaggatagaagctgtgtatttatgtgacctggcagatctctggggccataacactgaaaagtgaaagaacctggtgggcagctatctttggctactgataaccagcagaaatgtctgttaattctgattttctcaatttgaagggatcagctacactgttaaattttggaaagccactacctacttccatcaagtaacttaggtttcgaaatatgggttcaacgcacctcccttattcaaaatgtcaaaatagattattataatgtataaagtaagaattgacaaaatatgattcttgggttgattggtcatttagaaactagccaaaagtgagacttttaatgtagaacatttttcagaaatgggtacaaagaaaaatgcatattactgtatatttcagagtgtttatgtgaaccttgtatttaattgagagtcccatgtacgttctgcagcctttttgctgcttctatcatctgaagtttgtgtagtacaaataaggcctttgggattcttaatgacatttatgttaaaatgttctcttctctttaaacaccgttttccaatccacctgtcagggagtccaaatcgtgtctgtgttgatgatgctatactttgtagctagaaaaacaattttagtgttgtgggctctgtattcagacttcctttttacaagaccgatgggcagtgatagattattttatcatatttaatgcatgggaaatagtgtgctgaggaagctattaaaagtataactcagtgaattgggtctgagttttaaatgagatatttcaaaattggcttgccactgtaaaagcgactaaataataatatgatactgttctttatgatcttgtcatgtttcactgatatgtttggggtcttcactatgtaaaaaatgtcaaaattgtaatgagcaagcatgtacaagtagtcgtaaatcaaaggttttaaacaggactgcattttcaattaggaaaagctgtttggcagatagcatccaatgcaaaaacagaaatatcgtaacgttctgcttagtgggcaagataagataggaaagacatgctcaaagaggcaaaagaatcattgctatcattcattctacactagtttgaagaagtttttgtacatcagagcacttccttcagcacacttttttgccttcagatttcattttttataaaatgagaagactaatgataaactgtagaaatcaaaatttattgagaaatctgtttctcctaacagatagtaaccctgccatgatatactacttcaacaatgttataaaagttatgtgataatatacattttaacctgggatttctaaattgctttaacaaatgctaatcctgagagttgccctgcaggactcaaaagggaaaggttttgggacgtggcagaaccctgcagggacatggaattaaggccattgcaatgtatcatctttgtagcattgtcatcactcctaagctgccttcacagttttagtacactaagatgaggaaatcgaaaatgggcagagaaagctcatactgtataattgaagacagtgacagagaacgtgtcagttatgccaaaactcttttgatttctgttccaggatttccaacaagaggggaaaggaatgacttgggagggtgggaaagacattaggagttgtttttattttttaccttggaagctttagctaccaatccagtaccctcctaactagaatgtatacacatcagcaggactgactgactacttcattagagatatactgtactcattgggggccttgggggtactgctgttcttatgtgggattttaatgttgtaatgtattgcatcttaatgtattgaattcattttgttgtactatattggttggcattttattaaaataaattgtattgtatcatatttgtatgttttaagagaaaataatataaaatacaatatttgtactattatatagtgcaaaaactacaaatctgtgcctctgcctcttgaattaattctttggttgcttgcatttgggaagggaatggagaaaggaaagaaccaataaagctttcaaagttcaagaaaaaaacc

SEQ ID NO: 343775 - DNA, 2583 bp, Homo sapiens
cagttttatggagccccaaatgctctgaaaacaattagtaacctggaagttgtcagcccaaaggaaagaaaaatcaattgtatcttgaaattttacctatggctctttggcctggcttctttgttcattataagttagtgtgttccttcaggaaacaatgccttaataccatagaacatgggggccttaatagttgctaacattaaaaaagcaaacagaatgattgagggatccttatgaaaacaaaatggtgaattggacatgcagaacctaccatttccttcccctgtttgcaatttttgtggggaggggaggatgttagtatttacaaaagatgattttaagaacttccaagagatgagtttaagaattccatagagtattagttgttcactgtgtaattaatccttccggagagtcttttttttttttttttaaagaaacttttgggtgggttttgttttttattagttaccctaggggtatgttaccctggggtatgaagggaggtgaagataacggaggggggagaaaaaaaaaagaagaaaaaaggagcctaaaatggggaataattgaaatggaacagggggtgtgaggctggttcctcagtccccattccaaacggaggatagaagctgtgtatttatgtgacctggcagatctctggggccataacactgaaaagtgaaagaacctggtgggcagctatctttggctactgataaccagcagaaatgtctgttaattctgattttctcaatttgaagggatcagctacactgttaaattttggaaagccactacctacttccatcaagtaacttaggtttcgaaatatgggttcaacgcacctcccttattcaaaatgtcaaaatagattattataatgtataaagtaagaattgacaaaatatgattcttgggttgattggtcatttagaaactagccaaaagtgagacttttaatgtagaacatttttcagaaatgggtacaaagaaaaatgcatattactgtatatttcagagtgtttatgtgaaccttgtatttaattgagagtcccatgtacgttctgcagcctttttgctgcttctatcatctgaagtttgtgtagtacaaataaggcctttgggattcttaatgacatttatgttaaaatgttctcttctctttaaacaccgttttccaatccacctgtcagggagtccaaatcgtgtctgtgttgatgatgctatactttgtagctagaaaaacaattttagtgttgtgggctctgtattcagacttcctttttacaagaccgatgggcagtgatagattattttatcatatttaatgcatgggaaatagtgtgctgaggaagctattaaaagtataactcagtgaattgggtctgagttttaaatgagatatttcaaaattggcttgccactgtaaaagcgactaaataataatatgatactgttctttatgatcttgtcatgtttcactgatatgtttggggtcttcactatgtaaaaaatgtcaaaattgtaatgagcaagcatgtacaagtagtcgtaaatcaaaggttttaaacaggactgcattttcaattaggaaaagctgtttggcagatagcatccaatgcaaaaacagaaatatcgtaacgttctgcttagtgggcaagataagataggaaagacatgctcaaagaggcaaaagaatcattgctatcattcattctacactagtttgaagaagtttttgtacatcagagcacttccttcagcacacttttttgccttcagatttcattttttataaaatgagaagactaatgataaactgtagaaatcaaaatttattgagaaatctgtttctcctaacagatagtaaccctgccatgatatactacttcaacaatgttataaaagttatgtgataatatacattttaacctgggatttctaaattgctttaacaaatgctaatcctgagagttgccctgcaggactcaaaagggaaaggttttgggacgtggcagaaccctgcagggacatggaattaaggccattgcaatgtatcatctttgtagcattgtcatcactcctaagctgccttcacagttttagtacactaagatgaggaaatcgaaaatgggcagagaaagctcatactgtataattgaagacagtgacagagaacgtgtcagttatgccaaaactcttttgatttctgttccaggatttccaacaagaggggaaaggaatgacttgggagggtgggaaagacattaggagttgtttttattttttaccttggaagctttagctaccaatccagtaccctcctaactagaatgtatacacatcagcaggactgactgactacttcattagagatatactgtactcattgggggccttgggggtactgctgttcttatgtgggattttaatgttgtaatgtattgcatcttaatgtattgaattcattttgttgtactatattggttggcattttattaaaataaattgtattgtatcatatttgtatgttttaagagaaaataatataaaatacaatatttgtactattatata

SEQ ID NO: 343776 - DNA, 1240 bp, Homo sapiens
tctcatcaacaaccgactaatcaccaccctactatgactaatcaaactaacctctatacaaatgataaccatacactacacttaaggacgaacctgatctcttatactagtatccttaatcatttttattgccactactaatttctctcggacctatgcattggtccgagagaaattagggattgccacacggtcttctgcaatgtttgaactaatttacactcccaccaacagcataaaatcattgctatcattcattctacactagtttgaagaagtttttgtacatcagagcacttccttcagcacacttttttgccttcagatttcattttttataaaatgagaagactaatgataaactgtagaaatcaaaatttattgagaaatctgtttctcctaacagatagtaaccctgccatgatatactacttcaacaatgttataaaagttatgtgataatatacattttaacctgggatttctaaattgctttaacaaatgctaatcctgagagttgccctgcaggactcaaaagggaaaggttttgggacgtggcagaaccctgcagggacatggaattaaggccattgcaatgtatcatctttgtagcattgtcatcactcctaagctgccttcacagttttagtacactaagatgaggaaatcgaaaatgggcagagaaagctcatactgtataattgaagacagtgacagagaacgtgtcagttatgccaaaactcttttgatttctgttccaggatttccaacaagaggggaaaggaatgacttgggagggtgggaaagacattaggagttgtttttattttttaccttggaagctttagctaccaatccagtaccctcctaactagaatgtatacacatcagcaggactgactgactacttcattagagatatactgtactcattgggggccttgggggtactgctgttcttatgtgggattttaatgttgtaatgtattgcatcttaatgtattgaattcattttgttgtactatattggttggcattttattaaaataaattgtattgtatcatatttgtatgttttaagagaaaataatataaaatacaatatttgtactattatatagtgcaaaaactacaaatctgtgcctctgcctcttgaattaattctttggttgcttgcatttgggaagggaatggagaaaggaaagaaccaataaagctttcaaagttcaagaaaaaaacc

SEQ ID NO: 343777 - DNA, 885 bp, Homo sapiens
agtcattgccatgtccccatttactgagaactcaacgtctgtcacttgtggactcacccttggctacacccagtggctgcctttgggcccaggtgcccccatcagcagcacagcgtgagtgagtggtacagaccagccgccccctccgtgtgtttactgatgcagcctcagcgtgggggccgtggcgcgctcgtgtgacacgcgtttgccctctgcactaggcaacgtgaagccggaagatgtgaagagagtcgcttctaagatgctccgagggaagccggcagtggccgccctgggtgacctgactgacctgcccacgtatgagcacatccagaccgccctgtcgagtaaggacgggcgcctgcccaggacgtaccggctcttccggtagaaccgctccccggcctgacagacccagggagctgcagctggagcccgttcccgtgcgtgttagtttggacacgaatttagtctaaaaagctgtctggttgtataaacggtgcaaacaatgtcgccacagcacccacgcggtttgcattcttttggaactcaatgtgccgatcagtggagtcagtatcgagcctgaccaccgcaagccaggaagcaggtgaagtgcccagcgctggagtgcagcgtgccacgaggagggcggtcggtgcttccctcctcgggctgtgggcacatggggccccgcaggttccttggaggagccctgagctgggaggcagcaaaggctgacctatcaaagcctcccggaggccaccgtgctgggtaccaggactcacctctgacaagcaggagaaggtaagggcccggtcagctccaaggagcgcgctccacgcgcgtgcacacagcttccctggtaataaagagctggcatctttc

SEQ ID NO: 343778 - DNA, 2141 bp, Homo sapiens
agcggaagtgacgactgaagcggggcggagacgcaagatggcggctgtggtgctggcggcgacgcggttgctgcggggctcgggttcttggggctgttcgcggctgaggtttggacctcctgcgtacagacggtttagtagtggtggtgcctatcccaacatccccctctcttctcccttacctggagtacccaagcctgtttttgctacagttgatggacaggaaaagtttgaaaccaaagtaaccacattggataatgggcttcgcgtggcatctcagaataagtttggacagttttgtacagtaggaattcttatcaattcaggatcgagatatgaagcgaaataccttagtggaattgctcactttttggaaaaattggcattttcgtctactgctcgatttgacagcaaagatgaaattctgcttacgttggaaaagcatgggggtatctgtgactgccagacatcaagagacaccaccatgtatgctgtgtctgctgatagcaaaggcttggacacggtggttgccttactggctgatgtggttctgcagccccggctaacagatgaagaagtcgagatgacgcggatggcggtccagtttgagctggaggacctgaacctgcggcctgacccagagccacttctcaccgagatgattcatgaagcggcttacagggagaacacagttggcctccaccgtttctgccccacagaaaacgtagcaaagatcaaccgagaggtgctgcattcctacctgaggaactactacactcccgaccgcatggtgctggccggcgtgggcgtggagcacgagcatctggtggactgtgcccggaagtacctcctgggggtccagccggcctgggggagcgcagaggccgtggatattgacagatctgtggcccagtacactggggggattgccaagctagaaagagacatgtccaatgtcagcctgggcccgacccccatccccgagctcacgcacatcatggttggactggagagctgctccttcctggaggaggacttcatcccctttgcagtgttgaacatgatgatgggcggaggtggctccttctcggctggtgggcccggcaagggcatgttctccaggctctacctcaacgtgctcaacaggcaccactggatgtataacgcgacctcctaccaccacagctacgaggacactggcctcctttgcatccatgccagcgccgacccaagacaggttcgagaaatggtagaaatcatcacaaaggagtttattttaatgggcggaaccgtggacacggtggagctggaacgagccaagacgcagctgacatcaatgctcatgatgaacctggaatccaggcctgtgatcttcgaggatgtggggaggcaggtgctggccactcgctccagaaagctgccgcacgagctgtgcacgctcatccgcaacgtgaagccggaagatgtgaagagagtcgcttctaagatgctccgagggaagccggcagtggccgccctgggtgacctgactgacctgcccacgtatgagcacatccagaccgccctgtcgagtaaggacgggcgcctgcccaggacgtaccggctcttccggtagaaccgctccccggcctgacagacccagggagctgcagctggagcccgttcccgtgcgtgttagtttggacacgaatttagtctaaaaagctgtctggttgtataaacggtgcaaacaatgtcgccacagcacccacgcggtttgcattcttttggaactcaatgtgccgatcagtggagtcagtatcgagcctgaccaccgcaagccaggaagcaggtgaagtgcccagcgctggagtgcagcgtgccacgaggagggcggtcggtgcttccctcctcgggctgtgggcacatggggccccgcaggttccttggaggagccctgagctgggaggcagcaaaggctgacctatcaaagcctcccggaggccaccgtgctgggtaccaggactcacctctgacaagcaggagaaggtaagggcccggtcagctccaaggagcgcgctccacgcgcgtgcacacagcttccctggtaataaagagctggcatctttcaatttcccacacaacatacacacgacagacac

SEQ ID NO: 343779 - DNA, 1979 bp, Homo sapiens
agcggaagtgacgactgaagcggggcggagacgcaagatggcggctgtggtgctggcggcgacgcggttgctgcggggctcgggttcttggggctgttcgcggctgaggtttggacctcctgcgtacagacggtttagtagtggtggtgcctatcccaacatccccctctcttctcccttacctggagtacccaagcctgtttttgctacagttgatggacaggaaaagtttgaaaccaaagtaaccacattggataatgggcttcgcgtggcatctcagaataagtttggacagttttgtacagtaggaattcttatcaattcaggatcgagatatgaagcgaaataccttagtggaattgctcactttttggaaaaattggcattttcgtctactgctcgatttgacagcaaagatgaaattctgcttacgttggaaaagcatgggggtatctgtgactgccagacatcaagagacaccaccatgtatgctgtgtctgctgatagcaaaggcttggacacggtggttgccttactggctgatgtggttctgcagccccggctaacagatgaagaagtcgagatgacgcggatggcggtccagtttgagctggaggacctgaacctgcggcctgacccagagccacttctcaccgagatgattcatgaagcggcttacagggagaacacagttggcctccaccgtttctgccccacagaaaacgtagcaaagatcaaccgagaggtgctgcattcctacctgaggaactactacactcccgaccgcatggtgctggccggcgtgggcgtggagcacgagcatctggtggactgggcccgacccccatccccgagctcacgcacatcatggttggactggagagctgctccttcctggaggaggacttcatcccctttgcagtgttgaacatgatgatgggcggaggtggctccttctcggctggtgggcccggcaagggcatgttctccaggctctacctcaacgtgctcaacaggcaccactggatgtataacgcgacctcctaccaccacagctacgaggacactggcctcctttgcatccatgccagcgccgacccaagacaggttcgagaaatggtagaaatcatcacaaaggagtttattttaatgggcggaaccgtggacacggtggagctggaacgagccaagacgcagctgacatcaatgctcatgatgaacctggaatccaggcctgtgatcttcgaggatgtggggaggcaggtgctggccactcgctccagaaagctgccgcacgagctgtgcacgctcatccgcaacgtgaagccggaagatgtgaagagagtcgcttctaagatgctccgagggaagccggcagtggccgccctgggtgacctgactgacctgcccacgtatgagcacatccagaccgccctgtcgagtaaggacgggcgcctgcccaggacgtaccggctcttccggtagaaccgctccccggcctgacagacccagggagctgcagctggagcccgttcccgtgcgtgttagtttggacacgaatttagtctaaaaagctgtctggttgtataaacggtgcaaacaatgtcgccacagcacccacgcggtttgcattcttttggaactcaatgtgccgatcagtggagtcagtatcgagcctgaccaccgcaagccaggaagcaggtgaagtgcccagcgctggagtgcagcgtgccacgaggagggcggtcggtgcttccctcctcgggctgtgggcacatggggccccgcaggttccttggaggagccctgagctgggaggcagcaaaggctgacctatcaaagcctcccggaggccaccgtgctgggtaccaggactcacctctgacaagcaggagaaggtaagggcccggtcagctccaaggagcgcgctccacgcgcgtgcacacagcttccctggtaataaagagctggcatctttc

SEQ ID NO: 343780 - DNA, 2668 bp, Homo sapiens
agcggaagtgacgactgaagcggggcggagacgcaagatggcggctgtggtgctggcggcgacgcggttgctgcggggctcgggttcttggggctgttcgcggctgaggtttggacctcctgcgtacagacggtttagtagtggtggtgcctatcccaacatccccctctcttctcccttacctggagtacccaagcctgtttttgctacagttgatggacaggaaaagtttgaaaccaaagtaaccacattggataatgggcttcgcgtggcatctcagaataagtttggacagttttgtacagtaggaattcttatcaattcaggatcgagatatgaagcgaaataccttagtggaattgctcactttttggaaaaattggcattttcgtctactgctcgatttgacagcaaagatgaaattctgcttacgttggaaaagcatgggggtatctgtgactgccagacatcaagagacaccaccatgtatgctgtgtctgctgatagcaaaggcttggacacggtggttgccttactggctgatgtggttctgcagccccggctaacagatgaagaagtcgagatgacgcggatggcggtccagtttgagctggaggacctgaacctgcggcctgacccagagccacttctcaccgagatgattcatgaagtaaaatgtcaaactcgagaatgcccccgcatctcgaacagtggtcctcgggacaccaggggtggtggggagggtgcctccgtgatgttgtccttgcaggttatggatatatacagaacatttttttgttttttgagatgaggtttctccacattgcctacgctggtcttgcactcctgggctcagctcaggtgatcctcctgcctctgcctcccaagtagctgggattacaggcgtgagtcaccgcactcagcttagaacattcttgatttctgagtctgctgtttatacaatgttcgtattttccagtttttatagtaactaggtctttactactaaacacaattaatcttaggctttttgtgaatttgtattctggagaggcagattttactctttataaatacgcacgcagctgctattgccagagtgcaagtaaaatatcagcttgcgtcggattttcccagggctggctgcagatgggcgctggtgctgcttgttggaggaagcctggtcatgctgtcttcagtcacctgtgtctgtggctcttccccattaggcggcttacagggagaacacagttggcctccaccgtttctgccccacagaaaacgtagcaaagatcaaccgagaggtgctgcattcctacctgaggaactactacactcccgaccgcatggtgctggccggcgtgggcgtggagcacgagcatctggtggactgtgcccggaagtacctcctgggggtccagccggcctgggggagcgcagaggccgtggatattgacagatctgtggcccagtacactggggggattgccaagctagaaagagacatgtccaatgtcagcctgggcccgacccccatccccgagctcacgcacatcatggttggactggagagctgctccttcctggaggaggacttcatcccctttgcagtgttgaacatgatgatgggcggaggtggctccttctcggctggtgggcccggcaagggcatgttctccaggctctacctcaacgtgctcaacaggcaccactggatgtataacgcgacctcctaccaccacagctacgaggacactggcctcctttgcatccatgccagcgccgacccaagacaggttcgagaaatggtagaaatcatcacaaaggagtttattttaatgggcggaaccgtggacacggtggagctggaacgagccaagacgcagctgacatcaatgctcatgatgaacctggaatccaggcctgtgatcttcgaggatgtggggaggcaggtgctggccactcgctccagaaagctgccgcacgagctgtgcacgctcatccgcaacgtgaagccggaagatgtgaagagagtcgcttctaagatgctccgagggaagccggcagtggccgccctgggtgacctgactgacctgcccacgtatgagcacatccagaccgccctgtcgagtaaggacgggcgcctgcccaggacgtaccggctcttccggtagaaccgctccccggcctgacagacccagggagctgcagctggagcccgttcccgtgcgtgttagtttggacacgaatttagtctaaaaagctgtctggttgtataaacggtgcaaacaatgtcgccacagcacccacgcggtttgcattcttttggaactcaatgtgccgatcagtggagtcagtatcgagcctgaccaccgcaagccaggaagcaggtgaagtgcccagcgctggagtgcagcgtgccacgaggagggcggtcggtgcttccctcctcgggctgtgggcacatggggccccgcaggttccttggaggagccctgagctgggaggcagcaaaggctgacctatcaaagcctcccggaggccaccgtgctgggtaccaggactcacctctgacaagcaggagaaggtaagggcccggtcagctccaaggagcgcgctccacgcgcgtgcacacagcttccctggtaataaagagctggcatctttc

SEQ ID NO: 343781 - DNA, 2399 bp, Homo sapiens
agcggaagtgacgactgaagcggggcggagacgcaagatggcggctgtggtgctggcggcgacgcggttgctgcggggctcgggttcttggggctgttcgcggctgaggtttggacctcctgcgtacagacggtttagtagtggtggtgcctatcccaacatccccctctcttctcccttacctggagtacccaagcctgtttttgctacagttgatggacaggaaaagtttgaaaccaaagtaaccacattggataatgggcttcgcgtggcatctcagaataagtttggacagttttgtacagtaggaagtaagtactgttgtgttgtcgtgggtggtcccgcagttttaacatgcacatgctttagttgactgttagttgtaattagcatgccaattatgaattgtaccctgagtggaaacaaagtgtacgatttcataaatgttgagctacacatatacctgtgaaaccatcagcacaatcaccctcatgtaattaaatctgattatcatgtcatattgacatcttaaaatgtttctcttgattaaatcttattttgaatatctgatgtaacctgtcaattttctttttactactagttcttatcaattcaggatcgagatatgaagcgaaataccttagtggaattgctcactttttggaaaaattggcattttcgtctactgctcgatttgacagcaaagatgaaattctgcttacgttggaaaagcatgggggtatctgtgactgccagacatcaagagacaccaccatgtatgctgtgtctgctgatagcaaaggcttggacacggtggttgccttactggctgatgtggttctgcagccccggctaacagatgaagaagtcgagatgacgcggatggcggtccagtttgagctggaggacctgaacctgcggcctgacccagagccacttctcaccgagatgattcatgaagcggcttacagggagaacacagttggcctccaccgtttctgccccacagaaaacgtagcaaagatcaaccgagaggtgctgcattcctacctgaggaactactacactcccgaccgcatggtgctggccggcgtgggcgtggagcacgagcatctggtggactgtgcccggaagtacctcctgggggtccagccggcctgggggagcgcagaggccgtggatattgacagatctgtggcccagtacactggggggattgccaagctagaaagagacatgtccaatgtcagcctgggcccgacccccatccccgagctcacgcacatcatggttggactggagagctgctccttcctggaggaggacttcatcccctttgcagtgttgaacatgatgatgggcggaggtggctccttctcggctggtgggcccggcaagggcatgttctccaggctctacctcaacgtgctcaacaggcaccactggatgtataacgcgacctcctaccaccacagctacgaggacactggcctcctttgcatccatgccagcgccgacccaagacaggttcgagaaatggtagaaatcatcacaaaggagtttattttaatgggcggaaccgtggacacggtggagctggaacgagccaagacgcagctgacatcaatgctcatgatgaacctggaatccaggcctgtgatcttcgaggatgtggggaggcaggtgctggccactcgctccagaaagctgccgcacgagctgtgcacgctcatccgcaacgtgaagccggaagatgtgaagagagtcgcttctaagatgctccgagggaagccggcagtggccgccctgggtgacctgactgacctgcccacgtatgagcacatccagaccgccctgtcgagtaaggacgggcgcctgcccaggacgtaccggctcttccggtagaaccgctccccggcctgacagacccagggagctgcagctggagcccgttcccgtgcgtgttagtttggacacgaatttagtctaaaaagctgtctggttgtataaacggtgcaaacaatgtcgccacagcacccacgcggtttgcattcttttggaactcaatgtgccgatcagtggagtcagtatcgagcctgaccaccgcaagccaggaagcaggtgaagtgcccagcgctggagtgcagcgtgccacgaggagggcggtcggtgcttccctcctcgggctgtgggcacatggggccccgcaggttccttggaggagccctgagctgggaggcagcaaaggctgacctatcaaagcctcccggaggccaccgtgctgggtaccaggactcacctctgacaagcaggagaaggtaagggcccggtcagctccaaggagcgcgctccacgcgcgtgcacacagcttccctggtaataaagagctggcatctttc

SEQ ID NO: 343782 - DNA, 2014 bp, Homo sapiens
agcggaagtgacgactgaagcggggcggagacgcaagatggcggctgtggtgctggcggcgacgcggttgctgcggggctcgggttcttggggctgttcgcggctgaggtttggacctcctgcgtacagacggtttagtagtggtggtgcctatcccaacatccccctctcttctcccttacctggagtacccaagcctgtttttgctacagttgatggacaggaaaagtttgaaaccaaagtaaccacattggataatgggcttcgcgtggcatctcagaataagtttggacagttttgtacagtaggaattcttatcaattcaggatcgagatatgaagcgaaataccttagtggaattgctcactttttggaaaaattggcattttcgtctactgctcgatttgacagcaaagatgaaattctgcttacgttggaaaagcatgggggtatctgtgactgccagacatcaagatgaagaagtcgagatgacgcggatggcggtccagtttgagctggaggacctgaacctgcggcctgacccagagccacttctcaccgagatgattcatgaagcggcttacagggagaacacagttggcctccaccgtttctgccccacagaaaacgtagcaaagatcaaccgagaggtgctgcattcctacctgaggaactactacactcccgaccgcatggtgctggccggcgtgggcgtggagcacgagcatctggtggactgtgcccggaagtacctcctgggggtccagccggcctgggggagcgcagaggccgtggatattgacagatctgtggcccagtacactggggggattgccaagctagaaagagacatgtccaatgtcagcctgggcccgacccccatccccgagctcacgcacatcatggttggactggagagctgctccttcctggaggaggacttcatcccctttgcagtgttgaacatgatgatgggcggaggtggctccttctcggctggtgggcccggcaagggcatgttctccaggctctacctcaacgtgctcaacaggcaccactggatgtataacgcgacctcctaccaccacagctacgaggacactggcctcctttgcatccatgccagcgccgacccaagacaggttcgagaaatggtagaaatcatcacaaaggagtttattttaatgggcggaaccgtggacacggtggagctggaacgagccaagacgcagctgacatcaatgctcatgatgaacctggaatccaggcctgtgatcttcgaggatgtggggaggcaggtgctggccactcgctccagaaagctgccgcacgagctgtgcacgctcatccgcaacgtgaagccggaagatgtgaagagagtcgcttctaagatgctccgagggaagccggcagtggccgccctgggtgacctgactgacctgcccacgtatgagcacatccagaccgccctgtcgagtaaggacgggcgcctgcccaggacgtaccggctcttccggtagaaccgctccccggcctgacagacccagggagctgcagctggagcccgttcccgtgcgtgttagtttggacacgaatttagtctaaaaagctgtctggttgtataaacggtgcaaacaatgtcgccacagcacccacgcggtttgcattcttttggaactcaatgtgccgatcagtggagtcagtatcgagcctgaccaccgcaagccaggaagcaggtgaagtgcccagcgctggagtgcagcgtgccacgaggagggcggtcggtgcttccctcctcgggctgtgggcacatggggccccgcaggttccttggaggagccctgagctgggaggcagcaaaggctgacctatcaaagcctcccggaggccaccgtgctgggtaccaggactcacctctgacaagcaggagaaggtaagggcccggtcagctccaaggagcgcgctccacgcgcgtgcacacagcttccctggtaataaagagctggcatctttc

SEQ ID NO: 343783 - DNA, 2060 bp, Homo sapiens
agcggaagtgacgactgaagcggggcggagacgcaagatggcggctgtggtgctggcggcgacgcggttgctgcggggctcgggttcttggggctgttcgcggctgaggtttggacctcctgcgtacagacggtttagtagtggtggtgcctatcccaacatccccctctcttctcccttacctggagtacccaagcctgtttttgctacagttgatggacaggaaaagtttgaaaccaaagtaaccacattggataatgggcttcgcgtggcatctcagaataagtttggacagttttgtacagtaggaattcttatcaattcaggatcgagatatgaagcgaaataccttagtggaattgctcactttttggaaaaattggcattttcgtctactgctcgatttgacagcaaagatgaaattctgcttacgttggaaaagcatgggggtatctgtgactgccagacatcaagagacaccaccatgtatgctgtgtctgctgatagcaaaggcttggacacggtggttgccttactggctgatgtggttctgcagccccggctaacagatgaagaagtcgagatgacgcggatggcggtccagtttgagctggaggacctgaacctgcggcctgacccagagccacttctcaccgagatgattcatgaaaaaacgtagcaaagatcaaccgagaggtgctgcattcctacctgaggaactactacactcccgaccgcatggtgctggccggcgtgggcgtggagcacgagcatctggtggactgtgcccggaagtacctcctgggggtccagccggcctgggggagcgcagaggccgtggatattgacagatctgtggcccagtacactggggggattgccaagctagaaagagacatgtccaatgtcagcctgggcccgacccccatccccgagctcacgcacatcatggttggactggagagctgctccttcctggaggaggacttcatcccctttgcagtgttgaacatgatgatgggcggaggtggctccttctcggctggtgggcccggcaagggcatgttctccaggctctacctcaacgtgctcaacaggcaccactggatgtataacgcgacctcctaccaccacagctacgaggacactggcctcctttgcatccatgccagcgccgacccaagacaggttcgagaaatggtagaaatcatcacaaaggagtttattttaatgggcggaaccgtggacacggtggagctggaacgagccaagacgcagctgacatcaatgctcatgatgaacctggaatccaggcctgtgatcttcgaggatgtggggaggcaggtgctggccactcgctccagaaagctgccgcacgagctgtgcacgctcatccgcaacgtgaagccggaagatgtgaagagagtcgcttctaagatgctccgagggaagccggcagtggccgccctgggtgacctgactgacctgcccacgtatgagcacatccagaccgccctgtcgagtaaggacgggcgcctgcccaggacgtaccggctcttccggtagaaccgctccccggcctgacagacccagggagctgcagctggagcccgttcccgtgcgtgttagtttggacacgaatttagtctaaaaagctgtctggttgtataaacggtgcaaacaatgtcgccacagcacccacgcggtttgcattcttttggaactcaatgtgccgatcagtggagtcagtatcgagcctgaccaccgcaagccaggaagcaggtgaagtgcccagcgctggagtgcagcgtgccacgaggagggcggtcggtgcttccctcctcgggctgtgggcacatggggccccgcaggttccttggaggagccctgagctgggaggcagcaaaggctgacctatcaaagcctcccggaggccaccgtgctgggtaccaggactcacctctgacaagcaggagaaggtaagggcccggtcagctccaaggagcgcgctccacgcgcgtgcacacagcttccctggtaataaagagctggcatctttc

SEQ ID NO: 343784 - DNA, 1600 bp, Homo sapiens
agcggaagtgacgactgaagcggggcggagacgcaagatggcggctgtggtgctggcggcgacgcggttgctgcggggctcgggttcttggggctgttcgcggctgaggtttggacctcctgcgtacagacggtttagtagtggtggtgcctatcccaacatccccctctcttctcccttacctggagtacccaagcctgtttttgctacagttgatggacaggaaaagtttgaaaccaaagtaaccacattggataatgggcttcgcgtggcatctcagaataagtttggacagttttgtacagtaggaattcttatcaattcaggatcgagatatgaagcgaaataccttagtggaattgctcactttttggaaaaattggcattttcgtctactgctcgatttgacagcaaagatgaaattctgcttacgttggaaaagcatgggggtatctgtgactgccagacatcaagagacaccaccatgtatgctgtgtctgctgatagcaaaggcttggacacggtggttgccttactggctgatgtggttctgcagccccggctaacagatgaagaagtcgagatgacgcggatggcggtccagtttgagctggaggacctgaacctgcggcctgacccagagccacttctcaccgagatgattcatgaagcggcttacagggagaacacagttggcctccaccgtttctgccccacagaaaacgtagcaaagatcaaccgagaggtgctgcattcctacctgaggaactactacactcccgaccgcatggtgctggccggcgtgggcgtggagcacgagcatctggtggactgtgcccggaagtacctcctgggggtccagccggcctgggggagcgcagaggccgtggatattgacagatctgtggcccagtacactggggggattgccaagctagaaagagacatgtccaatgtcagcctgggcccgacccccatccccgagctcacgcacatcatggttggactggagagctgctccttcctggaggaggacttcatcccctttgcagtgttgaacatgatgatgggcggaggtggctccttctcggctggtgggcccggcaagggcatgttctccaggctctacctcaacgtgctcaacaggcaccactggatgtataacgcgacctcctaccaccacagctacgaggacactggcctcctttgcatccatgccagcgccgacccaagacaggttcgagaaatggtagaaatcatcacaaaggagtttattttaatgggcggaaccgtggacacggtggagctggaacgagccaagacgcagctgacatcaatgctcatgatgaacctggaatccaggcctgtgatcttcgaggatgtggggaggcaggtgctggccactcgctccagaaagctgccgcacgagctgtgcacgctcatcctgcggagtgtgctgtatgcttgtgtgtgtgctgtgctcgtgtgtgtgctgtgttcatgcgtctgctgtgtgtcctcccgtgtgtagctgtcggggatgcataatagtatcgagtgctctacggaggatgggaattgagatgtaagatttggggtt

SEQ ID NO: 343785 - DNA, 1538 bp, Homo sapiens
agcggaagtgacgactgaagcggggcggagacgcaagatggcggctgtggtgctggcggcgacgcggttgctgcggggctcgggttcttggggctgttcgcggctgaggtttggacctcctgcgtacagacggtttagtagtggtggtgcctatcccaacatccccctctcttctcccttacctggagtacccaagcctgtttttgctacagttgatggacaggaaaagtttgaaaccaaagtaaccacattggataatgggcttcgcgtggcatctcagaataagtttggacagttttgtacagtaggaattcttatcaattcaggatcgagatatgaagcgaaataccttagtggaattgctcactttttggaaaaattggcattttcgtctactgctcgatttgacagcaaagatgaaattctgcttacgttggaaaagcatgggggtatctgtgactgccagacatcaagagacaccaccatgtatgctgtgtctgctgatagcaaaggcttggacacggtggttgccttactggctgatgtggttctgcagccccggctaacagatgaagaagtcgagatgacgcggatggcggtccagtttgagctggaggacctgaacctgcggcctgacccagagccacttctcaccgagatgattcatgaagtaaaatgtcaaactcgagaatgcccccgcatctcgaacagtggtcctcgggacaccaggggtggtggggagggtgcctccgtgatgttgtccttgcaggttatggatatatacagaacatttttttgttttttgagatgaggtttctccacattgcctacgctggtcttgcactcctgggctcagctcaggtgatcctcctgcctctgcctcccaagtagctgggattacaggcgtgagtcaccgcactcagcttagaacattcttgatttctgagtctgctgtttatacaatgttcgtattttccagtttttatagtaactaggtctttactactaaacacaattaatcttaggctttttgtgaatttgtattctggagaggcagattttactctttataaatacgcacgcagctgctattgccagagtgcaagtaaaatatcagcttgcgtcggattttcccagggctggctgcagatgggcgctggtgctgcttgttggaggaagcctggtcatgctgtcttcagtcacctgtgtctgtggctcttccccattaggcggcttacagggagaacacagttggcctccaccgtttctgccccacagaaaacgtagcaaagatcaaccgagaggtgctgcattcctacctgaggaactactacactcccgaccgcatggtgctggccggcgtgggcgtggagcacgagcatctggtggactgtgcccggaagtacctcctgggggtccagccggcctgggggagcgcagaggccgtggatattgacagatctgtggcccagtacactggggggattgccaagcgtgaagtaccggttttcgccacaggatcctctaaacaccgcaga

SEQ ID NO: 343786 - DNA, 440 bp, Homo sapiens
  misc_feature (32)..(32): n is a, c, g, or t
  misc_feature (58)..(58): n is a, c, g, or t
tactggccttacgcgcggattcggtgcgtgtntgtcaccacctccttcagcttcttcntcacctgtcgctcccgctctgacatgccttcgcattcttttggaactcaatgtgccgatcagtggagtcagtatcgagcctgaccaccgcaagccaggaagcaggtgaagtgcccagcgctggagtgcagcgtgccacgaggagggcggtcggtgcttccctcctcgggctgtgggcacatggggccccgcaggttccttggaggagccctgagctgggaggcagcaaaggctgacctatcaaagcctcccggaggccaccgtgctgggtaccaggactcacctctgacaagcaggagaaggtaagggcccggtcagctccaaggagcgcgctccacgcgcgtgcacacagcttccctggtaataaagagctggcatctttc

SEQ ID NO: 343787 - DNA, 522 bp, Homo sapiens
agcggaagtgacgactgaagcggggcggagacgcaagatggcggctgtggtgctggcggcgacgcggttgctgcggggctcgggttcttggggctgttcgcggctgaggtttggacctcctgcgtacagacggtttagtagtggtggtgcctatcccaacatccccctctcttctcccttacctggagtacccaagcctgtttttgctacagttgatggacaggaaaagtttgaaaccaaagtaaccacattggataatgggcttcgcgtggcatctcagaataagtttggacagttttgtacagtaggaattcttatcaattcaggatcgagatatgaagcgaaataccttagtggaattgctcactttttggaaaaattggcattttcgtctactgctcgatttgacagcaaagatgaaattctgcttacgttggaaaagcatgggggtatctgtgactgccagacatcaaggtacaccagcttttgtgtacaaactgactttgggtccttgggaactga

SEQ ID NO: 343788 - DNA, 526 bp, Homo sapiens
agcggaagtgacgactgaagcggggcggagacgcaagatggcggctgtggtgctggcggcgacgcggttgctgcggggctcgggttcttggggctgttcgcggctgaggtttggacctcctgcgtacagacggtttagtagtggtggtgcctatcccaacatccccctctcttctcccttacctggagtacccaagcctgtttttgctacagttgatggacaggaaaagtttgaaaccaaagtaaccacattggataatgggcttcgcgtggcatctcagaataagtttggacagttttgtacagtaggaattcttatcaattcaggatcgagatatgaagcgaaataccttagtggaattgctcactttttggaaaaattggcattttcggtcagtacccagttttgtaattttttagactatacttttgaaggatgtttgagatttttcttgtctataatggttattttaataaattatcaagttgctaagttaatgttaataaaagacttttaagttaaaaga

SEQ ID NO: 343789 - DNA, 2109 bp, Homo sapiens
agcggaagtgacgactgaagcggggcggagacgcaagatggcggctgtggtgctggcggcgacgcggttgctgcggggctcgggttcttggggctgttcgcggctgaggtttggacctcctgcgtacagacggtttagtagtggtggtgcctatcccaacatccccctctcttctcccttacctggagtacccaagcctgtttttgctacagttgatggacaggaaaagtttgaaaccaaagtaaccacattggataatgggcttcgcgtggcatctcagaataagtttggacagttttgtacagtaggaattcttatcaattcaggatcgagatatgaagcgaaataccttagtggaattgctcactttttggaaaaattggcattttcgtctactgctcgatttgacagcaaagatgaaattctgcttacgttggaaaagcatgggggtatctgtgactgccagacatcaagagacaccaccatgtatgctgtgtctgctgatagcaaaggcttggacacggtggttgccttactggctgatgtggttctgcagccccggctaacagatgaagaagtcgagatgacgcggatggcggtccagtttgagctggaggacctgaacctgcggcctgacccagagccacttctcaccgagatgattcatgaagcggcttacagggagaacacagttggcctccaccgtttctgccccacagaaaacgtagcaaagatcaaccgagaggtgctgcattcctacctgaggaactactacactcccgaccgcatggtgctggccggcgtgggcgtggagcacgagcatctggtggactgtgcccggaagtacctcctgggggtccagccggcctgggggagcgcagaggccgtggatattgacagatctgtggcccagtacactggggggattgccaagctagaaagagacatgtccaatgtcagcctgggcccgacccccatccccgagctcacgcacatcatggttggactggagagctgctccttcctggaggaggacttcatcccctttgcagtgttgaacatgatgatgggcggaggtggctccttctcggctggtgggcccggcaagggcatgttctccaggctctacctcaacgtgctcaacaggcaccactggatgtataacgcgacctcctaccaccacagctacgaggacactggcctcctttgcatccatgccagcgccgacccaagacaggttcgagaaatggtagaaatcatcacaaaggagtttattttaatgggcggaaccgtggacacggtggagctggaacgagccaagacgcagctgacatcaatgctcatgatgaacctggaatccaggcctgtgatcttcgaggatgtggggaggcaggtgctggccactcgctccagaaagctgccgcacgagctgtgcacgctcatccgcaacgtgaagccggaagatgtgaagagagtcgcttctaagatgctccgagggaagccggcagtggccgccctgggtgacctgactgacctgcccacgtatgagcacatccagaccgccctgtcgagtaaggacgggcgcctgcccaggacgtaccggctcttccggtagaaccgctccccggcctgacagacccagggagctgcagctggagcccgttcccgtgcgtgttagtttggacacgaatttagtctaaaaagctgtctggttgtataaacggtgcaaacaatgtcgccacagcacccacgcggtttgcattcttttggaactcaatgtgccgatcagtggagtcagtatcgagcctgaccaccgcaagccaggaagcaggtgaagtgcccagcgctggagtgcagcgtgccacgaggagggcggtcggtgcttccctcctcgggctgtgggcacatggggccccgcaggttccttggaggagccctgagctgggaggcagcaaaggctgacctatcaaagcctcccggaggccaccgtgctgggtaccaggactcacctctgacaagcaggagaaggtaagggcccggtcagctccaaggagcgcgctccacgcgcgtgcacacagcttccctggtaataaagagctggcatctttc

SEQ ID NO: 343790 - DNA, 2112 bp, Homo sapiens
agcggaagtgacgactgaagcggggcggagacgcaagatggcggctgtggtgctggcggcgacgcggttgctgcggggctcgggttcttggggctgttcgcggctgaggtttggacctcctgcgtacagacggtttagtagtggtggtgcctatcccaacatccccctctcttctcccttacctggagtacccaagcctgtttttgctacagttgatggacaggaaaagtttgaaaccaaagtaaccacattggataatgggcttcgcgtggcatctcagaataagtttggacagttttgtacagtaggaattcttatcaattcaggatcgagatatgaagcgaaataccttagtggaattgctcactttttggaaaaattggcattttcgtctactgctcgatttgacagcaaagatgaaattctgcttacgttggaaaagcatgggggtatctgtgactgccagacatcaagagacaccaccatgtatgctgtgtctgctgatagcaaaggcttggacacggtggttgccttactggctgatgtggttctgcagccccggctaacagatgaagaagtcgagatgacgcggatggcggtccagtttgagctggaggacctgaacctgcggcctgacccagagccacttctcaccgagatgattcatgaagcggcttacagggagaacacagttggcctccaccgtttctgccccacagaaaacgtagcaaagatcaaccgagaggtgctgcattcctacctgaggaactactacactcccgaccgcatggtgctggccggcgtgggcgtggagcacgagcatctggtggactgtgcccggaagtacctcctgggggtccagccggcctgggggagcgcagaggccgtggatattgacagatctgtggcccagtacactggggggattgccaagctagaaagagacatgtccaatgtcagcctgggcccgacccccatccccgagctcacgcacatcatggttggactggagagctgctccttcctggaggaggacttcatcccctttgcagtgttgaacatgatgatgggcggaggtggctccttctcggctggtgggcccggcaagggcatgttctccaggctctacctcaacgtgctcaacaggcaccactggatgtataacgcgacctcctaccaccacagctacgaggacactggcctcctttgcatccatgccagcgccgacccaagacaggttcgagaaatggtagaaatcatcacaaaggagtttattttaatgggcggaaccgtggacacggtggagctggaacgagccaagacgcagctgacatcaatgctcatgatgaacctggaatccaggcctgtgatcttcgaggatgtggggaggcaggtgctggccactcgctccagaaagctgccgcacgagctgtgcacgctcatccgcaacgtgaagccggaagatgtgaagagagtcgcttctaagatgctccgagggaagccggcagtggccgccctgggtgacctgactgacctgcccacgtatgagcacatccagaccgccctgtcgagtaaggacgggcgcctgcccaggacgtaccggctcttccggtagaaccgctccccggcctgacagacccagggagctgcagctggagcccgttcccgtgcgtgttagtttggacacgaatttagtctaaaaagctgtctggttgtataaacggtgcaaacaatgtcgccacagcacccacgcggtttgcattcttttggaactcaatgtgccgatcagtggagtcagtatcgagcctgaccaccgcaagccaggaagcaggtgaagtgcccagcgctggagtgcagcgtgccacgaggagggcggtcggtgcttccctcctcgggctgtgggcacatggggccccgcaggttccttggaggagccctgagctgggaggcagcaaaggctgacctatcaaagcctcccggaggccaccgtgctgggtaccaggactcacctctgacaagcaggagaaggtaagggcccggtcagctccaaggagcgcgctccacgcgcgtgataaccttggtgtataatggctgttctcctttttttctttt

SEQ ID NO: 343791 - DNA, 2573 bp, Homo sapiens
agcggaagtgacgactgaagcggggcggagacgcaagatggcggctgtggtgctggcggcgacgcggttgctgcggggctcgggttcttggggctgttcgcggctgaggtttggacctcctgcgtacagacggtttagtagtggtggtgcctatcccaacatccccctctcttctcccttacctggagtacccaagcctgtttttgctacagttgatggacaggaaaagtttgaaaccaaagtaaccacattggataatgggcttcgcgtggcatctcagaataagtttggacagttttgtacagtaggaattcttatcaattcaggatcgagatatgaagcgaaataccttagtggaattgctcactttttggaaaaattggcattttcgtctactgctcgatttgacagcaaagatgaaattctgcttacgttggaaaagcatgggggtatctgtgactgccagacatcaagatgaagaagtcgagatgacgcggatggcggtccagtttgagctggaggacctgaacctgcggcctgacccagagccacttctcaccgagatgattcatgaagtaaaatgtcaaactcgagaatgcccccgcatctcgaacagtggtcctcgggacaccaggggtggtggggagggtgcctccgtgatgttgtccttgcaggttatggatatatacagaacatttttttgttttttgagatgaggtttctccacattgcctacgctggtcttgcactcctgggctcagctcaggtgatcctcctgcctctgcctcccaagtagctgggattacaggcgtgagtcaccgcactcagcttagaacattcttgatttctgagtctgctgtttatacaatgttcgtattttccagtttttatagtaactaggtctttactactaaacacaattaatcttaggctttttgtgaatttgtattctggagaggcagattttactctttataaatacgcacgcagctgctattgccagagtgcaagtaaaatatcagcttgcgtcggattttcccagggctggctgcagatgggcgctggtgctgcttgttggaggaagcctggtcatgctgtcttcagtcacctgtgtctgtggctcttccccattaggcggcttacagggagaacacagttggcctccaccgtttctgccccacagaaaacgtagcaaagatcaaccgagaggtgctgcattcctacctgaggaactactacactcccgaccgcatggtgctggccggcgtgggcgtggagcacgagcatctggtggactgtgcccggaagtacctcctgggggtccagccggcctgggggagcgcagaggccgtggatattgacagatctgtggcccagtacactggggggattgccaagctagaaagagacatgtccaatgtcagcctgggcccgacccccatccccgagctcacgcacatcatggttggactggagagctgctccttcctggaggaggacttcatcccctttgcagtgttgaacatgatgatgggcggaggtggctccttctcggctggtgggcccggcaagggcatgttctccaggctctacctcaacgtgctcaacaggcaccactggatgtataacgcgacctcctaccaccacagctacgaggacactggcctcctttgcatccatgccagcgccgacccaagacaggttcgagaaatggtagaaatcatcacaaaggagtttattttaatgggcggaaccgtggacacggtggagctggaacgagccaagacgcagctgacatcaatgctcatgatgaacctggaatccaggcctgtgatcttcgaggatgtggggaggcaggtgctggccactcgctccagaaagctgccgcacgagctgtgcacgctcatccgcaacgtgaagccggaagatgtgaagagagtcgcttctaagatgctccgagggaagccggcagtggccgccctgggtgacctgactgacctgcccacgtatgagcacatccagaccgccctgtcgagtaaggacgggcgcctgcccaggacgtaccggctcttccggtagaaccgctccccggcctgacagacccagggagctgcagctggagcccgttcccgtgcgtgttagtttggacacgaatttagtctaaaaagctgtctggttgtataaacggtgcaaacaatgtcgccacagcacccacgcggtttgcattcttttggaactcaatgtgccgatcagtggagtcagtatcgagcctgaccaccgcaagccaggaagcaggtgaagtgcccagcgctggagtgcagcgtgccacgaggagggcggtcggtgcttccctcctcgggctgtgggcacatggggccccgcaggttccttggaggagccctgagctgggaggcagcaaaggctgacctatcaaagcctcccggaggccaccgtgctgggtaccaggactcacctctgacaagcaggagaaggtaagggcccggtcagctccaaggagcgcgctccacgcgcgtgcacacagcttccctggtaataaagagctggcatctttc

SEQ ID NO: 343792 - DNA, 1845 bp, Homo sapiens
agcggaagtgacgactgaagcggggcggagacgcaagatggcggctgtggtgctggcggcgacgcggttgctgcggggctcgggttcttggggctgttcgcggctgaggtttggacctcctgcgtacagacggtttagtagtggtggtgcctatcccaacatccccctctcttctcccttacctggagtacccaagcctgtttttgctacagttgatggacaggaaaagtttgaaaccaaagtaaccacattggataatgggcttcgcgtggcatctcagaataagtttggacagttttgtacagtaggaattcttatcaattcaggatcgagatatgaagcgaaataccttagtggaattgctcactttttggaaaaattggcattttcgtctactgctcgatttgacagcaaagatgaaattctgcttacgttggaaaagcatgggggtatctgtgactgccagacatcaagagacaccaccatgtatgctgtgtctgctgatagcaaaggcttggacacggtggttgccttactggctgatgtggttctgcagccccggctaacagatgaagaagtcgagatgacgcggatggcggtccagtttgagctggaggacctgaacctgcggcctgacccagagccacttctcaccgagatgattcatgaagcggcttacagggagaacacagttggcctccaccgtttctgccccacagaaaacgtagcaaagatcaaccgagaggtgctgcattcctacctgaggaactactacactcccgaccgcatggtgctggccggcgtgggcgtggagcacgagcatctggtggactgtgcccggaagtacctcctgggggtccagccggcctgggggagcgcagaggccgtggatattgacagatctgtggcccagtacactggggggattgccaagctagaaagagacatgtccaatgtcagcctgggcccgacccccatccccgagctcacgcacatcatggttggactggagagctgctccttcctggaggaggacttcatcccctttgcagtgttgaacatgatgatgggcggaggtggctccttctcggctggtgggcccggcaagggcatgttctccaggctctacctcaacgtgctcaacaggcaccactggatgtataacgcgacctcctaccaccacagctacgaggacactggcctcctttgcatccatgccagcgccgacccaagacaggttcgagaaatggtagaaatcatcacaaaggagtttattttaatgggcggaaccgtggacacggtggagctggaacgagccaagacgcagctgacatcaatgctcatgatgaacctggaatccaggcctgtgatcttcgaggatgtggggaggcaggtgctggccactcgctccagaaagctgccgcacgagctgtgcacgctcatccgtgagtaccgcaggggtagtgaggggctgccgcaggcctcggccaggctcagaggaggccgtctcgccctcccgcaggccgtggtgggcctgtggtatgtccatcacacccagaatctggggccttcaccagttgtcctcagcaggggcggccaagggcagggtcgtggggtcgcagacctggtctcacttcccggccccaccatgcacctgctgcctccttggcaggtgaccccaccctctgcacccctgggaggggctgtcactactgcccagagttgttaaagagcactcaagttagtaggcgagaagggctcagtagaggactgctacattgtacgtggagtagcagtggctcggaatgccgctgtaccgttgctggctctcgggcaggagtctca

SEQ ID NO: 343793 - DNA, 1036 bp, Homo sapiens
ggtttcactctgttagccaggatggtctcaatctcctgacctcgtgatccgcctgcctcagcctcccaaagagctgggattacaggcgggagccactgcgcccggctgcccttccctttcttatgttcagctttgggcacagagatggcgttttgccattgctcgagtggggggtggaaggtggcacggggcgggtgtgtgctcacctgactggaccctggccccaggtggagctggaacgagccaagacgcagctgacatcaatgctcatgatgaacctggaatccaggcctgtgatcttcgaggatgtggggaggcaggtgctggccactcgctccagaaagctgccgcacgagctgtgcacgctcatccgcaacgtgaagccggaagatgtgaagagagtcgcttctaagatgctccgagggaagccggcagtggccgccctgggtgacctgactgacctgcccacgtatgagcacatccagaccgccctgtcgagtaaggacgggcgcctgcccaggacgtaccggctcttccggtagaaccgctccccggcctgacagacccagggagctgcagctggagcccgttcccgtgcgtgttagtttggacacgaatttagtctaaaaagctgtctggttgtataaacggtgcaaacaatgtcgccacagcacccacgcggtttgcattcttttggaactcaatgtgccgatcagtggagtcagtatcgagcctgaccaccgcaagccaggaagcaggtgaagtgcccagcgctggagtgcagcgtgccacgaggagggcggtcggtgcttccctcctcgggctgtgggcacatggggccccgcaggttccttggaggagccctgagctgggaggcagcaaaggctgacctatcaaagcctcccggaggccaccgtgctgggtaccaggactcacctctgacaagcaggagaaggtaagggcccggtcagctccaaggagcgcgctccacgcgcgtgcacacagcttccctggtaataaagagctggcatctttc

SEQ ID NO: 343794 - DNA, 1013 bp, Homo sapiens
agcggaagtgacgactgaagcggggcggagacgcaagatggcggctgtggtgctggcggcgacgcggttgctgcggggctcgggttcttggggctgttcgcggctgaggtttggacctcctgcgtacagacggtttagtagtggtggtgcctatcccaacatccccctctcttctcccttacctggagtacccaagcctgtttttgctacagttgatggacaggaaaagtttgaaaccaaagtaaccacattggataatgggcttcgcgtggcatctcagaataagtttggacagttttgtacagtaggaattcttatcaattcaggatcgagatatgaagcgaaataccttagtggaattgctcactttttggaaaaattggcattttcgtctactgctcgatttgacagcaaagatgaaattctgcttacgttggaaaagcatgggggtatctgtgactgccagacatcaagagacaccaccatgtatgctgtgtctgctgatagcaaaggcttggacacggtggttgccttactggctgatgtggttctgcagccccggctaacagatgaagaagtcgagatgacgcggatggcggtccagtttgagctggaggacctgaacctgcggcctgacccagagccacttctcaccgagatgattcatgaagtaaaatgtcaaactcgagaatgcccccgcatctcgaacagtggtcctcgggacaccaggggtggtggggagggtgcctccgtgatgttgtccttgcaggttatggatatatacagaacatttttttgttttttgagatgaggtttctccacattgcctacgctggtcttgcactctgggaggcagcaaaggctgacctatcaaagcctcccggaggccaccgtgctgggtaccaggactcacctctgacaagcaggagaaggtaagggcccggtcagctccaaggagcgcgctccacgcgcgtgcacacagcttccctggtaataaagagctggcatctttc

SEQ ID NO: 343795 - DNA, 816 bp, Homo sapiens
agcggaagtgacgactgaagcggggcggagacgcaagatggcggctgtggtgctggcggcgacgcggttgctgcggggctcgggttcttggggctgttcgcggctgaggtttggacctcctgcgtacagacggtttagtagtggtggtgcctatcccaacatccccctctcttctcccttacctggagtacccaagcctgtttttgctacagttgatggacaggaaaagtttgaaaccaaagtaaccacattggataatgggcttcgcgtggcatctcagaataagtttggacagttttgtacagtaggaagtaagtactgttgtgttgtcgtgggtggtcccgcagttttaacatgcacatgctttagttgactgttagttgtaattagcatgccaattatgaattgtaccctgagtggaaacaaagtgtacgatttcataaatgttgagctacacatatacctgtgaaaccatcagcacaatcaccctcatgtaattaaatctgattatcatgtcatattgacatcttaaaatgtttctcttgattaaatcttattttgaatatctgatgtaacctgtcaattttctttttactactagttcttatcaattcaggatcgagatatgaagcgaaataccttagtggaattgctcactttttggaaaaattggcattttcggtcagtacccagttttgtaattttttagactatacttttgaaggatgtttgagatttttcttgtctataatggttattttaataaattatcaagttgctaagttaatgttaataaaagacttttaagttaaaaga

SEQ ID NO: 343796 - DNA, 528 bp, Homo sapiens
gactgcagtcgactctaaagatccccccctcagattacctcaatcattcaataagtgtttgtaatagtggaaaagaaaccagaataaacacaaatatttaacaacagggactgaaaaaataattaatagaaaattgtattttatgactacttgacctcatagcagccatcaacataactaactccttgcagtccttcttggtcaaccctggctccgcttttgtacaacttacaaatgctgaatcacctggtcccacatcacagttgcaaggcccctttctattctcaaatcaaatgccctggctttaggcagcagctatatgctataatctaccttatgtctatctccagctgtgcctggaattagctgagtaaccaaatgactacttgacctctctacgattgtctaaaagacagttcaattttcaagtacaaaataaaactcttggctggcacagtggctcgagcctataatcccagcactttgggaggcccaggcgggtgcatcacttgagtaatccgtgatggt

SEQ ID NO: 343797 - DNA, 519 bp, Homo sapiens
cttgatgtaccagccccgcacaccctacggtctctgactggagaaaagcctgtacgagtggaaaagaaaccagaataaacacaaatatttaacaacagggactgaaaaaataattaatagaaaattgtattttatgactacttgacctcatagcagccatcaacataactaactccttgcagtccttcttggtcaaccctggctccgcttttgtacaacttacaaatgctgaatcacctggtcccacatcacagttgcaaggcccctttctattctcaaatcaaatgccctggctttaggcagcagctatatgctataatctaccttatgtctatctccagctgtgcctggaattagctgagtaaccaaatgactacttgacctctctacgattgtctaaaagacagttcaattttcaagtacaaaataaaactcttggctggcacagtggctcgagcctataatcccagcactttgggaggcccaggcgggtgcatcacttgagtaatccgtgatggt

SEQ ID NO: 343798 - DNA, 454 bp, Homo sapiens
ccattaatcaccacttactatacacctataggatcagtaaagttaatccgtaaagagattgaatttcatgactacatcagctcgtatccaccctcaacactgcccgtccctttcaaacgttattactaaaaccctcctcgccgttttgtacaacttacaaatgctgaatcacctggtcccacatcacagttgcaaggcccctttctattctcaaatcaaatgccctggctttaggcagcagctatatgctataatctaccttatgtctatctccagctgtgcctggaattagctgagtaaccaaatgactacttgacctctctacgattgtctaaaagacagttcaattttcaagtacaaaataaaactcttggctggcacagtggctcgagcctataatcccagcactttgggaggcccaggcgggtgcatcacttgagtaatccgtgatggt

SEQ ID NO: 343799 - DNA, 759 bp, Homo sapiens
tccaatacagtgccctggttttcctctaacatctctcaagagctctaccttttgtccctgactccaaatgatgttttggggttttttgcttttctttcccctgcaagtgttctgcattacacccttttctcactctgtaccctttcatccgctagggtcttaactactcctctcagctgtgattctcatccttaagtcctggtctttcctcaaatattgctacctgcctgttggacatatttcactgtatgttctgctcactcctccagctcaacatttctaaactgtagtcactgtccccaccagaccttcttcttttgacctgcccttttccttggtatcaccatttccaaaagcatgaaactttgggtgactcccattcctactactgtcaggaatcaacctaacaccatatttttctatcacactccttagaggcttgtactactcttcatctggattataagtcccaaattatttaggctccaaaatactctactcactgctaccaaactaatctccataaagaatcatgttgatgccctcagtggcttcccacagccttccaaatgaagtcccaacatctgagactggtatcaaagggtcagcccttcctttccagtcatctcccactcccctaccatcatagatcctgggctctgtaagtggatgaatcactcttctcccaatataccctaaaccctgttgattttgaactgcctatgctattcccttcaacatatctttctgcctacaaag

SEQ ID NO: 343800 - DNA, 547 bp, Homo sapiens
  misc_feature (3)..(3): n is a, c, g, or t
gtnaaagggcaaccaagctgggcggccccgcatagggttttttctttttttttgttcaaagtgaatacatgattatttttacttctgtacaatatatttaatatgaggtaaaactatcacatggctcaaaatctagtcttaaaaatataaaaaaggaattacaaaacgctctaaatgtgtagcattttaatcaagcctaagtccatggtgacaactgtgaaagtcacacatccctacatatatgcatgccggcttgcctgttaaaattccagttaaagtgaattttcacacactctttaaaaagattaaaaatgacattccttctatgtttgttcttctgagtttatcatgatctttcaaaggaattcagctacatactgtatttttgggggggccttaatttgacctttagaaaactgaggtggacctaactcaaaggagaggtaaagaagctgagaaaccacaatcataggaaaaaactaagattcccaggattactgtgggcatgaacaattacactatcatccctatcccaggaaaacttaaa

SEQ ID NO: 343801 - DNA, 377 bp, Homo sapiens
ctcctaaaccaagtaagtaaataagtaaataaataaaaaaggctttgaggagttcaaagtgaatacatgattatttttacttctgtacaatatatttaatatgaggtaaaactatcacatggctcaaaatctagtcttaaaaatataaaaaaggaattacaaaacgctctaaatgtgtagcattttaatcaagcctaagtccatggtgacaactgtgaaagtcacacatccctacatatatgcatgccggcttgcctgttaaaattccagttaaagtgaattttcacacactctttaaaaagattaaaaatgacattccttctatgtttgttcttctgagtttatcatgatctttcaaaggaattcagctacatact

SEQ ID NO: 343802 - DNA, 639 bp, Homo sapiens
ccatgttgcccaagctggtcttgaactcctaggctgaagcgatctgcccacctcagcctcccaaagtgctgggattataggcatcagccaccttgcccagccactgttctttctttctgtctctgccttctttccattcaagttagaaaataatcttcctgtcagtctgcctccattccagtgatgggcacataaatataactctcctggttggaaagctttcctctttctgagtaactgacatttcttgtcttcttggggctatcatgtgctaatacccacaataacatcaaaacctttcctgttatcccactgcccttacctattgcttttgtacttttgctttactttagccacaccatgttaccatatgtgcctcttccaggcatggaagctacatataacaccagcggcagtcagacgaggtaagcacatgagactcagcgtgtgtgtgcgcgtgtgcgtgtgtgtgtgcaagagagagagtgcatacataggtggtgtggatcgtctgtggcatgactttgacctcttgtccttgtaaacctgatctatgtctctcagataaacatttctgagattgaaatctgttctattacaagcagcaactaggaatgtgtaataatacaatttgttaaa

SEQ ID NO: 343803 - DNA, 2499 bp, Homo sapiens
aaataaaagaatattgggcagagtaaatttgtctttaaatgatagccattatggacagcaagataaaggaacatctctcagagaaacacaagaaatgactgaaggatcaagactagaaccaaactctgagtttggcaaagaaagtacctttggaatttcctcaaaagagtcgatgtcttgccatgatgaaagctctgtttccctaagaagcctgaaatccattgaaataatgccttctcaagaaaattcagaaactaatgttaacagtgaagaaactgacctgaaaaatctttgtaaaccaaaagatggtgaaatgctttgtgaaaatgtaaaggactgcacagtccttcctgagatgaaggaaatagtatcaagagattggagtaattctagtgacagagacagcgtatgtacctgtgtggaaaagaatgcttgcaaagcttgtcaccctcacgagaattcctctgacagacatttgcctttgacagtgaaaacagatattaaagtgaaaggagaagaaaccgaagagcatcagaggggacgactgggttacttaactgttggggagcaatctgaggagttggttaccagagaaactggcgatggcgatcccgtgagcaacatctctcagacccattttaaatgccgggggatacttaatcatgctgaaaaacagcagagccctgaggttttggactacatgttgcagaaagaagagaaatatatacgtcaacaaaaagcacatacgatatcgcaacagtgcatatcatctagtctgttgttagatgatgcacaaaatcagaaccaaccgaaggctgacaaagatgagtccaccatgatcaatgaaatcaccctagcaaagctggccaaggacagcattgtggcacagactcagaagttagaagaccagaaggaggaaaggttacatcatccattaaggaaggacactgagtcatgcacaagtccttgccttcttggtgcccctcggaaagcacaagacccctcctctgctgggtgtgatcaaatacatggtgcctttgcgaagaaaggagttcttcccttaaagaagcagccccatcgaacttgtaagaaagtttcctatcaggagcaaatcattgttgggagaaaaataggtaaaatcagaagttctgcctttttaaagagttcttccaatcccatccccacaaaagcgcacagacttctcagtttgtgtactctgtctgcacctacacgattagaacctgaaacagcacctaccaagagcttggttagtcacataccaaagcagatgtctacaccgtgccatcccttgaggagcctgaattttaggaagactaccaaagaatcagccttactaaacaagctgtccatccttgcctccaaactggccccagccatgaagactcagaagctaagataccgacggtgttcctctgaacttcttccaatggctaaaagctacaagcgcctcagatataaaagactcctggacggattttcatccagcacagagcagctgaatccatatttggcagctagcatggatgggataagaggcctaacagtaagcccatggcactttattctctcgaatccatcaagatgaccttcatagatttgagcaacaagatgccgtccctgctgtttggttctgaaatcttcccagtatcctttcatgtgaaatcatccagctcagattgcacgactgagtcctcaaggacttttcctgagcactgtgctccggcaaggcttgccttaggagaggccctccagtgcccgtctcaacctcccaagtggaccttttctttcttcttgtcccacggttgccctgggatggcaacattcagggaagacactggcgtccatagtcagacccacactcaggctcctccccagcctccagctcctctccaagactatggaggcactgccatagtccagaccagagcagactgctctgtccttggccttcacacacttctagcactttgttccccaggatgttaccgaatctggacaaaaaaacggagcttctccagccacatgcctaccatgcagaggctcttcatgacccagtttacacagggcctgaaagggttacggtctccagcctccatagcagacaaggtcttctgttctctgccctactcggtgggcagagtcctatccatttggagccagcatggtccttctgtctgctccttcgaaatctcttctcttcattcccctcactgcaagcggcaaccaagtctgggcaccacaagcagccacaccatgttaccatatgtgcctcttccaggcatggaagctacatataacaccagcggcagtcagacgaggctggagcctccattccctgccttggtaccaaagtcttgcttggtagcagaatcagctgtcagcaagctcctgctttcagcctctgagttccaggttcgtggattggatgagctggatggtgtgaaagcagcatgcccctgcccacagagcagcccccca

SEQ ID NO: 343804 - DNA, 834 bp, Homo sapiens
cagagtggctcgggtcagcgcagccagcccagctccctgcagcccaagtctcaagcctccaaacctgcctacggcaactctccatactggacaaactaaacccagaagagaggggtgggctggggcaaggcttatcctgggcaggagagaacacacgagcacgtatttgggagcccagtgccctttcctagaattcccgacatgtgtcagccatgcctctgtggggagtttgggggatggcggcagatgttagccaggtctgccctccccattcaagccccttctccactgtagcaaaataagcacccccaccccatctgccttcaggtcttcttcacagcctgcactgcccagtgggccactaggggcagtctctggaagggctggttcaaggctgtttgggtataggggtcaggtaccaatgaagaatcacgacttgtctcactcctttggaaattgttttctttcctgtgtaattacttcatacctctgtttttgagaaactgttccgtttgtcatctgtcatggtctccttccaccaaatcttcatctgggaatagcagcggtatccctccacccaagtatggccacctgtttgtcttcatatagaacaggggcttctggtctggtcatgtccctagagacttactagagactggctgaccatgaaaaaaaaaaaaataatctgagttattcagccagtcagctcccctttaaaaatctaaggtatctccaagcaacacatctccattctagttgtcttgaaccacgtgggcaactgtttcaggggttttctcttgcccaatccccacctaataaagttctgagagcatg

SEQ ID NO: 343805 - DNA, 820 bp, Homo sapiens
tttatctatgaacaaggtttatatatggaagagactgccaataaaaagaaggcctctgtaagaactgacctaggtgtaagttgaccctttcattgcttatgtttgtttttgacctgcccttcctttagagactcaagtgctttccctgggttttagaagggtcaaggttgctcctctttcctaactggaaaagacaatgatgttttatttccaagcacatatctgagttgtatgtgtggacagcactgagactgagtctttccacagctaggactgagtgtctccacatcctttctgaagcctacgaagctcatttatgtgctctgagatacatctattcaagcacataccaaggaaatgctcactgtgcatttggaagtaggtgttggacagttggactgcagatgttaggtgtctgtgtctctccacaacataggcatcaaccccaatctgccttacgttggccgtgagcattggtagagtcagcctgacttggcggaagcacgtgtaggtggtcttgcctgttagcttcttactcccccttgctgtgccctttgaggagtttgcctcacgttataattctacatattaggctcagcacctgtttttctttctggatgcatctacagcttaggttcctttaggtgtgaaaagtatgtccccatataggataggttgggttataaaggtgtcatttcctattctttgctgcatcttgaacagctgaccatggtgtggtgtcctttgatagtgttgtttgacagacaaagggctatctggcgatatgcttggcattttcctggggaatgtaactttatgg

SEQ ID NO: 343806 - DNA, 4615 bp, Homo sapiens
cggcggcggcagcgggtcttgggtcctccgagagcagcagcgattttctattttgtacatacattattttgtatatactgtatatgatgacttcagtgagcagtgaccattgtcgaggtgctcgggaaaaaccacagatttcagcagcacaatcaacgcaaccacagaaacaagtggtacaggcaacagctgaacagatgcgtctcgctcaagtgatctttgataagaatgattcagattttgaagctaaagttaagcagcttatggaagtgacagggaaaaatcaggatgaatgcatagtggccctacatgattgtaatggagatgtgaacaaagctatcaatatattgctggaagggaattcagacacaacttcatgggagactgtagggtgtaagaaaaagaattttgcaaaagaaaattcagaaaacaaagagaatagagagaagaaaagcgagaaagaatcgagtcgtggacgtggaaacaacaaccggaaaggaagaggcggcaatcgtggcagagaatttagaggtgaagaaaatggaattgattgcaatcaagtggacaaaccttcagatcgtggcaagcgagcccggggtagaggatttggacgtggcagagggagaggggcaggaaggttctcaacccaaggcatggggacatttaatcctgcagactattcagattctacatctacagatgtgtgtgggacaaagctagtagtttgggaagctgctcagaatggtgcagatgagggaactgaactggcatcaaatactcacaacatagctcaggatctgtcaaacaaaagttcttatggactcaaaggggcttggaagaattctgtggaagagtggacaacagaagactggactgaagatctttctgaaacaaaggtcttcactgcctcatctgctccagcagagaatcacatcttacctgggcaaagcattgatctggtagccttgctccagaagcctgttcctcacagtcaagcctcagaagccaactcctttgaaacttcccaacagcagggctttggccaagcccttgtcttcacaaattcgcaacacaacaatcagatggcaccagggactggcagctccactgccgtcaactcctgttctcctcagagcctgtcatccgtccttggctcaggatttggagagcttgcaccaccaaaaatggcaaacatcaccagctcccagattttggaccagttgaaagctccgagtttgggccagtttaccaccaccccaagtacacagcagaatagtacaagtcaccctacaactactacttcttgggacctcaagcccccaacatcccagtcctcagtcctcagtcatcttgacttcaaatctcaacctgagccatccccagttcttagccagttgagccagcgacaacagcaccagagccaggcagtcactgttcctcctcctggtttggagtcctttccttcccaggcaaaacttcgagaatcaacacctggagacagtccctccactgtgaacaagcttttgcagcttcccagcacgaccattgaaaatatctctgtgtctgtccaccagccacagcccaaacacatcaaacttgctaagcggcggatacccccagcttctaagatcccagcttctgcagtggaaatgcctggttcagcagatgtcacaggattaaatgtgcagtttggggctctggaatttgggtcagaaccttctctctctgaatttggatcagctccaagcagtgaaaatagtaatcagattcccatcagcttgtattcgaagtctttaagtgagcctttgaatacatctttatcaatgaccagtgcagtacagaactccacatatacaacttccgtcattacctcctgcagtctgacaagctcatcactgaattctgctagtccagtagcaatgtcttcctcttatgaccagagttctgtgcataacaggatcccataccaaagccctgtgagttcatcagagtcagctccaggaaccatcatgaatggacatggtggtggtcgaagtcagcagacactagacactccaaagacaacaggccctccctctgccctcccgtctgtgagctccctgcccagcaccacctcctgcactgcacttctgccgtccacatcccagcacactggcgacctgactagcagccctctctctcagcttagcagttcgctctccagccaccagagcagcctctctgcacatgcagccctctcctcgagcacgtcacacacacatgccagtgtggagagcgcctcttcccaccagtcctcagccaccttctccacggcagcgacctccgtctcaagttccgcatcctcaggcgtcagcctgtccagtagcatgaacaccgcgaacagcctctgtctgggtgggacccccgcgagtgcatccagcagcagtagcagggccgcgcccttggtgacctcaggcaaagcacccccaaacttacctcagggggtgcctcccctgctgcacaaccagtacctcgtaggtcccggaggactgcttcctgcctacccgatctatggctatgacgagctccagatgctgcagtcacggctgccagtggactactatggaattccctttgctgcacccacagcgcttgccagccgagatgggagcctagctaataatccatatccaggtgatgtcacaaagtttggccgtggggactctgcatcccctgcacccgctaccacaccagctcagccacagcagagccaatcacagacccaccacacagcccagcagcccttcgtgaatcctgcactgccacctggctatagctacactggtcttccctactacacaggcatgcccagtgccttccagtatggccccaccatgtttgtccctccagcctcagccaagcaacatggggtgaacctcagcactcccacacctcccttccagcaggccagtggttatggccagcacggctacagtacaggttatgacgacctgacccaggggacagcagcaggagactactccaaaggtggctatgctggatcatcgcaggcaccaaacaagtctgcaggttctgggcctggcaaaggagtatcagtgtcttcaagcaccactggtctacctgatatgactggttctgtctacaataagacacagacttttgacaagcagggatttcatgcagggacgcctccacctttcagcctgccctcggtcttgggctccactgggcccctggcctcgggagcggcccctggctatgcacccccaccattcctacacatcttgccagcccaccagcagccccactcacagctgctgcaccaccaccttccgcaggatgcacagagtggctcgggtcagcgcagccagcccagctccctgcagcccaagtctcaagcctccaaacctgcctacggcaactctccatactggacaaactaaacccagaagagaggggtgggctggggcaaggcttatcctgggcaggagagaacacacgagcacgtatttgggagcccagtgccctttcctagaattcccgacatgtgtcagccatgcctctgtggggagtctgcctcccagactggctactgtatgtaatgtatttatgtatgtatttgtaaatgtgatagaagtctgggggggagttgggggatggcggcagatgttagccaggtctgccctccccattcaagccccttctccactgtagcaaaataagcacccccaccccatctgccttcaggtcttcttcacagcctgcactgcccagtgggccactaggggcagtctctggaagggctggttcaaggctgtttgggtataggggtcaggtaccaatgaagaatcacgacttgtctcactcctttggaaattgttttctttcctgtgtaattacttcatacctctgtttttgagaaactgttccgtttgtcatctgtcatggtctccttccaccaaatcttcatctgggaatagcagcggtatccctccacccaagtatggccacctgtttgtcttcatatagaacaggggcttctggtctggtcatgtccctagagacttactagagactggctgaccatgaaaaaaaaaaaaataatctgagttattcagccagtcagctcccctttaaaaatctaaggtatctccaagcaacacatctccattctagttgtcttgaaccacgtgggcaactgtttcaggggttttctcttgcccaatccccacctaataaagttctgagagcatgaaaaaaaaaaattaaaaaaaaaaaaaaaaaaaaaaaaaaaaaattttggggggcgccggggccccagaaaaaagcttttagaacacaccatccgggtgggggcggcggggccccaagggagaaagggacacacggggacaaaaaggggtacacaaggaaacccggggacaggagaaaaggggcgggggattctctcccccaaataataaaaacgcgccggggggagaacacgcggagggttttggagaacaaatcccaaagaggagggtccgggagggccaaacagggagactctatacaaagagggaggtccaaagagggagaccacgaaattacaaaatagaccccggaacgcgggcgg
